United States Patent Application Publication US 2008/0039413 A1 - sequence listing, part 14

SEQ ID NO: 1731 - DNA, 51101 bp, Homo sapiens
  misc_feature (1)...(51101): n = A, C, G or T/U
agccgggcatggcagagtgtgcctgtagtcctagttactcgggaggatgaggcaggagaattgcttaaacccaggaggcggaggttgcagtaagccgagattgcgccactgcactccagcctgagtgacagagcaagactctgtctctagttaaaaaaaaaaaaaaaaaaatagctgggtgtggtggcacatgcctgtaatcccagctacttgggaggcagaggcaggagaatcgcttgaacctgggaggtggaagttgcagtgagccgagatcgagtcacactacactctagcctgggcaacgagagcgaaaactccatctcaaaaaaacaaaaaaacaaaaacaaaacaaacacacacacacacacacacacacacacacacacacaggagcaggggccaggtgcggtggctcacgcctgtaataccagcactttgggaggctgaggagggcagatcacttgaggtcaggagtttgagaccagcctggccaacatggcgaaacctgtctctactaaaaatacaaaaattagctgggtatggtggtgcatacctgtaatcccagctactcaggaggctgaggcaggagaattgcttgaacccaagaggtggaggttgcagtgacccaagatctgccactgcactccagcctgggtgacagacaagactctgtctcaaaaataaataaataaataataacggttagaatgataaactttatgtatattgtaccacaataagaagtaattttttaaaagtggtagctgaactagttttacgtgtattaatagagatggatttcaaaacagagacagaagcatgttgcagaataggatgccatattttttaacaaaaatactacccaaaacaacactaaataaatctgttgtgcattcatatgtatatatgttaaagaataaaaatggtctggaaaaattcacaccaaggagtgttaacagtggtcgcccatggggagaaaggatgaacagttggtggccaaggagaacttagtttctttgtcctaatttatttatttgtaaaggatgatggcgtggaagactaaataataattccccaattacacccacatcctcatgccctgccagcgttgttttgtgtggtacaaggtctttgcaggtctgattaagcgaagggccttgcggtggggagtggcgcctgggctatccaggtgagtccaatgtcatcacaaaaggcttcctaagagggaggcaggagcgtcagggtcagaggaggcaatctgaaaacaggcagagattgaccgaggcccctagaagctgggagaaaagcaagggagctgattctcccctctgagtttccagaaagaaccagggctgccaacatcttgactttaggacttcgtgattttggacttctgacctgcagaactgtaagagaagaaatgagtgttgcttaagccactaagttagtggttgtttgtcacagcataggaaatgaatacaggattcatagcttccctgtacagttaaacattatgcagttatataaatagaaaggcttgggaggagggagtagatttcgagtgcatcagataaggcacccccctcttgaaagaagagcgtaaactaggtgggtttctgtagcactgacgttgagggcaacaggtccaggaggtgaagaggtgggggtgactgaggtgggagctgacataagatcattagcatatgcagaatcacctcgagaaggaccgcaaggtaagagcagaataaactggtatcttcacacattttctgcctaagacgagacatgcaaaatttcacagtgattagaatgttccagatttagtgcctggattaacaccttctgctgagaagaatcttcacttgaaaaaaaaagaagaaaacaccctgcatggaattcaaaggaaaaaaaaaaaaaaacaccaacgttattttcagcactactaggggaaaggtaaattcaggcaacacctgttgaataggtttcaagagtttttggaaccagctatgggtcagctaatgtcgctaaggagttatattgatttgtccttagctatatgattgcaaagtgacacgttccatataagtagagtgtgatctctcttgctttaaaaaaaaaaagtaagtgggtaggagggtggatatgaatatagttgcttgaataagcactgaaaaaacttctggaaggaaacacaagttgttaatggtttttgtttgacccccttatctactatttgaattttattttatgccattttattattatttttgagacagggtctcgctctgtcacccaggctggagagcagtggcacgatcatatctcactgcagcctccaaatcctgggctcaagcaatcctcctgactcagcctcctaagtagctgggactacaggcatgtgccaccatacccaggtaattttttttttttcgagacagggtctccctttgttgcccaggctggagtacagtggcacgatcactgctcactgcagcctcgacttcctgggctcaggtgatcctcccatctagtctcccaagtgctggaattacaggcatgcatcaccacgcccggctaatttttgtatttttagtagagacagggtttttccatgttgcccaggctgatcttgaactcctgggctcaagagatcctcccacctttgcctcccaaagtgccaagatcacgccactgtaaccgagatctaccttccgggttcaagagattcttatgcctcagccttccgagtagctgggaccacaggtgcacaccaccatgcctagctaatttttaatttttttgtagagatggggtttcactatgttggcctggctgctattttttttttttttgaaagacagggtcttgctatgtcgcccaggctggtctggaactcctgacctcaagcgatccacttgcctcggcctcccaaagtgttgggattacaggcgtgagccaccatgcccagccaaggatctttttaattttttaaaattaaaaagnnnnnnnnnnnnnnnnnnnnnnnnnnnnnnnnnnnnnnnnnnnnnnnnnnnnnnnnnnnnnnnnnnnnnnnnnnnnnnnnnnnnnnnnnnnnnnnnnnnnnnnnnnnnnnnnnnnnnnnnnnnnnnnnnnnnnnnnnnnnnnnnnnnnnnnnnnnnnnnnnnnnnnnnnnnnnnnnnnnnnnnnnnnnnnnnnnnnnnnnnnnnnnnnnnnnnnnnnnnnnnnnnnnnnnnnnnnnnnnnnnnnnnnnnnnntgtctttcaaaaagaaaaaaaaatagcagggcatagtggtgtgtgcctatggtcccagctactcaagcaggctgaggtgggaggatcacttgagcccaggagcttgaggcttgagcagtgagccaagattgtgctgctgcactccagcttgggcaacagagaaagaccctgtcaaaaaacaacaacaaaaaaaagtgattcaatttctatgaaattatcctacatataggcttaagatgtacagaaagattaagtacacaaggctgtttttcacagcttattgtatggacaaagagaaatctaaatgccacagtaagtcaggcatggtggcacatacctgtagtctcaactactcaggaggctgagtagggaggattgcttcaggccaggagtttgaggctgcattgagctatgatctcatcactgcactccagcctgggctataacatgagaccctgtctcataactaaatgcatccatgtatgccacagtgtatactctggaatactatacagtagttaaaaagaatgtggtatagctgaaagtacagtaccgaaatgccattgcagagtagtaagaccccacttctattaaatgaaaagttaacttatgtacatgtttatcttttttgagatggagtcttgctctgtcgcccaggctggagtgcaatggcgcaatctcgactctctgcaacctccacctgtccggttcaagtgattctcctgtctcagcctcccgagtagctgggattacaggtgcccgccaccatgcccagctaattttttgtatttttagtagagacaggatttcaccatgttagccaggctgttctcgatctcctgacctcatgatccacccgcctcggcctcccaaagtgctgggattacaggcgtgagccaccacgcccagcccgtacatgtttatctttttaaaaattctagaaccgaaacaaaactgatcactgtggctacctctgggacatgggttcaatagggtttgttgttaacttttcagcttacacacttctcacagtttagacagtttttacagtaaacaaacgttatttttaagtatttggatgttaatttgtatattttattataaatagttcaaatttatcaaaaggaatagataataatataagcccatgactcagttaagaaattcaaggtgcaaattacttttgtaactaaagaagcaagcaaacaaaaacctataaaggtttcctaaaaaaaaacaaaacaaaacaaaacaaaaaaccaccttgagagggtttcagtttctagtttctctctagagaatttgcaaacccaatgcctggaaatcctgtctttgtacttttacctatgtgtaaaccaactcaagtgttataaccacttagacgtaaggtttttcaacattgtcagggttcgaggtgaatgttagagctgagttaatttcttagtggatgaacctaatcttcttgaaactgtcaggcttatcgcaatgcatataagcagagaacaggctgttgcctctgtggtttatctgcggtgtcaaggcaaatcaggcaaaaaatgctgcagggccactttctgaaggctattttaatgaggaaagcaaggttctgggacttgaaaacagttggggtcctctctaggggtgaccagagaaatcattcataagggaagcaaaagctaagtggtcttgccaggcgcggtggctcacgcctgtaatcccagcactttgggaggccgaggcgggcggatcacgaggtcaggagatcgagaccatcctggctaacacagtgaaaccccatctctacttaaaatacaaaaaattagccgagcgaggtggcgggcgcctgtagtcccagctactcgggaggctgaggcaggagaatggtgtgaaccccagggggcggagcctgcagtgagccaagattgtgccactcactccagcctgggcgacagtgagactccgtctcaaaaaaaaaaaaaaaagttaagtggtcttgcagttgttctccctggctgggttgatcaacacaagaggtaaaaatagctttatcacctctttttaaatatgaaataatgatgcaaaacagaagcatttttgttgagagataaaaaaaaagagcaagattaagacccccatcttcctttaagtaaatagtaagaaaagtgaattttcagtaacactccagcagggagtttagtgaaaatcaggctgtgaaaatctgccctgctctgtttcatggcatatcacccaatacatttttatttattgtgggttggtgcagcacgtaagtttgggtttgcaggattttgttatttttgttggtgaccattttggttttgccagtgatatttaataaactcttttttgtttttcttgaggttgtgagcagctacatttacattagttatattcgttttcttccttttagttaaaaaaaaaaatacaaaaatccttggccgggtgtagtggctcactcctgtaatctcagcactttgggaggccaaggtgggtggatcacctgagatcaggagttcgagaccagcctggccaacatgttgaaaccccgtctctactaaaaatataaaaactagctgggtgtggtggcatgtgcctgtaatcccagctactcaggaggctgaggcatgagaatcacttgatcctgggaggcggaggttgcagtgagctgagatcatgccactgaactccagcctgggcggcagagcgaaactctgtctcaaaaaaacaaaaacaaaaccaaaaaaaacttcaatccacaagcattgttgtaaccttaaaaaaaaaatcactaacttctccactaacaacttaaatactttgttaccctcgagtctttgtcctatagaaatatagcttgttcattataatcagtctgtatacacattatacatgtgatatatatacacagacacacacacatacagagaatgagagagagagacagagaaagagacagggtcttaatctcttgcccaggctggagtgcagtggtgcgaccacagctcactgccgcctcaacctcctgggcctcaccaatcctcccacctcagcctcccaagtagctgggaccacaggcatgcgtcaccgtgccgggctatttttttttaattttatatttgtagagacagagtctccctctgatgcccaggatggccttgaactcctgtactcaagggatcctcccaccccaggcttccaaagtgctggaattacaggtgtgagccaccatgcccagcctacatttatattttgcctttgtaccttaactcatgttgctttttccacgtagcttcatagtctttgcgtatcttattttaatggctgaaaatataccattgatcagatttactacaatttacttaaccattcccatagtgttggacatttaagttctcataatgtcatttattcaccctcccctcctatgaccattctatagacctccgtcttccaggctgaagtgactctcctgcctcagcctcccaagtagctgggactacaggcatatgccaccacacctggctaattcttgtattttcggtagagatggggtttcattacgttggccaggctggtctcgaactcctgacctcaagcgatccacccgccttggcctaccaaagtgctgggattacaggtgtgagacaccaggcctggccccctacctttataacacaccaaaataacatcaaccctaaatataattttaaaaatactattctatatttgtatatcttctcttgctctccaaagcagagactgtatctaaaacgatttcttttttctggatgactagtatgtaggtcattttggacatgtaggtattagtacatgacagtgacatggtggtgacatcaggctgtgagtccccagagaagcatggctgttccacctgacacctgggggaataattcctctagtgcgcacacatagttttgtagctatgtgtgctatgctatggacaccttcttattaatacattttttcccagcgtctcaaactggaaattatttctggataaatctaccaatgggagagaaagaattctaatcccaaggctagaagatttttaggttcaactatgcaaaggttgtgtgtgtgtgtgtgtgtgtgtgtgtgtgttttaagtatgcttgccaaacaattcccaatattgtgtaacaggagactcattgctcagacggcaacaatgctcccattgagagtgaagctctggcacatgcatacattgcccttgattcaccagagcaaactcttagttaacccacaagcattacaagcagatgtaggtgcataaagaaacccaaatatcagccaaccgataaaaggaaaaagacatgcaaatccatccatgcattaaattgacaggtttgacactgacgcaaggaagctttgacattttcttttcttctctcaatcccctttaagaatgacaagaagtttttagagcagcagaaaacaagatgattttgtggtttgctctgtttaacaaaggaagtggtgtatgactccaataggttggtggcagatagcaagtatgagaatagttataaaaggactgggcaagggtggcaagtgagccgtgtttaaacttagtacgtttagaggtcactgtatataggtatgccattctgaagccagttttgttcctggggtatgttcttggttaaatcacatcatccctctagattctggagagctctgacccctaccttattctcaccttctgtggggactatgagaaattcctggacatcttaagcctcatagagaggatttcctggaaatagagctactattctcaatttgacaggtctattcttctcctggagggagaaggaaaaaagaaacgccagcttcctacatctccttcccacttgtgtcctttcctccttagagccatctttcttcaccaagtataacaagttagaaggaagaaaattaccgagtgtccttttgagctcaataaaacctttagcttggccgggtacggtggctcacgcctgtaatcccagcactttgggaggccaaggtgggcggatcacgaggtcagaagatcaagaccatcctggccaacatggtgaaaccccgtcactactaaaaatacaaaaaattagctgggtggggtggcgagtgcctgtagtcccagctactcgggaggctgaggcaggagaatagcgtgaacctgggaggcagagcttgcagtgagctgagattacaccactgcactccagcctgggcgacagagcaaggttccgtctcaaaaaaaaaaaaaaacaaaacaaaacaaacaaaaaaaaacctttagcttacggattatatgaaacatttcttttggccgggcggggtggctcaggtctgcaatcccagcactttgggaggctgaggtgggcggatcacttgaggtcaggagttcgagaccaacctggccaacatggtgaaaccccatttcgactaaaaacacaaaaattagcttggcgtgatggcgcatgcctgtagtcccagctacttggaaggctgaggcaggagaatcgcttgaacccaggaggcggagattgaggtgagctgagatcgcaccactgcactccagcctggacgacagagcaagactctgtctcaaaaaataaaaaaagcaatagttcctctaactttcatcatttttctgcaaacacgagcccttagtacaacgggctggaaggagagaagaggttggcagagcccagcctaacgtatggatggagaacacagaccttatgttttacccatggagttgcagaagaatcagctttatacacaaagcccctaagtctgccgataagcatttgctgaatgcctcgactgtgttcagagctgagttatgagacgaggtcagtgtgttatgatgccagcgtggtggacgccagactgggagccaggagacctgccaattacttgattttcagaaacaaagcaaaagcccaaaaaatttccccttctcagggcttcagttcccttatgtgtaaaattagggggctgtcatggttaacctcagccttaggtttcttctaactagaactgtgacagattccaaagtaggataatgagttcccaggctcctggatcttaagaggcttcccggtagctgagagactgagagcgactgcaccctaaatcgtgttgtttctgaaagagcacaggttggcccacctggatgtctgggcaccttcctctgaggtgatgcaaaggggccactcaatgggtccttgctcaaaatgctccagccttactggccttcttcccattcctgaatgcaccaagttagtcctgtcccagggcctttgcacgtgctggttttgctgccttgagcttcctacaggaatggtggctggttcctcccttctcatccttcacatttccttagacgccaccttctccgaaagtgccatctcttactaccctaaaggtctttttattttcttatttcagtgtccattcccttatttgtgatcgcctaattattttacttatttcttgttttgtttgcgtcctctttcattctgttagctccatgtaagcaggggtccgttttgctttattcagaactgtatactcaatgcccagtacagagtaggtctcaaaacatatttgttaaatgaatgacgtggcagctccacaattccaagtaaccaatgacacctaaagttgtttccccatgaagtctctgtcttttgggttccgtgcatcgggctgggctcacaggctgcgggaacttccttcccactgcctgttttccttggatcgcggtatctctcttcctggaggaaaaaggctcttatgacctcatggcgcgctctcccgagccgcagtgacgtcattaatgcgctcacgcgtcacagcccaatcatagggcccttcccctccctttagaagtcccgactgtccctgacacattccactccaagcgagccgcgacacttacgtcacgtccgcccgcccgcgcggtgatgacgtcacgacccagggctggcgtcacgtgtcccccccgcggggggcggcccttgagggcggcgcttccggtcggcggagcctggtggccgcagcggcggtggcgacgacggccgagacgtggggatggcgggcgccgggagcgaagcccggttcgccgggctgtcgctggtgcagctcaacgagctgctggaggacgagggccagctgacggagatggtgcagaagatggaggaggtgagccgagctgggcttaaggcggcggctgtgaggcctcgagcggggttcgctcctcgaacggtggccggaggcggaggcgaccgcggcgcctccggtcgtgttgaggggactgggctagaaatgggggcgcttggggcggggtgcgggagccagggaaccgcgactggtgcttaggcaggaatagggggcctgagagggggtttgaggcactgaggggaccgagactagggcggaggcgggaaaaagggtcctgagacggggcttggggagccgattgggggtcctgagacaaggttttgtggggctgaggacttaaggctgggtctgaagacttaaggctgggtctgaagtggagattagggagcctggaatgggaatttggggattagagtgctatcgttgggtctaggcggaagaggacggaactggggggatctgagattggtttggtcggaggagcggggagagtaataagggctgagtcggaggcgaggattaggggtgactgagggggaccaagagctagatctggtagaggttggggggtttcctttgagaggaaaggttggggacatccagggggactgaggcagctataggggatcagagtaggttttgggggactgagtggactatccaaataggactcttaggagaggattgagggttccaagatgggttcgggaggctgagggtctgtagctgagtctatgaggtggttctgaggctctttaagggttgggcgagggtccccagcccagggtttggaggcaggagtccatggtcataccatagccagggtaaggtttgaaggttccatgtatctaaggggtcccaataatgcccctggagtctgacttcttttgaagtggccccagcagagttacgggagttcgtggatgggcctaagggtggcgacaggatacgtttttctgtaagggttgccccctccaccgaggaagggaaggtgggaaatttagtgtggctggctttgtaccactgtgtcccacgtgtctggaactaaggaaggttcctggagcagtttcaggaagaagttaaaatgggggtttggggctggctgccaaccctcacctctgagagtcaagccttgcccagcccctggaaggcatgtgccagctcctgtttctggttatcttccttcacaccttgaggtgtggtttgctctcgggtaactgacttcatccttgcagatttgcagtgtgtgctccctttctctcaacccatttggactcattctcggaaagtctgatcttttgggtctggttctcctccaggcaggtgggcccaggctaatcccagctcttcctggcccacctaccactcctttatgtctctgaagtctgagccttcccacgcctacagtgctgagcctctcacccaggagcccgtgtgggggcttttggctttctttccgaagagggattgttcagcaccaagccagcccccttaaaagagagcttgtatggaggttgcacattcaaaatccctggaaaaccctcaacagatcattgtccggagctacagagaggccactgtagtaagatggtatcagtctttccattaatacaccccttgtattcatgggctttgtaacttgacacataataacgttgctccaagatgcagtgtaccccgtttatggtctccatgtggcaccttccattttggagaataataagtgataaaatccatccttcttagctgaatgagtttcatgtctccaaagaaaaaatctttgcttagtttctctgcttttcagttgctgggagaccttttgttgattgtcagcagggtttttctggtttaataataaaatgataggtatatttttctaatgtgtaacactgcctacaagttattttggtatatgtgactattctgttgcagtaagaactgagtactgtagctttgttggtggaacattaatagaaataaactgcctttagtggagggaagcttgtggaaagaatcaagttcattctgttcacttggaggctgttagggacaacctcacctgtttcctctacctcagaacctgaagattattttttaaagagaaaggtaaattcatctggcaggattttttttttttttttttttttttgagtaaaagtgaccttcatacctgaatacccaagagaagtattgaggcctgagcgactccacttgataagcctgcatagttcacattaaattactcagcagtagtttgcttttctgggtgtagtgcttttaaaacaaggaaacaacttgaaaaccaaaataccttagctcacctagcgaggatcactgtcaatcctgtcgtcctggtcatgtgtggtgtgcctttctcggaatgggtgtaatgtgaaccgaaatttttggtcatggtagtttcactcatctggtaatgctatgcattggcttatgttgggggtaattgtgagacacaatagaagaaaatattttatgaactatccactgttgaccaaatggaacatttgtgatggcgtgttaaagaacattctggttttggaatcacacactccagactggacttggccgcttcccagctgtgtgattgcaggcaagtcacttcacctgcctgagtatctgttggaaaaggataatatgacagtaatacctatttcatagagtgaggatcaggtgagatgatgcctgttagtacttaacacagcccatcagtagggctcaataaaaagtaattgcaataattaatcacttatattaatagttctctttttgaaagatgactgacaatcattaataccagatcatcctgaaagttactaggatcccatttcaagaatgttgagtaaattatgatttgcaattagcctaaaaaacatttaccttttccttttttttttttttttgagaaaggatcttgctctgttgcccagctggagtgcaatagtacaatctcagcgcactgcaacctctgcctcctgggttcaagtgattctcgtgccttagcctcctgcgtagcagggctcacaggtgtgcgccatcgcacccagctaatttttgtatttttagtagagacggagtttcagcatgttggccaggctggttttgaactcctaacctcaggtgatctgcctgcctcagcctcccatagtgctagaattaaaggcgtgagccaccgcaccccgctgccaccggctaattttttatttttgtttttttgtagagatggggtcttgctatgttgcctcttgaattcctggccctaaaccatcttcctgccttgatttcccaaagtgctgggattacaggcatgggccaccacgcccagccaaacattgatctttctgtggtcaaaatgattatgtatttgagtaggtatagggtgaaatggtaaatataacaggcctttcccagcatagaatttcttaacctgaaccaaaggatttctttttttttttttttaattggcagaaggaagtgttttaaattgtagagtaaggcttctttaagcctgaggggatattttgtggaggctggaaaatgtggctaggttttgaaggcattcactgttaggtttaagtgcagctgttcattatgcgtcacttacattgttttaattgtggcgtgtgagtttcagtgcagtttaagtagtgaacatgatttcggagctacggtcctcattttctgggcctgtgtgtcagtttctctcttcctgttcctcctgttcattatgcaattccctaaatgtagtatatccttcatgatcttattctcttgtctgtgctgcaggctaatgtttcatatgcatgtattttatttttatttaaagttatttttacatggcagtggaatgtgccttcatctgtcaacattaaccccattggacttgcagggcactcccttaaaaggaactgtcgcttaggggattaggcaactaaaccggacctcttgaattacttcttcactgtgctttctgaggaaatgctgattggttactgctaaagattccactaacaattcaaattggggatctttgttcccatggcatgaaaatgcccatgcccgcatgcaaaaatgctgagggtctgaaagacagattgttttgtggaaagtaaagagctctggtctggaagaagctgtttccctaaggcgtgttcgggtgtgatttgtgtggggggctgaaagctactgcatgaatcataatggctcattgaaatgtattgaccttgctttaaatccagggaccggctcccaaacacactctgaatgctggtgagactgttttagaagctaagatttgcactcttgagtataatactactggagtttgtttttatccatgttttataatcattatgtacgtgtaaaggcttcaacttttacgtttaaatcttttccatggaccttttacatgagtaaaaaattactgtgcctaggaatatgtactgaaattcagttgtatgtcattttatccttaagtgaggcatcaagatttcatggaaagcacggagctgagttgtgtgactttaagtgacttaaaccctgtgcttcagtttcctcaactgttaaaggaaggataatatgcctatcttttagagtacttgtaaggctaaatgtcacaacagaaatggtacagaggaagcattcagtagaggccagctcccttttattaagatgcaattttcagaatatgtagactggcttagatgaaatttgatcaatttatttagttgctcttctgcgtttgctaaaagtgcagtggtgggtggcatcacacagtggtcggagtcagaactggcttttgataccagtagttgacctttgacaagtatttagtctttttaattgtagttacctcactggaaattaaggagaaaataacaataacctttttcatagcattgttgggtagattaaatgaaataagtaagatgcctaatatgatacttagcacagagtgaacacttggtaaatagttattgttagctaaaaggcgtagtttccttgatgcccaaatggaagattccatttcagttccacagctcttgaacacttccctgtgcagggcattgtaagggatagatacacaagtaggacataattgctagattataatttgggaataaactaaatacagaaatgtctacaatacaagagggaatagggagtttgttagggaagatgaagggctctagaggtagatggtggtgatggtggcataataatatgaatgtactcggtgccactgaactgtcaactgttctcttagaaatgattacgatggaaaattttatgtatattataccacagttttttgaaaaagagaataagaaaaaggccaggctgggtgcagtggctcacacctgtaatcttagcactttgggaggccgaggtgggaagattacttaagccccgtagtttgagaccagtctgggcaatatggcgaaactccatctctacaaaaaataaattagctgggcatagtggcacacacctgtagtcccagatattcaggaggctgaggtgggaggattgcctgagcctgggaggttgaggctgtggtgagccatgatcatgccactgcacttcagcctgggtgacagagtgaggctgtctcaaaaaaaaaaaaaagccacgtgtgaattctaaatgacattgaagttcagatgaaaaagctctctggctacattaggtttctgatgcaagagacagactttttttgtttttgttttttaacttacgttcccacaaaacaaaagagacagacttggtgggtaggtaaacgttaagaaaataaattattaaatagaataatatctaccagagggcacagagaataaggaactttgtctacctgctacccagccgaggaagtaaacactgccaaccggcggaaccccccgccttgtgctctgccctcagtgtgctcttccccatgtccactgttgtgaattatttatttctctaagtaggcttttgatggacaaaaatgggggctcaggaggaagtgacacaggcacagaggcaggaaagcagggatgggttgtccgacgagcgagttctcgtctactttggccagatggcatgtacttgtgtgtagagaaatgacaagaaatagggctggtgagggggagtgccagggtgtgcgccccatggtggttaatttaggaggaaacaaggagcttcgtgatgattttggagcagagaagcagtcggatgaaactgctcttttttttttttttttttgagaccgagttttgctcttgtctcccaggctggagtgcaatggcacaatctcggctcaccgcaacctctgcctcccggattcaagcgattctcctgcctcagcctcccaagtagctgggattacaggcacgcgccaccatgctcggctaattttgtatttttagtagagatggggtttctccatgttggtcgggctggtctagaactcctgacctcaggtgatccgtccgcctcggcctcccaaagtgctgggattacaggcgtgagccaccgcgcccggcctgaaactgctctttagggaggttaatctgtcagcaaagcgtgggctggcttggcgtggcaggaccaggttggcggcggaagtggaggttaggaagaaattaggatttgagctagggctctgggagaggtattcggaccagctggcccgactccctttctcacttcccctctcctgctgacctgaagtgctttccccacctctgtcacaggcacgtggtctcttagcttctttgtatacctctcctgtggcacttgacacacattttgtaagtcacttccctgtgtcccccactggcttgggggctgcattttgtcatgtttgtctttttgtccttggcacccagcacagtgcctggcacccaggatgtgcctgggtagtgctgctgagtgagtggtgataaccgggcttcaagtggaagtgagtaggagacagggctctggtgagcggggaggggaggggcagtgggggtgcaggagggagggagtcattgaggccggattaggcagagcatgagggatgggcagggctttgtcccgcaggcagttggagtgtggttctggagctcagggtgaatgctctgcttggagacagaaattcaagccactctcctccaagtgcttgtggaaatcaaggagaatataaaagtttgaaaggccactaggagctattagtgggttgggagaaggaaagagctgccatcgaagggaggggagaaacgagagaaacaagttggatgacctaacatcctgttagagactggctggaagaggaacccagaagtagactgcactgtttgaccctcaccggtcggtcgtatgcagagtggttgtgttcttgagctgaggaatgccggccttgttgcctgtttggctttgattacagtatttgtagcagaatgttgctatggagattcatgccaggtacgcagtgggaggtgatctagaagaccgtgtgccagccactcgtaggtaatcactggcgctcagaacatgctgagacaagagttctcgttggtttatttccttccccagctgtgtgagttttcagatttcatcattggaaatgatgtcttacccaatgatacaaaagcagaggaaatgcctttgtagaatttcttccaagggaagaatgaaagtagagaggtgacttagcttagctttgttgtctctagaatacgttacagtgtgtcaagggaaggcttttcaaagtatttgtcaagggattgtgaggaacgtagtccattactttgtcaaagagtttatgtgaaaagtagatatttgaataatttcttatatttcaagcagcgttacagctaatgtttcttttaaatcaaaccttttatctccaaggttaactaatggcacctcgaggttacatctgcagcccagtgtctaggatagtagaggaacatagtgcaaattcatgtttgtcatcagagctgggtgtggtggctgacacctgtaaatccagctactccgaaggctgaggtgggaggatctcttgagccccatgagtttgagaccagcctgggcgacatagtgagaccctgtctaaaagaaaaaaaacaaaagtggtctaacatgtttgccatcagacagtagttttcattaatgtgaacatgactgaggtcaagaagtttattcatgtacccagcctttgcggagcatctgtggtgtgccacttgggggatgtgaaaccagtaaaccacatagttttcatcatttaggatcatgcaggtgtacagggtacatgtgaaacagtagtgaggcccacacactggtggggggagatccagtaagcctttggaaggtggggggtcagcagggagtgtttcctggagaagatgaatgactcataagttatgattcagagaatgagttaagagttagccaggtaatgagggagaagggctcccaggcatatgggaggaacaaaggcacttagggaagaagccgggacagagtgtgtgtgcatacaggaatattataagtattgctggagggaccagggcagggtgtagtgggggctgaggcccaaaaggcagtcagggaccagatggcctcatatgccctgttaaggagcttgggcttgatcctctaggcagggagccgttggaggatttaagccagggagtgctgcggttggtcacactcgccatttatgtagatcgttttggcagccaggggaaggatggatttgagggggatgagattagaaagctgggatatgagttaggaggctgaaagatggttgataaaaatgatcgttgggcagccgagataactgacttcaaggacatatactggacttatagcagagcctgttgagtcttgcttttgcacacagttcaaataatcacttagtcatgtggtttatctgccagtggcaaatgttaagactgtggggaaaaactagaagaaccaataacatcatcaagaaataagtgataggaggcaaaagtcataaaagccgtacaaaaattggaaagttgactgttgaagcatcgtggttaagacaggatttgggttgctaggaaactttggggcaagtatttaaccttcctaagtgtcagtttcctcctctttaaaatgggagttagtaataccatccttattgagttattctgaggattaaataagatgatgcgtataaactattttacaccatgcctggcaagaaaacccagtaagtggaagctgttactgtgaatacattttgtggccttttgattagggtagtgttttccttagatctctaattttgtggatgttaattgtattataattacattaaaaagagttccatggtaaatcaatttgggaattaaagaggggtttgtttttttgagacagggtctctgtcgcccaggctagagcatggtggtgtgaccatagttcactgcagcctccatcaaacgagcctcctgagtagctgggattacgggcgcttgccactacgcctggctgacttttttgatttctagtgtagatgaggtcttgctatggtttcctaggctgttctcaaactcctgagctcaagcaatccttctgccttggcctctcgagtgttgggattgtaggcgtgagccaccacaccggccaagagaggttttgtttcttctgctagagtgtggtgaagctccagaggggcagcctacacagtatttctcgttcacacttgattgcaactcttagaaaagctcacaggactgagtccttgggggcacactttggcaaatgcttatttaggggagaaacatacccatctgcttccatagcccaagagtattgctctatcagagacagcaccatagtcacttgatattcataaggacaattctagatcatcaaggaaagctaccttagtttcatgtactctgtttaagaaggcagggaagtataatagtatgttttatttctgatcccaactaatcaaacttttaaaaataatgttttacggccgggcgcggtggctcacgcctgtaatcccagcactttgggaggccgaggcgggcggatcacgaggtcaggagatcgagaccatcctggctaacacggtgaaaccccgtctctactaaaaatacaaaaaattagccgggcgtggtagcgggcgcctgtagtcccagctactcgggaggctgaggcaggagaatggcgtgaacccgggaggcggagcttgcagtgagccgagatcgcgccactgcactccagcctgggcgacagagcgagactccgtctcaaaaaaaaaaaaaaaaaaaaaaaaaaaataatgttttacatgtttattatagaaaatttggaaaacacaaccataaagaagaaaagtgtaatcacatcatatcactacccagagataaacactgttaacaaagcatttaagtttttttcctttgttgttcccttttgggatgattttttagagtttttgtagagtttttgtttgattttaacctaaagttatactctgggtattttcttattttttaaatcagaatattcttacatgacatgatttttaacagctatgtgatctttcatgtggatatgtcatttatataaccattcctttattggatatttaggcacttttttgctgtcataaattataatgcagttaacatctttgaaatctgtttaaaacaaatacgttaaagtgatcaacatttaactttttttttttttagtaagtcttaagtgtctaggcagtttttaggtaaaatatctgatcccctacatgaaatatgattatatagttttttaattacgaaatttcagtggagtaatctcaacagattctcttttgactaatcccttttttccctaaccacagactgaaaaaaaaaattccattattagaatagcattttctcatttaaacggaatagaagatgagtaattggagtcacgtgagagttaaattttatctgttgaaccaaattccgggtcaggtgttggaaagttcatgtcatgatgtattttaaatgtaaaaacaaaattgtcaaaagatacagtcttaataaacataaatccagggtccacctggataggcactttcttatttgcacctgtgtaaagactggtccgaagaattcttagacatgaatttccagaaattgtaaaaaggaaatagagatgagggggaaaaaacaaacaataaaacccgaagctcttcctaaacaaatgaatgctttggttgttggtcctggccagaaactattaataagaaaatcagaattttaggaattctgtcttccgtaagctggttttttttttgagatgggaggggagtagaagctattaactgacacccctcatggtcaggtggtcatgactaggtatctggacatttctgctcccacactggaatctcatacttacacaggatcaaatgtgttcactcccagatctgttcattctggttttattacaatagttctatgatttcattaaatcctggggcaactggatttttgcatgagtgcaaagagaaagttatttctacaaaaactgtcaactgagtgctttggaaagcatagatataaattgattctcttgaaagaaaacttggtggtgaattaggtctggactagataggggaagtggaagaattcccaaaggactcggactctgccctgattgcttatccggtgtccagttcccaccccacaggaaaaggcgtggcctattggaaaaagaacttctagtggaccccttcccttaagaaaagacctttaccttaaatgaaacattgacaacagatttttaaaatgcttagtgtgtgctttaaccaaactgctcagttacagggacctaactggttctgatgatgtggagtggagggctccgctgtgcatttcctggcctttactgctgagattctaattcggaaggcctaggatagggccagaggacaaaggcagttaactttgtgatctgtgtgggtgtcccatcttgtcttctgatcctcactcctgccctccttcctccaaggtctccagttattctgaagccagttaggacattttataacatatgccagttatcagaaccattgacacctgttagtatatttctttattactgacaccattatccacattataagtccaagaagaagggagagcttgtttttcctctgagtattagaaaatatgtcttctggccaggcacggtggctcacgcctgtaatccccagcactttgggaggccaaggcaggcggatcacgaggtcaagagatcgagaccatcctggccaacatggtgaaaccccatctctactaaaaatacaaaaattagctggatgtggtggtgcacacctgtagtctcagctacttgggaggctgaggctggttgaacccaggaggcagaggttgcagtgagctgagatcgtgccactgcactccagcctggtgacagagtgagactcttgtctcaaaaaaaagaaaaaagaaaagaaaatatgtcttctaggaaaaaccaaaccctctcctggtaagttgtgcctgccagccctagaaactgtcaagtgtgtcactttccatcttacctaggaatagtccatttattttcgagcctagctttttgtgtttctgtggttagctgcactcacacgtaccaatttttagattcacgtcagctacatatggaggggatcgtttgagtctagatctcactgtctgttccttttcgagggaagcaagttttctctcaagaaggattttgatgtctccgataaaaatagctatctttattaatctaatagttggaagttagaggttctgtgtgtggagtgggttgtttggtggaacattcgataagcagctggtaagtttccttcctgagtgggctgtagccttggagatggtttcacacaacccccaggattgtcgtattttaggactgtttcataatgttctccgattctttaactatatttctgtatttgcagatcttttaattttgtcaacatgttaatagtccaactccgcaactgttaagtttgtttcagtaaaactgaagatttgaattaagccacattaatgtgtttacagcacatctaagggccatcgtaggcttgggttacaggcttcacctgaagacctgaattcaggtggagactggtgaaattagtttgtcattgggaatatctttttactgaatgaaggtgaatttggacttttaaataacctagcctttaatgtaaagctcaaactcaaattgcatgttactttggtgaaatttaccttgaaattagttggtgtgataaatcaagtatagtaaaataaaaagagatgcagttaacctagctgaatgtatggcagcctttctttatcaaacctaacccataagcctgctgcatttaaggtcttaatgcaatttgagaatatttctagtagtagaatagtacaaaagctaagatttgttttattccttttctttgtgttatagataactttgaatttaattttatctggagaggaaaaggtgaaaatcaaatttcccaccaaaaggaactagtattcctttgagaagggccagctaagcttgggggcagcaaatgtacaggattggtcttagacatattttactggagagcagggcagcagtggtgtcccagaacagccttttatcagagataaaaacttcattacttcataatgatactcccaaaaagcttattggtcatttttggagtttgctcaggtatgaactcagtcttccaaaagttggtttaaaaagaaaaaaaaaagaaccaagcatttatccagcttttcctatataaactgtatttcatgtagtcaaatagatgaggcaaaaagttttttatagaagaaattgagccaacacatgcagaggatgatattaaaggattattgtgaattttgctaaatgtgattatggcattgtagctagggttaaaaagttcttacctgttagaaatataaaatttttaagcatgaatgatgatgctcgaagtttgctttaaactacttttaaaaaaaagcgggaatatagatgaagattggcaaatgttgctaattgtcgaacctaggagacggttatacatagtttcatcatactcatctctctacctttactttttgaaagtatcttctataaaaggtttttttaaaaaaggtataaataggaatgaaccttagatgattgttgttataacatgaaaatagagaaatagtaaactagtaaatttccatttgatcctctgctggagtgtagtggtgtgattacagcccactgcggtcttgccttccctggctcaagcaagcctccttcctcagcctcccagtagttgggaccacaggtgcatgctgccatggctggctcattttttattttttgtagagatggggtcttactttattgctcaggctgttctccaaccaactcctgggcttaaacaatctgcctgcctgggcctcccagagtgctgggtttacagccatgagccaccatacctggcataatttatttttagagatagggtctcaccatgttgcctagactggccttgaactcctaggctcaagtgatcctcttgcttcagcctcccaagtaactggggctacaggcgtgagccactgcacagtagttaagatcgcagctctggagggagttactagcagttgtaactttgacagctcgtttaaccttcctaagattgtgtttcctgtctcttgagtaaaatgaggacaaatttgtctcactgtcacagaggatagaatggagacagtggaactaagagaaggtggcacatgctagctatgctcaacaaatgtcagcaaattttgttgaaatgtggaagatactgacaagagcaaagttttcagatcagcaccagtaacttgtcttacttaaaccgttaaaatcacatctgttttgatttttcccctttttctcttttgagccttttattggaagagcagatgcagtctgtgcgggtatgcagtgctgcagtacgaagtgaatggcaccccctggagttgggcagtgcacaacgctcagtgccttacgtaggaggatgggcttgactgagactctgagccagactccctgtgatgatggtgtctcccccgagcctggcacacagaggtgcttcccaagtatttcttgtatgaatgaacgaacagatgaatgggccaaccactgtgctggagcatgtcattgtggccctgatgagctgtagaaatggaagcttgggattagggtttttctgtgtgtgtgtcgtgtttgttttttttttttcctttctgtggagatcagtgcctcactccgttgcctaggctggtcttggtctcctgggctcaagcaatcctcctgcctctaccttccttagtgctagaatgacaggcgtgagctactgcaccggtgtgtaaattacacgtgtaaatatagtggcttcgaggctctcatgacagtaatgctactctaacattctgatatgctttctaagtgggagagggctgatttcagtgaagagaagcgtcgcacaaagccagcttgtgtctgtgtctccgtgtgtgttttgtgtctcatgtttcaccacagttaatgggtagcttcgctttccagccatcagtgtcatcatcttcatttttccccctttccatttcactgccaaactgttatcactgctggagtaaaagctaggaatgcaagtagtttcccagtttatagctggttgtatcaacccatgacgttactgtttatgaatttgaacattcaaaaaggctaatcttcaaaaaagcttagcaggattttcacaatgactgacagatagtgtcctgaggccccaattatgaagattcttatggttaaaattgagcaagttttttttggagtacattggcacgatctcggctcactgtagcctctgactcctgggttcaagtgattctcctgcctgcctcagcctcccaagtagctgagactacaggcgcacaccaccatgcctggctaatttttgtagttttagcagaaacggggtttcaccatgttggccaggctggtctccaatgcctgacctcaagtgatccgcccgcctcggtctctcaaagtgctgggattataggcgtgagccaccgagcccaatcaagcaagtatttagctatgtgcctgtgttagcctgggtactgcgctaggttctgggcacaggggaatgattaagacatggttctactcttaaggggctttatggtcaccattaaaagagtggatgtgagctcaagtgtcattttgtgtcatggggtaaactgttctaactatttcaatcaggcttctggcaagacatggcacagtcagcatgagggattggtgaggagttgaataaagggattccccacaaggagagggcagcgtggagacccccaaagcctgatgcaggattagcaacagccatgcacttctcacttccaggcctgcgggaggggcagaggagagggctgccttggaggaagggagggttggaggacctggcccagctgcagccgcacctcagcgaggcaacccggggaacactccccatctccgctgtcccttttcatcttcctcctactgttgatcctcattgctgaatccaaccagaacctgagggtgagtgtccgggtgaagggttggtataggtcagccaggtggctgctggggcacagagcaggatagacagtggttttcaagaacaggtggaagattccagcactgtactagtcctgtggctgctgtaacatgaccacaaactgggcagcttgcaacaacagaaacttaattctgtcacagctctggaggccagaagtctgaaatcagggtaccctgttccctctggaggctctaggggaggactcttctttgccgcttccagcttctcatgtgtgctggcgtcctgggcttgtgaccacatcatgctgcccccatcttcacatggctttcacgtctgcctctgtcttctccatgtgtctcttaaaaggactcttgtcggccgggcagggtggctcacgcatgtaattctaacactttgggaggccaaggcgggcagatcacttgaggccaggagtttgagaccagcctggccaacatggtaaaaccccgtctctactgaaaacacaaaaattagccaggtgtggtggcatgcgcctgtaatcccagctactcaggaggctgaggcaggagaatctgaggcaggagaatcgcttgaacctgggaggcggaggttgtagtgagccgagattgccccactgcactccaacctgggtgacagagccagactgcctcaaaaaaaaaaaaaaaaaaaaaaaggactcttgtcattggattagggccacctagatgattaaagatgattgtttcatttccagatacttcattacatttgcaaagaccttttttccaataaatgtaggttctagagattagggtgtagacacatctttttgggggaggggggcacaccattcagcacaccacaagcatcctgtcactcccaggagacttacaacaccttcgtgacacagcagtggacaggttttttgttttgttttgtttttctttcttttctttttttttttttttttgagacggagtctccctctgtcaccaggctggagtgtagtggcacaatcttggctcactgcaacctctgcctcccgggttcaagcgattctcttgcctcagcctcctgagtagctgggactacaggcgggcaccaccctgcccagctaatttttgtatttttagtagagatggggtttcaccatgttggccggggtggtcttgatctcttgacctcgtgacccacctgcctcggcctcccaaagtgctgggattacaggcgtaagccaccgcacccggtctagcagtggacagattttatgattctgtttgtcatatttagtagctgcactctcctaaggaaaggaacctcaccttcctgttcacttttctgtctccattgcctgtacttccagagccagcccgtgatgatgcctgaaaaaattttttttgatgtatgaatagatgaacaaacaagcacagaagaatacagtgtgaatacagtgaagccagaggtgtactctgcgaatacatgagacacccttgagtggaatggtttcagtagatggattgtatgaggtgtgaattgtatctcaatcaagcggggcctcagggagtgcccaccactaagggtctagctctgtgtggcgttggtggggctggggaaggtttagaaaaggttccgttgctaagaccttggttagggtagagtttgcagcagagatttggataggagggcgttccaggctgaagagccagtgtgagcagagtctttgtgggaagaacattttatattcctggacctaatgcttgtttaacaagatgcttgcttgtggctgggcgcagtggctcaagcctgtaatcccagcactttgggaggctgaggcaagaggatcgcttgagctcaggaggtcaaggttgcagtgagccatgattgcaccactgcatgtcagcctgcgtgatagaacaagaccctgtctcaaaaaataaaaaatgacaataaagattgcttgttaaataaaatgtgatttatttactttgcataaatactatgccttctgagaatgctgtaggtgcgggcatattttgtttttatcctaacgcagcccaaattccaagtacacactggattttgagcatttaaaggacttccggtgctattaaggattcccatttgtttgttcaagtttgctaaacgaattcagtcatgtcacttacttagttgttgtaagtattatattacagtgtgaagggggtaaaaagaactgctatgagtatctttccatgaagaagatttagcttggaaatgtgggcagatttgtctgcctttgtgtttaggaaggcacaattataattacaggtggaggagctagacactggccagctggaatcagaatttcacattgtagaagtgtctggtctggaaagcatccatgggaaacctacacccttgacccagcattggccacagagctgcaggcggtctcctgcctctgcctctgcccctgcgtgcctctcctttgtagcagccgtggcatatgcagaggggactgtagatctcttttctttcttgctgactttattttctaccacactcccccaacccaaataaagaaataatgacatgtgcatttgagatagtgtgtgtgttttttttttttctctttctgagatggagtcttactctgttgcccaggctgaagtgcagtggtacaatcttagctcactgcaacctctgcttcccaggttcaagcaactctcatgcctcagcctccccagtagctgggattataggcacccgccaccacagctggctaatttttttgtatttttagtagaggtggggcttcatcattttggctaggctggtctcgaactcctgacctcaagtgatccatccgccttggcctcccaaagtgctgggattacaggtacgagccaccgtgcccagccagactgtgtgttctgagagagttacatatattaatgtaagcatcccaagagataaaaagagacctccacatttctgcctggataagtatatataagatacttttttttaacttaaaacagaaaaaccctttctctacaaagttatgcgtgcttgctctaatgaatcaaacactgtgatagttaaaagtagaaagtggaaagtaaaaaaatcataccactcgggctgctgctgttaccctggggtgagcatgcttccagagagttctctgtgctcatgcacggataggtgggcagaaataagtttagacaagccaggtcctactacaaatgctgtaatcaggcatctcatttttcttcacttatgagaagtaatggaaactgaagtgaaactgagtaaatttataagaatgtttctttaccacagagagattatttcctgaaaagacttttctatggttaacaaaaaggatcatgagaatgatcaagaggttggcatcactgttttcaatttcaggtatctgttggtgcctaccatgaaacaaagacagtggcaacttaagatttttttttttttttttttttagtttgatggttcctaaaatacctctctaagcattctcagatttactgtacagatttggtcacagacattgaggctggaatcagtcggagaggggtggagagccgggtgtatgtggccggagtggctgccatctgggccttgctgagtggtgtatgctgcgcctgtggaggcctcccgggcctgtcctggccaatttgcctttgctttgcaaatgaacaaagctgttgtttctcctcccccttttttttttccaactgtaacaatgaaaagattgaggaaagagtttctacattgattgtagcatccaaggtgtgttctggggcaggttttgagtgttaaaaagttttatccaatgcttaagaaaagacattcaccttcagcacatgcatcctggccattgtccctactgccattatcctgcaggatgctgtgggtattctctgggtggccacttagaatttactgtatttgtctgggtgtggtggctcatgcttgtaatcctagaactttgggaggccgaggcagggagattacttgaggtcaggagttcaagaccaacctggctaatgtggcaaaacctcgtctctactaaaaatacaaaaaaaaaaaaaaaaaaaaaaattagccaggtgtggtacacacctgtaatcccagctacttgagaggctgaggcacgggaattgcttgaacctggcaggcggaggctgcagtgagctgagatcacgccactgcattccagtctcggtgacagagcgagactctgtctcaatttaaaaaaaaagttatcgtatttatatgaaaacatctgaatacccaaaggatatttaaaaaatcactgccagtttaacagtcctcagttggagtttttttttttttttttgagacggagtttcactcttgttgcccaggctggagtgcagtggcgcgatcttggctcactgcaacctctgcctcccaagttcaagtgattcttctgcctcagcctccgagtagctgggattacaggcatgtgccaccatgcccggctaattttgtatttttcttagagaaggggtctctccatgttggtcaggctggtcttgaactcctaacctcaggtgatctgcctgcctcagcctcccaaagtgctgggattacaggtgtgagccaccgcactcggcctcagttggagttttatttggcctcttttgatgcctggtggcttatgtgtgtcctatacaaaacaaattgccttttttccccagaccccagaaatgtggacacgtgagttgtctttattatagtccacgctttccttgtgttcttctcctctaggactttctaatatataggacaagtgattttgacttgacttaaaccctacggaaataagattttgtttgtagatgcatttgtatggtgaaactggagcaaaagtcttcagcttagcggtatgtatcagcagggagctttgaaggcagcatccatgcctggcccctcctgaagagctcaacaggtaggggttggtcgggacattgagatttgtaacagcagcctccctactccccagtaaacggggatcgtaaggcacagccgaggctgagactgctgtggggtagtctaggccgcctgctggaatgtcggtcggtgctgcattgagcgctgtctttcaagtggttgcgtgggagacctgcacttgctgtgtgctaccttgactgaggacttttgaggaaattctgtttgacaattactttaaggtccagcgtgacaccctccctcagacttagtctctagtgactttctgatgggagcgcctctgcttcatcaaggattggaggcacttagctctcaacaaacttaggtcgctttttttcctccacagttttgttacctcccttatttgccaggcttggctttgagtgaatcttggcttttttggggttgtggggggctctctgattcattcagcagatcttcactgagtggcagatgtgtgcaaagtgcttgggatgccaaagacaagtgtgtcgtctgtatttagtgttgggacagacagtgattgagacaacagatttaatcttcactgatgacagtgatgatgccacgaaagacatgggcgctgacagagggtggctgctggtgtaggcaggatggttagggacctcctttctcagaactgaccgggaagggatggtggggaccaggccatttggggcctcacagatcagggctgatgagtttggctccatttatgcttgactcagtttatttgagggtgggagcactcctgtttctcagaattccctgtgcctaaccccaggcgtggcagataatactcgctcagtaaatgtttattgaacaaatgattgattgagagtgatggaacacacagaactgtgggtctgggagcaggagcgcgaggcctgtctctgaatgcagcctggacaatgtgcccttctcctcatccgccaggtgagaccagcaggagaaagccatctcagcagtggttggtggttgtatttacagttaaattttattttgagatgctcatagtttcacatgcagttgaaagaatacagagagatcctgtgtccccttctcccagctgccccctgggtaacatctggtgaaattcaacgcactctcagcaccaggatcggggcactgatactgccaggacacagaacatcaggacggctccgtccccgtgcaaatccgtcatgtcggccttttatagtcccacacacaccgctaatctgttctctatttttgtgattttgtatttcaagggtgttgtgtgcatggggtcatggagtgagtggccctttggggttggctgttttccttcagtgtgattccctagagcgttctcagtcccgccagtcaagtttcttccttttgctgctgagtggtattttgcggcctggctggcctgcagcttgtttaaccattcacctgttaaaagacacctgggctgcgtccagattttagttgttacaaataaatgttgctctcaacagtcctgagcaggtttttgttgaatataagttttcatttctctgatataaatgcccaagagtacaacttctgggtcatagggtagttacgtattcagctttattaaaaagtgcctgttttccagagtggccatacagtggtttttgtttgttcttttaaatgacttaacaatggaaggaaagacgcttctgcatggcctggcatagaaagcccatggagagccgccctgtgggtggggaagcgggtgacgggagccccactgcttaccagaaacccgagtgaaactgcgtctttccagtcccaagattctccttttttgctaaaggcatcagaagagatgaaagcatttctaccacccacatttcggggacactcctagcttttactttagagttgggagagaggtttggttttcattgtcatttaaatcctgttgggtttcagcagagcctgatctttagggccctgggtgcagctgttgtctggagatgcagatcactgtctgctgaaaagagccctcctgctggggttagggatctcctgattgaggcatggatccaagggcttctttctttgttctctgattccctgaggctcttccttgtgtgtgtggtgcgtgtgcactcgtgtgagcgcaccaggaactatgacagcaatcaacgggtatgactgggggtggggagcagaggcagcatggccaggaatctatactcgagctactaagaggaaggaagtcgcagcaaaaatagcctgggtggggtggtagaaaatattaaggggaaaatgagatgactggggtggcgttgaagaagagctgcttaaagagaaacagggacacacgctgggtaaggaatcgcatgctgttgaaactgacggtgtggaaggaaagtgaggtggcggcggctgggctgtggtagaggaagccgatcaccagtgagtgaaaagggaactagggtacccacgcgtttgtgttttttatttaaactttggctaagttttgctaggagcgttttgcctttttttctcagaccttctactcctgtcgttctcccctaagttctgggcatgtggcttcttctctacctaccagggtagcctgtcattgctttaaaggacaaaatgaaatccctgatgggcaaaatatgtcccccctcttcccccagcttttggtcggctttgctcacccaccaacagctaggagctggaaggctcagaagagctggggtgggcatgggagagacagaggaaccccggtggctggaaacacagttccttcccagggtctcttcagcttgctggttggacctcttagcctgcttatgaagcctgaattgacatcatgccaactggtctcctgctgataagtgattccttaacttcctcgggagcagcagaaacttgttttgaaaaaaatcagattctaaatctttacagctgtttacttctgcaagcacaatggccgtagtaaggaattcaagtcacagcgcagccgtggcagggaaggctctgcatggagtcacaggacaaagcctgtcctggaaacgtgctggaaggaagtcggcctcattctttacgacgggcagcagctccaaatgagaaaccaaggggcttggctctgggtcagtagcatctgcctggcatgcggtgccagctgtggagaccagtgaggtggcagcagctgcactgggctcctggggtgtgcgtggggacctcaggggtttaggagctgatatacttttggttctcatcatcttgtgtgttccttgcagacacagaatgttcagcttaacaaagaaatgacacttgccagcaaccggagcctggcagaaggaaaccttttgtaccagccccagctggacacgttgaaagcacgcttgacccagaaataccaggaactccaggttctctttgaagcctatcagataaagaagaccaaattaggtaactttttaagggtgatcattcgagaataaagagttgagagaaggacacattttcaagctattgccctaccaggaaagaaatattacggaaaaatttcaggttaagatagcgactctactgcaatgaacaaatagcttatgtatattatttatttatttttagagacagggtcttgctctgtcagactggagtgcagtggcgcaaccatggctcagcacgacctcctgggctcaggtgatcctcctgtctcagcctcctgagtagctgggaccacaggtgtgcactaccccaagcaggctagtttttcatttttttgcagagaggttgtcttgctatgttgcccaggctggtcttgaactcaagccatcctcctgcctttgcctcacaaagtgctgctattacagacatgagccactgtattggactagtttatgtatggaatatggagggcccccagacctgcggcctctctgcacttgcggttcgagagggcagggtgtatagcaggactgccccctcctcccagtggccctgactggtggcggtgactgctgaggtcagcccaggtccacacgcacctccagggtctgcagtgtgaagcaggttgcagaaacgtgggtacctcggggcagttaccagaaaaggggctggagattaggaggaagccagccagtttagcagtcaccagtttagaagaggagacttaaccactttttaaattcaagaccccaccttctctaaacagcatagaaaaagctttctgaattatgatattaaacagatgtcttatgacgtttgcccgtttgtcttatgctgtttgttaatggtaaaaaaaaaaaaaaaaaagcatcactgaaacactttattttaatggcatactttaatttccagccattaggaggagacatcagaattaaagattgttgagcatcctaagtgcttttgatagttatcaaagggacatttagataaagtcagagctgggggtggtggcacacgcctatggtcctagctacttgggaggctaaggaaggaggattgcttgagccttggagattgaagctgcagtgagccatgattgcagccctgtactccagcctgggcgacagagcgagactgtgtctctacaaaagaagtgaaataagctgggggtggtggtgctcgcctatagtcccacctactctgaaggctgaggccacagtgaactgtgattgcattactgtactccaccctgggtgacagagaccccatccctttaaagagtttgggttaaagatcaccttctgcagtgaggtttacagtgatgtctgtcactacttgctatcatcttgtcattttctccattaacttcagtaaaaatttacgatcatacacccaaaccagaatgacgaaaagtaaaaagactggcagtaccaagtgctgtgaggtgccgtgcatcttgctggtaggagtgtccatgggtcatctggggcttgcaggctgcactgccacagccacctccttttctcatttcacctggggaaggctgttgggtagcacctgctagaatgaagagtgtgtatgcgctgcacagcagctctgctcctgggtgtatacccaacagaagtggatattaatgtctctcagaagataggtacaagaatgttgtatctttattaccttataataaaatttggaaacaataaaaatgtccgtctacagagtgatgggcacataaagtctgtttacacaatggaacactacacagcattggaaagaaacgaactgattcacagacctgagcagggtctcagagacgcggtgctgagtgcaagaagccaggagagtatgacctgtactctctgattccaggatgtggagtcaagaccaggcggacctcctctgtggtggtggaggccagcgtaggggttatctggcgggtgcagtgggcgtgagggcgcccggtggaaaggttctgtgtctggatctggggggtggtggttggcggttaaacacgtggaaatttgacttacacacttgagatgtgtatactcgatgtaagttaccactcaaaacataaaggaaatacaaagtggcatgatgagaatgtcactgccccatatttgaaaacagctggttctagaagcagctggtgacacaggttgctctgacatgggatgttggcccctgggcactggcttggtgcacttgttcccctgtaggttttcaagcctttcacattcagcttcctggaaaggaaggtgcaatcctgccgtggttggcatcatgaagggctttacctggacacctctcacttttgtcatacctcttgctttttttccagacagacagtctagcagtgcttccttggagaccctgttagcacttcttcaggcagaaggggccaagattgaggaagacactgaggtaaagcccaccagccttggtggaatccttggggcgctttgggcagtccgtgggcccgctgcctccagggaccgtgagtgccacaccgccacggccaggagtggtgcctcccaggtgtacgggctgtataccagcaggcagcctggcctgtgtgctggggaaagtgccaggcaggggtccagggagcagcggggtgagtgagggcaggtccgagcgagggccaagagagggcatgcgtgccaccctgtgaacgccggcccctggggccagtggcggattaccacgtgccgtcgttcaagggccagctgggaggaggctacagagcttctgggacacgtccagctgcgcattagagccttgagcctcgccaggcgataaggaaatgagtcaaggtcgaatgttgtgcagttgttgcaggctggggccggcagggtcttgccaagatagggctgggctcgatgaactctgaagccctgggggcacaggtgtttctgtcttgcttacccacccagggcgagtctgtcagtcagggtgcagccgggtggaagcaaggaggtgttggactccagcgggctcgagagaggcctgggacccaggagtcggagccctcacccaaaggccagctcctctgcctgtcacgctggtggtggggtgcgcagcagggctgtcgtcctctccacctagtggcagctcatgctgaagcctgagcccatgacctctgggatctggagcaggagcgaggccctctgggtggttacagggagggggcagtgttggaagcagctgggcgttgcctctccttgtgcctagaccacgaagggagcatcctccccatctggctgtccctgtaaccaggtttctgcctctttcagaacatggcagagaagtttctggatggagaacttcctctggattccttcattgatgtctatcagagcaaacggaaactggcccacatgcgacgggtgaaaatcgagaagctccaggagatggtcctaaaggggcagagactcccacaggccctggccccgctgccccccaggctgcccgaactggcacctaccgccccccttccctaccctgccccagaggccagtgggcctcctgccgttgcacctcggcgcatcccccccccaccacccccggtgcctgcgggacgcttagccaccccgtttactgcggccatgagttcgggacaggccgtgccgtacccaggattacagtgcccgcccctgcccccccgcgtgggcctccccactcagcaaggattctcttcgcagttcgtgtccccatatccgccacctctccctcagagacccccgccccggctccctccacaccagccgggtttcatcctccagtgagcgccggcgcggtccttcccgggagacttcttccacctggcgtgttgtgctctgctcacgggaaggaggctggaggtccgctctgtgccaagggctctggggccctgggccagcgtgtctgtctgattttagaactgtaggtcagtggtgagtagtaggagcccaggctttgggcatcaaggcagttgtgtgtgccgggttacagcctgacacctgtgcgttgcatcggtttgcattatccgtgtgatttctaagtatcttagcgttgatgaactcatgtttgggaagaaataggcctctcccccagtcccatttagaatcgtggtccttctgttgcagctttatttaatgagcatggttcatgatacttattttattttcgaaagacagtcctatgtgtctcacccaccggccactgcagccctggtgagggcgggtgggcgccggccggcctggaagagcgccgtggctgggccaccacctgtggctgcgttgttgctcactgaatctgttggggagaggtcaccatagtcaccgcctgacctggctgctgctcttgcttcagagccacaagcaaagtttgcactgggcccactgccgagtccagaggccggagaacggccactggtgtgggaggggagcgcacgagtgggactttgcacagcaaattgtgtccccagctcctcctctcccgcctgcctggagccggccctgaaggtttctatgaagaaataatcccccaatatttttactacgtgtgtgattttcctgttttatattgaaaaaacttttttgacactcccaagaccattcagggaaattttataaaaaatgcagatactgtcttgagcagatcgaaatgccgatgaagtggatgcaatttccttttgtgcaagcagtgcacggtgcccccccctcgggtgtccgtgctgtgccttagcttccccaggtgccgggactcacacctgctaggggctgggcaaggccccggctctgctttctctgaagggcttgtccaagttcattgccctgttacaggtggtcaagacgtccggccgccttgacccaggctacccttagccaatatcctctgcccctgggtggctggtggctgggcctcagggtgggcaacgttaggggtttggcgaaagcccgccccatgggattgagggacggggctgcactccaaccgtctgcacctgctcttcccccacccctgtgggacctcatcttcacgtgccatgtgtgctgaaggcccagggcccagcagggggcagtggcacctgttgacggaaaaggccgaggtgcttaccagtggaccttctggcccgcccctcccctgtcacttgtcgggcatccagggccccgacctgtgcctagccgccagggtgacagaaggcagaactgaagcggggtctgggccacgggccaggccactgccttttgtcctcagtgaccatacattcctgctctcggacttgaactctactgtaactgttttcttgaaatgaagctgtacaggacgattcactgccatgccagtcaggcgggcttgccatgttctgtgaatctcgagtgagcggtgccacccgcccccatacctccgccaccggccgctgtcggggatgccacagcctgccacggtcgcagccagacgtgagcttggcattgaagttgcaaagcggcccctggccgggctcgccgtcgctgtccagggccgtgtccggtgctgtggctgtaaagctgtaggaccctttttaataaatagagaattattaataacaggcctgtcacttatttacttggggatgtggatgttcatgatgtctggttctgaaacatcagtgatcaaagttccagcagggaagctggctgggacgtctgtttttgaagctgaagacaaaatctctgcctgtccagggcccctggcacaggtggggcctcttaccctcttggtcaccagtctcataaacagcagtcacgtacagggcatgttctgtgtcttaagagggtgtcttcaggatcacagccactgtgtccaagtaggggactgagggtgacctcagggctcagactgtgcctgctctctgtccgtgaggttgccgccgtgtgctgtgtgaatggtggtacttgttaggattttctgtgttggtttttagtgggaaaaccagtggctctgatgttttgctttggggacttgccagcaggtgtttcaagaaggcagttgcctctgcccatttcaaagcccggtgggtgctgtttccttctctaggccgagaggaggggaccctgcaaaccctgcctccttgcagagctacagaactgccctgtgcccgccgccccggctgagccgtgcgcctgcagctatgtatgtccgccgccccagctgagccgtgcgcctgcagctaggtatgcccgtcgccccggctgagccgtgtgcctgcgtcctcaccaccccagctaagctgtgtatctgggtcacaatgcccctgcaagggacttgaggaactgagatgagagcaagctcacctgttgctgtctcctgtaatagctgccattcctggcacatcattgttctatgagaatgtgcaggagaaatttctgtggtttttctgtgaggaagagggaaggatttcctgagaagccagttagccttaaagaaaaagtgtgtgatagtttctttcttcccagtggctgccaggaagcttatagccaaatctgttgtccactccagtgaggatgctggacttcacagagtcttgtggctcatgaaccttgccttgtgggagcctctcctcctgctgtgtgtcccattcacaaggaggaccagggagaggcagtgacaggtccaagagggtgggggagcaggaccagaccccaagctcctgctttctagccccacacttgaggcagcctgttcaattaaaggtttcggccaggcacagtggcctggaatcccagcactttgggaggctgaggtgggggggggggggggggggctcgttactttataataggattttcaaacaacctgccaacatgaaaagcccccttcctactaaaaaacaaaaataaccaggcaaggtgtgcactccgtaacccaactccccgagagctgagaaaatttcttaacccggagaggttttatgtgccaagccnnnnnnnnnnnnnnnnnnnnaggttgcagtgagctgagatcacgccattgcactccagcctgggcagcagagcaagacactatctcaaaaaaaaaaaagttttaatattgaatttataaaatgtttttagtatataaatattgacagaacagacttctttctacttgaatattttacctcggtgtatataaacattcaataaataccaaatacctagagtgtagcccttgtgccatgctattaacagtacactgaaaaagagaagcagagtctgttcctgctgtcaaggggatgataatacgattatggttttagctgaagctacaaatggagataagacctatggctaaccataggtcaaggcatcataaggacaacatttttgaatgctgaatcttttaagttaaatcagcaaagatcggctgggtgtgttggatcacgcctgtagatctcagcactttggtaggccaaggcagagggattcacttgagatcaggagttcgagaccagcctggccaacatggcaaagcccccatctctactaaaaatacaaaaattagccaggcatggtggtgcatgcctgtaatcccagctgctcgggaggctgaggcagaatttcttgaacccgggaggaggttgtagtgagccaaggcatgccactgtattgccacctaggtgacagcaagactccatctcaaaaaaaagtttggtcattgaggactcaagaatgatcagttaagcgttgtcaatgcctgtggattttcatttgtatctggtggagaatcagttccgttagtgtttctgaagccatcttgccttgtaaacaaacaagagccaggcacagggtctgtcttagcccttgtggtcagtttgcaaggccctttcaccctaaccacccggcacaagcaccccggctacgcagccttagctgaggccccacttcatcctccaggagacgtgagcacaggtggaaggcttgtctgaggccatacaggagccagccaaggggccttttctctcccctgacccaccctgtcctgtttctctataaatgccagtgatcttggcagggggtaggacagggtgagctcccccacctcagccttccctctggcatggtgctcctgggtaaagtgggtgcttgtgaggctgccacacacccagggactgaacacctttccaggtttccggtaagtgcaaaggctgtgtgtggccatggctcaagtccaagccagccgggagtcagggtccccaccttagcttagcaactgtcagtcaggcatggtctcagacacactgagggggtcagcaactgctaggagccccagggaagctgtgggcattgaggctgggagtgcaagtggcctctgtggaggcagctggctcttggcctcctgtgtaaaaggagggccctgaggcccataaatccccccagagagagatggaaggcggacacacacacagccagtgacagccctgctgagcttttctgcagtcccaagtactctagcattaaatgcagacacgaataggtccccgccccagcacctggccagggccgacaagggaacacgtgtccctggaggaatgaagagccaggcacagcccctccctctggggcatcagtgacaacaaacagtcaaagtgcattttattgccaacagaacacttcaggaggaaatgctaacacaaagccaaggcgctggtgctggctcatttttgctcctcctgaccttggccagtatttggtagcctttccagagcacagggtgaaaggctaaagggctagggctggggtggggggagcaggagggcatggcagctgctggctctgtcctcccagcctggtcccacccctcctgccgctctccttgggctcaagggacacacattcgttcaaatctgacgggcaaagccagggcctagcccactctagccgcagggtcccctccctgagggccctggtccagcacctgggtttctgggctttttctggctgagctggagggcctagggccaagcccactctccggagggctggaaaccaccccttcaggtgggcagtggggcgcggccagaacgggggaatggaaaacaggaaatgggggtggctgcagattccagctggaaatggaaactctccaggagtgaaggcagcgcctgggccgctatgtctcacctcactccccagaaagcggccccttccagcatctgacccctcctggggggctcccatcacggaggcccgagggccaggcctgaggagtaatgggcgacattcctctagcccacacagagcctggtctgcggagaccacgcagctggagggcctggtagaatcggtgccccagaaggccacagacaggatgcctgaccctcgtcccatcagccggcacgggctgtgtgccttccatccatccacgaccttcaggagtccagaaggcagggagccccacgctggcccggtttcccagtgtgctgactacaaacgtaggaagaagagctctagctcggaatattaaaaacactattttctgaagaggaatattaaaaacactattttctgaagagttgaggctcaggcctaccgggtcctggctgcaccccaaagttccttctgcagataaataagagactcacatccagaagcaccacccacatggcccaggaccctgcaggctcagtaagggccaggggccttgaggacattgatccagacggtggggcgggaggcttgggcaccaggtggaggggcaaggcctctcggtcctgtcagggcagttgcagaggcccaggcctgtcaccagccaccctgctggacccctggggggcctagtagttcacgagttgagctgggtagatgccatcctttttgtcaagctgcaggggttaaaggtggggggtcagtggtcacagccaggcacctggggccccacctctcccttgagcaagctcctccctgcatgttgtcagtggtccctgacttccccagggacgtgcaccatgtgcccctctagggctggggacagcacccccgtccaggaactcccccatcccagtgcagacggcacctggtggtcctgtctgggggccacgctgggcttctgggccaggggtggtttcttggtggttacacttcggggggcagtgctgggccggatggccacctcctctccagggctgcctgatgccccagccagcacgtagtgttgcttccgcaactcccccagccgcatgcgttcagcctccagcgtcttctccagctccaggacacgcacctgtagccacacggcctgctcagcccagcccagcctccccagggagctctctcctgggtccaggcttcgcccgagggatgagctcagaggtcacgggggcagccatgggcgcctacctgcgtctccatctcctgcttcttcagcttgatgagggacaggccggagaaatccatggtgtctgtggccggaggacaagggggtgaacatctgggcacccacccccattcagcctcgggagccagcagcccccgttggcatctggcactcacctctgtcctcaatctgctcctggcctgacttggtggaggccaccacattggcagccctctcattgactgtgcgagaacattcctgcaggcggctcaggtgggggctgtgcttgttggccttcacctgaggggcgagaggtcagggtgggcccaggtctcccagctcagggcagcagcaggcctgggcttggcagccacagcccaggccaagctgggcccagagcccggtgtgctgctgttggcgtgcaagctcaccttggaggccgccaccagctgggccgtgctggctgcgatctcgtgggagcagacgatgagctcctcatacttgcccgtgtgaagcaccaccttgtcagctgcctccctgcgggtcaagggccagtcagggccagggtctctgaccccacggacggctggcaccactccacaccccctctactccctgcaccctgttgaaccccaaactgctccaactggcaggaagcagccccctgcccccccccacccagggcaacctacaccagctgtgtggctccccagcccacagccttggaggccgagatgaggccttcggtccagcgcgagttcttggcgtaaaattcctgctgcgtggctgccccctagtggcgacgggagaacagggcaggacatgccagtcaaggacaccaaaggtggaaaggggccctcaagggccctctccccctcactctggccatagggcgcatccctgaggcctccctgtggtagggggtggagggtctcatgcccagggtggcctaggctgggggtcaggctccttgtggactgtgccctgctgccgccggcccctcaccctgccgctctccacgatctccttctgcaggctagtggatgtcgtcaccaggagccggatagcctgccgagaccaagacagcaatgactggtggccctccaggtgcagacccccccgggtcacagcccctcaccttcatcaggtctgtgcaggagttgaggatcctgggggagagaaggagagacttagctgccgctctgcagagcagcccacacgacgccatggcgggcctggccacatcagggctcagcaggtggggagggagtgtctgctctgagccaggccttcctttcccgtgagcagaacagttgggggcagaaccttaggggccacggggagcccacctcggctgggcctggggggacagaaggggggctcacctctcgttcacctccagcttcacccccgagctggcgtggcgtgcctggttcatcatgtcctgcacccaagaacagagccgtgagctggctgggaggaggggaccgtggtcctgggaaagccagggctgcctcctgccctctcagctctgacctcacaggcccctggaaaacgccatctgtcctctgtctggaggctgagagcaggagtgggtgcagcctgtacccagcccagttggggcctccggcccccaaagctccacaggaatgaggggagtccccagatcccgtgctcacctcaatcctccgcacagcatcttcaatggctgcggatgtggccgccatctccttgtcgaccacggcccccagctcctcctgccgcacatctaggctcttgggtttcagttcctggtgaggatgggagtcagacaggggtagcctccgtccccccccgtcccacgggcagcctgggaaagaggttggggaccacagggatcgaggagggtgcatggtccccaccctgtgtcctgaggctgcaggctccacgcacaaacacctgttcagccaacccagaggtgggtgcagaggtcagaggcaggcccaagcctcccaaacccacactcagctgtgcctcacctggcccagctgaaggatgccctgcaggggtgtccgcaccaggctggcctgcatgtgccgcagagcctgctggtcctgcagctgccccatgagctccagagcccgggccccgcactccctgcaggtgtctatgaggcctggggtgagaaaggaccgtgagtggagcccccccgcccccgacaggctccataaggacccccaggggagacaagccagtgaggtggacagaacctgccatcccaggacccacttacggtcggcagggtcggtgggagccaggtgcgaggtggcaccgccattgatgatggtatccgcagccaggtgggagaagcgggtcagagctgccaccagggcggaggcgtctgtgcgggtgggtggggccaaggttgggggaggatgacactgagacactagcactgggaccaccgtcggtggccagctatcccaggaggaggaggaagaggaaaggagggctcggcaagacaacgtccaggaggcagtgggaaccacaccacagtgtgtgtggccccgggcccttcagtgctctgccacctgcagacatatggtggcccaggccccagaggcaaaagcctatttgtccacagggcaggggtgggttcctgggaaggagcaggcagggggcatctgcttggcttcccagagaggtccctgctgtctgtaaacctcccaaaaggcaagaggtggccatgggcgctggaactgggacacagcccccgcctccgccctgccctggctacactcacctgccaaggaggtcaggtactgggcgtggccctcctccagggtgctcacggcatccaaggcctcctgggccctgctcaccaggtagtctgcaagcacgaggagaactgaggcccctgccacccgctgctcagggctggggatgggaaggaggcaggggagcggctgagtgtggccccactgtctacctggggagctggtacagcgcaggtgcagggggtcgtccagcttgctcacggcatcctgcaggatgcccgcggcctcggcagcagcgccccgcaacactgcgaactgctcgtccagcagcctctgccgcagcccctgctcctgagactcctggcaatgggggtggacaggttagagatcctccccaaggccaaggatgtgccccagccctggaatgacccatgggccaccagttggagcccagctgagaccctcactggtcaggggggtggagatttctagaaagaggcttcccacacagtgcacagctcaagaataaaaagataacccaattaaaacgtgagctcaaggtcctaaaagacatttctccaaagatacacaaatggccaggtagctcatgaaaagatatgtagcaccctttgctatcagggaaacacaaatcaagaccgtgagaaaccactccacacccactaggatggctaaaataaaaagaagacaataataagcattggcaaggatgtggagaaactggaacattcatgcgttgctggtgggagtgtaaaacggtgcagccactttggaaaacagtctggtagtttctcaacagggtaacagaggtgagacccagcagttctactgtgttccacacacatcagctatctatccaagataagtgatggcagatgtttacacagaaacttgtgctcaaaggcccacagcagcactatttacaacagccagaaagttgcaacaaacccaatgtccaccaagtgatgaacagataaacacaatgtggtctgtccacacggcagagtacgactcagccataaaaggaatgaggtaatgacacaggctatgatgtggtgacccttgacaacgtgatgctgagtgaagaagccggacacaaaaggatgcatcgtgtatgatcccgtttacatgaaatctctagaacaggcagatgacggagacagatcgatggttgccagacggcagtgaactcagtggtgctgctgcatctggggaggccataccctctctgccagccggccctgcaactcgccctgctcctgggagctgcgctgctgctcccggctcagcgccgcctctgtctcgcgcaccaggctctgcgccgccagcaggtctgcctcccgctgccgcacagctccactcagagcatccttctccgcactcagcgtgtccagccgtgagctcagctccgacttgctctgtggacagacatggacaccaggcatgtgaacagagctcccaggccccacccaccctgcccccacgcttataaactgggccctgggggttagtgatcacttccattagactcagggctccctgaggaccagcggtaggtcctgtctcccatgtagcccctgggtctgggtcagggctgcatcccaggatcaccgagtggcacccaggtggggcctgttcacgggaaagaggacctgacttccacccaggactggccccagaaccccacccccagtcagcaaagccagatgcacctgctctgtgtggctcagggcctcctgcgcgcgggccagctctccggccttggcctccagctccctcttgagcttctccagctggtcgctcttctcctctagctgggacaggacagcgtgtcactggggcagtgggctggggatgccggggcagggccctgtgccacaagggacataccttcaactccgactcccgcttcacctgctccacctggaaggccagctgctccttcacccgcgccacctcctcctggctttgctgcgtcaccgtcagctgcttggctgtgtccgcgttctgcatgggcaggggaagggctcatgctctgctgccatccccgagaggccctgccaccggctgggatggaggatgggctgcacctacctttctgagcagctccgcgtgcacatggacgagctcactgtgcttttccttcagcttgttgtagcgcgcctccgtggcactggccttccctgggggcgagaggaggggcagtgatgccccgtgtggggtggcaggggctggggacacacccttggacccctgtggccaaggccccacgtactctcagcctcctcacgcaggccctggctccgctcgccctccagctgggcagccctcagctgggccagctcgtggcggagctgctcattatccaccagggccttctgcttctgcttccgctgctcctccagctcaccctccagtgcattcacctggctcttcagctgcgcgatgtaccgctgggcctgcgggaggaggtgtgac

SEQ ID NO: 1732 - DNA, 3021 bp, Homo sapiens
gggctcacaggctgcgggaacttccttcccactgcctgttttccttggatcgcggtatctctcttcctggaggaaaaaggctcttatgacctcatggcgcgctctcccgagccgcagtgacgtcattaatgcgctcacgcgtcacagcccaatcatagggcccttcccctccctttagaagtcccgactgtccctgacacattccactccaagcgagccgcgacacttacgtcacgtccgcccgcccgcgcggtgatgacgtcacgacccagggctggcgtcacgtgtcccccccgcggggggcggcccttgagggcggcgcttccggtcggcggagcctggtggccgcagcggcggtggcgacgacggccgagacgtggggatggcgggcgccgggagcgaagcccggttcgccgggctgtcgctggtgcagctcaacgagctgctggaggacgagggccagctgacggagatggtgcagaagatggaggagacacagaatgttcagcttaacaaagaaatgacacttgccagcaaccggagcctggcagaaggaaaccttttgtaccagccccagctggacacgttgaaagcacgcttgacccagaaataccaggaactccaggttctctttgaagcctatcagataaagaagaccaaattagacagacagtctagcagtgcttccttggagaccctgttagcacttcttcaggcagaaggggccaagattgaggaagacactgagaacatggcagagaagtttctggatggagaacttcctctggattccttcattgatgtctatcagagcaaacggaaactggcccacatgcgacgggtgaaaatcgagaagctccaggagatggtcctaaaggggcagagactcccacaggccctggccccgctgccccccaggctgcccgaactggcacctaccgccccccttccctaccctgccccagaggccagtgggcctcctgccgttgcacctcggcgcatcccccccccaccacccccggtgcctgcgggacgcttagccaccccgtttactgcggccatgagttcgggacaggccgtgccgtacccaggattacagtgcccgcccctgcccccccgcgtgggcctccccactcagcaaggattctcttcgcagttcgtgtccccatatccgccacctctccctcagagacccccgccccggctccctccacaccagccgggtttcatcctccagtgagcgccggcgcggtccttcccgggagacttcttccacctggcgtgttgtgctctgctcacgggaaggaggctggaggtccgctctgtgccaagggctctggggccctgggccagcgtgtctgtctgattttagaactgtaggtcagtggtgagtagtaggagcccaggctttgggcatcaaggcagttgtgtgtgccgggttacagcctgacacctgtgcgttgcatcggtttgcattatccgtgtgatttctaagtatcttagcgttgatgaactcatgtttgggaagaaataggcctctcccccagtcccatttagaatcgtggtccttctgttgcagctttatttaatgagcatggttcatgatacttattttattttcgaaagacagtcctatgtgtctcacccaccggccactgcagccctggtgagggcgggtgggcgccggccggcctggaagagcgccgtggctgggccaccacctgtggctgcgttgttgctcactgaatctgttggggagaggtcaccatagtcaccgcctgacctggctgctgctcttgcttcagagccacaagcaaagtttgcactgggcccactgccgagtccagaggccggagaacggccactggtgtgggaggggagcgcacgagtgggactttgcacagcaaattgtgtccccagctcctcctctcccgcctgcctggagccggccctgaaggtttctatgaagaaataatcccccaatatttttactacgtgtgtgattttcctgttttatattgaaaaaacttttttgacactcccaagaccattcagggaaattttataaaaaatgcagatactgtcttgagcagatcgaaatgccgatgaagtggatgcaatttccttttgtgcaagcagtgcacggtgcccccccctcgggtgtccgtgctgtgccttagcttccccaggtgccgggactcacacctgctaggggctgggcaaggccccggctctgctttctctgaagggcttgtccaagttcattgccctgttacaggtggtcaagacgtccggccgccttgacccaggctacccttagccaatatcctctgcccctgggtggctggtggctgggcctcagggtgggcaacgttaggggtttggcgaaagcccgccccatgggattgagggacggggctgcactccaaccgtctgcacctgctcttcccccacccctgtgggacctcatcttcacgtgccatgtgtgctgaaggcccagggcccagcagggggcagtggcacctgttgacggaaaaggccgaggtgcttaccagtggaccttctggcccgcccctcccctgtcacttgtcgggcatccagggccccgacctgtgcctagccgccagggtgacagaaggcagaactgaagcggggtctgggccacgggccaggccactgccttttgtcctcagtgaccatacattcctgctctcggacttgaactctactgtaactgttttcttgaaatgaagctgtacaggacgattcactgccatgccagtcaggcgggcttgccatgttctgtgaatctcgagtgagcggtgccacccgcccccatacctccgccaccggccgctgtcggggatgccacagcctgccacggtcgcagccagacgtgagcttggcattgaagttgcaaagcggcccctggccgggctcgccgtcgctgtccagggccgtgtccggtgctgtggctgtaaagctgtaggaccctttttaataaatagagaattattaata

SEQ ID NO: 1733 - protein, 281 aa, Homo sapiens
MAGAGSEARFAGLSLVQLNELLEDEGQLTEMVQKMEETQNVQLNKEMTLNRSLAEGNLLYQPQLDTLKARLTQKYQELQVLFEAYQIKKTKLDRQSSSASLETLLALLQAEGAKIEEDTENMAEKFLDGELPLDSFIDVYQSKRKLAHMRRVKIEKLQEMVLKGQRLPQAPLPPRLPELAPTAPLPYPAPEASGPPAVAPRRIPPPPPPVPAGRLATPFTAAMSSGQAVPYPGLQCPPLPPRVGLPTQQGFSSQFVSPYPPPLPQRPPPRLPPHQPGFILQ

SEQ ID NO: 1734 - DNA, 2599 bp, Homo sapiens
gtgcgtggggacctcaggggtttaggagctgatatacttttggttctcatcatcttgtgtgttccttgcagacacagaatgttcagcttaacaaagaaatgacacttgccagcaaccggagcctggcagaaggaaaccttttgtaccagccccagctggacacgttgaaagcacgcttgacccagaaataccaggaactccaggttctctttgaagcctatcagataaagaagaccaaattagacagacagtctagcagtgcttccttggagaccctgttagcacttcttcaggcagaaggggccaagattgaggaagacactgagaacatggcagagaagtttctggatggagaacttcctctggattccttcattgatgtctatcagagcaaacggaaactggcccacatgcgacgggtgaaaatcgagaagctccaggagatggtcctaaaggggcagagactcccacaggccctggccccgctgccccccaggctgcccgaactggcacctaccgccccccttccctaccctgccccagaggccagtgggcctcctgccgttgcacctcggcgcatcccccccccaccacccccggtgcctgcgggacgcttagccaccccgtttactgcggccatgagttcgggacaggccgtgccgtacccaggattacagtgcccgcccctgcccccccgcgtgggcctccccactcagcaaggattctcttcgcagttcgtgtccccatatccgccacctctccctcagagacccccgccccggctccctccacaccagccgggtttcatcctccagtgagcgccggcgcggtccttcccgggagacttcttccacctggcgtgttgtgctctgctcacgggaaggaggctggaggtccgctctgtgccaagggctctggggccctgggccagcgtgtctgtctgattttagaactgtaggtcagtggtgagtagtaggagcccaggctttgggcatcaaggcagttgtgtgtgccgggttacagcctgacacctgtgcgttgcatcggtttgcattatccgtgtgatttctaagtatcttagcgttgatgaactcatgtttgggaagaaataggcctctcccccagtcccatttagaatcgtggtccttctgttgcagctttatttaatgagcatggttcatgatacttattttattttcgaaagacagtcctatgtgtctcacccaccggccactgcagccctggtgagggcgggtgggcgccggccggcctggaagagcgccgtggctgggccaccacctgtggctgcgttgttgctcactgaatctgttggggagaggtcaccatagtcaccgcctgacctggctgctgctcttgcttcagagccacaagcaaagtttgcactgggcccactgccgagtccagaggccggagaacggccactggtgtgggaggggagcgcacgagtgggactttgcacagcaaattgtgtccccagctcctcctctcccgcctgcctggagccggccctgaaggtttctatgaagaaataatcccccaatatttttactacgtgtgtgattttcctgttttatattgaaaaaacttttttgacactcccaagaccattcagggaaattttataaaaaatgcagatactgtcttgagcagatcgaaatgccgatgaagtggatgcaatttccttttgtgcaagcagtgcacggtgcccccccctcgggtgtccgtgctgtgccttagcttccccaggtgccgggactcacacctgctaggggctgggcaaggccccggctctgctttctctgaagggcttgtccaagttcattgccctgttacaggtggtcaagacgtccggccgccttgacccaggctacccttagccaatatcctctgcccctgggtggctggtggctgggcctcagggtgggcaacgttaggggtttggcgaaagcccgccccatgggattgagggacggggctgcactccaaccgtctgcacctgctcttcccccacccctgtgggacctcatcttcacgtgccatgtgtgctgaaggcccagggcccagcagggggcagtggcacctgttgacggaaaaggccgaggtgcttaccagtggaccttctggcccgcccctcccctgtcacttgtcgggcatccagggccccgacctgtgcctagccgccagggtgacagaaggcagaactgaagcggggtctgggccacgggccaggccactgccttttgtcctcagtgaccatacattcctgctctcggacttgaactctactgtaactgttttcttgaaatgaagctgtacaggacgattcactgccatgccagtcaggcgggcttgccatgttctgtgaatctcgagtgagcggtgccacccgcccccatacctccgccaccggccgctgtcggggatgccacagcctgccacggtcgcagccagacgtgagcttggcattgaagttgcaaagcggcccctggccgggctcgccgtcgctgtccagggccgtgtccggtgctgtggctgtaaagctgtaggaccctttttaataaatagagaattattaata

SEQ ID NO: 1735 - protein, 235 aa, Homo sapiens
MTLNRSLAEGNLLYQPQLDTLKARLTQKYQELQVLFEAYQIKKTKLDRQSSSASLETLLALLQAEGAKIEEDTENMAEKFLDGELPLDSFIDVYQSKRKLAHMRRVKIEKLQEMVLKGQRLPQAPLPPRLPELAPTAPLPYPAPEASGPPAVAPRRIPPPPPPVPAGRLATPFTAAMSSGQAVPYPGLQCPPLPPRVGLPTQQGFSSQFVSPYPPPLPQRPPPRLPPHQPGFILQ

SEQ ID NO: 1736 - DNA, 2849 bp, Homo sapiens
gggctcacaggctgcgggaacttccttcccactgcctgttttccttggatcgcggtatctctcttcctggaggaaaaaggctcttatgacctcatggcgcgctctcccgagccgcagtgacgtcattaatgcgctcacgcgtcacagcccaatcatagggcccttcccctccctttagaagtcccgactgtccctgacacattccactccaagcgagccgcgacacttacgtcacgtccgcccgcccgcgcggtgatgacgtcacgacccagggctggcgtcacgtgtcccccccgcggggggcggcccttgagggcggcgcttccggtcggcggagcctggtggccgcagcggcggtggcgacgacggccgagacgtggggatggcgggcgccgggagcgaagcccggttcgccgggctgtcgctggtgcagctcaacgagctgctggaggacgagggccagctgacggagatggtgcagaagatggaggagacagacagtctagcagtgcttccttggagaccctgttagcacttcttcaggcagaaggggccaagattgaggaagacactgagaacatggcagagaagtttctggatggagaacttcctctggattccttcattgatgtctatcagagcaaacggaaactggcccacatgcgacgggtgaaaatcgagaagctccaggagatggtcctaaaggggcagagactcccacaggccctggccccgctgccccccaggctgcccgaactggcacctaccgccccccttccctaccctgccccagaggccagtgggcctcctgccgttgcacctcggcgcatcccccccccaccacccccggtgcctgcgggacgcttagccaccccgtttactgcggccatgagttcgggacaggccgtgccgtacccaggattacagtgcccgcccctgcccccccgcgtgggcctccccactcagcaaggattctcttcgcagttcgtgtccccatatccgccacctctccctcagagacccccgccccggctccctccacaccagccgggtttcatcctccagtgagcgccggcgcggtccttcccgggagacttcttccacctggcgtgttgtgctctgctcacgggaaggaggctggaggtccgctctgtgccaagggctctggggccctgggccagcgtgtctgtctgattttagaactgtaggtcagtggtgagtagtaggagcccaggctttgggcatcaaggcagttgtgtgtgccgggttacagcctgacacctgtgcgttgcatcggtttgcattatccgtgtgatttctaagtatcttagcgttgatgaactcatgtttgggaagaaataggcctctcccccagtcccatttagaatcgtggtccttctgttgcagctttatttaatgagcatggttcatgatacttattttattttcgaaagacagtcctatgtgtctcacccaccggccactgcagccctggtgagggcgggtgggcgccggccggcctggaagagcgccgtggctgggccaccacctgtggctgcgttgttgctcactgaatctgttggggagaggtcaccatagtcaccgcctgacctggctgctgctcttgcttcagagccacaagcaaagtttgcactgggcccactgccgagtccagaggccggagaacggccactggtgtgggaggggagcgcacgagtgggactttgcacagcaaattgtgtccccagctcctcctctcccgcctgcctggagccggccctgaaggtttctatgaagaaataatcccccaatatttttactacgtgtgtgattttcctgttttatattgaaaaaacttttttgacactcccaagaccattcagggaaattttataaaaaatgcagatactgtcttgagcagatcgaaatgccgatgaagtggatgcaatttccttttgtgcaagcagtgcacggtgcccccccctcgggtgtccgtgctgtgccttagcttccccaggtgccgggactcacacctgctaggggctgggcaaggccccggctctgctttctctgaagggcttgtccaagttcattgccctgttacaggtggtcaagacgtccggccgccttgacccaggctacccttagccaatatcctctgcccctgggtggctggtggctgggcctcagggtgggcaacgttaggggtttggcgaaagcccgccccatgggattgagggacggggctgcactccaaccgtctgcacctgctcttcccccacccctgtgggacctcatcttcacgtgccatgtgtgctgaaggcccagggcccagcagggggcagtggcacctgttgacggaaaaggccgaggtgcttaccagtggaccttctggcccgcccctcccctgtcacttgtcgggcatccagggccccgacctgtgcctagccgccagggtgacagaaggcagaactgaagcggggtctgggccacgggccaggccactgccttttgtcctcagtgaccatacattcctgctctcggacttgaactctactgtaactgttttcttgaaatgaagctgtacaggacgattcactgccatgccagtcaggcgggcttgccatgttctgtgaatctcgagtgagcggtgccacccgcccccatacctccgccaccggccgctgtcggggatgccacagcctgccacggtcgcagccagacgtgagcttggcattgaagttgcaaagcggcccctggccgggctcgccgtcgctgtccagggccgtgtccggtgctgtggctgtaaagctgtaggaccctttttaataaatagagaattattaata

SEQ ID NO: 1737 - protein, 268 aa, Homo sapiens
MTSRPRAGVTCPPRGGRPLRAALPVGGAWWPQRRWRRRPRRGDGGRRERSPVRRAVAGAAQRAAGGRGPADGDGAEDGGDRQSSSASLETLLALLQAEGAKIEEDTENMAEKFLDGELPLDSFIDVYQSKRKLAHMRRVKIEKLQEMVLKGQRLPQAPLPPRLPELAPTAPLPYPAPEASGPPAVAPRRIPPPPPPVPAGRLATPFTAAMSSGQAVPYPGLQCPPLPPRVGLPTQQGFSSQFVSPYPPPLPQRPPPRLPPHQPGFILQ

SEQ ID NO: 1738 - DNA, 2416 bp, Homo sapiens
gggctcacaggctgcgggaacttccttcccactgcctgttttccttggatcgcggtatctctcttcctggaggaaaaaggctcttatgacctcatggcgcgctctcccgagccgcagtgacgtcattaatgcgctcacgcgtcacagcccaatcatagggcccttcccctccctttagaagtcccgactgtccctgacacattccactccaagcgagccgcgacacttacgtcacgtccgcccgcccgcgcggtgatgacgtcacgacccagggctggcgtcacgtgtcccccccgcggggggcggcccttgagggcggcgcttccggtcggcggagcctggtggccgcagcggcggtggcgacgacggccgagacgtggggatggcgggcgccgggagcgaagcccggttcgccgggctgtcgctggtgcagctcaacgagctgctggaggacgagggccagctgacggagatggtgcagaagatggaggagacacagaatgttcagcttaacaaagaaatgacacttgccagcaaccggagcctggcagaaggaaaccttttgtaccagccccagctggacacgttgaaagcacgcttgacccagaaataccaggaactccaggttctctttgaagcctatcagataaagaagaccaaattagacagacagtctagcagtgcttccttggagaccctgttagcacttcttcaggcagaaggggccaagattgaggaagacactgagaacatggcagagaagtttctggatggagaacttcctctggattccttcattgatgtctatcagagcaaacggaaactggcccacatgcgacgggtgaaaatcgagaagctccaggagatggtcctaaaggggcagagactcccacaggccctggccccgctgccccccaggctgcccgaactggcacctaccgccccccttccctaccctgccccagaggccagtgggcctcctgccgttgcacctcggcgcatcccccccccaccacccccggtgcctgcgggacgcttagccaccccgtttactgcggccatgagttcgggacaggccgtgccgtacccaggattacagtgcccgcccctgcccccccgcgtgggcctccccactcagcaaggattctcttcgcagttcgtgtccccatatccgccacctctccctcagagacccccgccccggctccctccacaccagccgggtttcatcctccagtgagcgccggcgcggtccttcccgggagacttcttccacctggcgtgttgtgctctgctcacgggaaggaggctggaggtccgctctgtgccaagggctctggggccctgggccagcgtgtctgtctgattttagaactgtaggtcagtggtgagtagtaggagcccaggctttgggcatcaaggcagttgtgtgtgccgggttacagcctgacacctgtgcgttgcatcggtttgcattatccgtgtgatttctaagtatcttagcgttgatgaactcatgtttgggaagaaataggcctctcccccagtcccatttagaatcgtggtccttctgttgcagctttatttaatgagcatggttcatgatacttattttattttcgaaagacagtcctatgtgtctcacccaccggccactgcagccctggtgagggcgggtgggcgccggccggcctggaagagcgccgtggctgggccaccacctgtggctgcgttgttgctcactgaatctgttggggagaggtcaccatagtcaccgcctgacctggctgctgctcttgcttcagagccacaagcaaagtttgcactgggcccactgccgagtccagaggccggagaacggccactggtgtgggaggggagcgcacgagtgggactttgcacagcaaattgtgtccccagctcctcctctcccgcctgcctggagccggccctgaaggtttctatgaagaaataatcccccaatatttttactacgtgtgtgattttcctggggaaattttataaaaaatgcagatactgtcttgagcagatcgaaatgccgatgaagtggatgcaatttccttttgtgcaagcagtgcacggtgcccccccctcgggtgtccgtgctgtgccttagcttccccaggtgccgggactcacacctgctaggggctgggcaaggccccggctctgctttctctgaagggcttgtccaagttcattgccctgttacaggtggtcaagacgtccggccgctgtcggggatgccacagcctgccacggtcgcagccagacgtgagcttggcattgaagttgcaaagcggcccctggccgggctcgccgtcgctgtccagggccgtgtccggtgctgtggctgtaaagctgtaggaccctttttaataaatagagaattatt

SEQ ID NO: 1739 - protein, 281 aa, Homo sapiens; identical to SEQ ID NO: 1733

SEQ ID NO: 1740 - DNA, 25852 bp, Mus musculus
ctcactgataagtggatattagcccagaagctcagattacccaagatacaatttgcaaaacacatgaaactcaagaagaaggaagaccaaagtgtggacacttcgatctttcttagaagggggaacaaaatacccatggaaggagttacagagacaaagtacagagcagagtttgaaggcatgaccatccagaaactgccccacctggggatccatcccataaacaaccaccaaaacccagacactatcaaagatgccaacaagagctttctgacaggagactgatattagccagtgcctgactaatacagaagtggatgctcacagtcatccactagacggagcacagggtcctcaatgagggagctagagaaaggacccaaggagctgaaggggtttgcagcccccaggaggaacaacaatatgaactaaccagagctccctgggtctaaaccaccaatcaaagaaaacacagggagagactcatggctccagctgcatatatagctgaggatggcctagtcggtcatcaaagggaggaggcccttggtcctgtgaaggttctatgccccagtataggggaatgcctgggccaggaaaggggagtgggtgggttgggaagcagggggaggggagagaagataggggatttttggaggggaaactaggaaaggggatagataacatttgaaatgtaaataaagaaatatctaattaaaacaaaacaaaacaaaaccaacaataacaacaaaaagaaaataaaaagaagaaaagaaaaaaacaaagaaagaaagtaaagacatgagactacgccggggcctagcaaacacagaagtggatgctcacagtcagctaatggatgggtcacacggcccccaatggaggagctagagaaaatacccaaggagctgaagggatctgcaaccctataggtggatcaacattatgaactaaccagtaccccggagctcttgactctagctgcatgtgtatcaaaagatggcctagtcggccatcactggaaagagaggcccattggacttgcaaactttatatgccccagtacaggggaacgccagggccaaaaagtgggagtgggtgggtaggggagttggggggagggtatgggggacttttgggatagcattggaaatgtaaatgaggaaaatacctaatttaaaaaaaaaagaaagaaagtaaagacacagagaggagtttcctggcttggtcttgtctgttgggcttgctccatcctacagagcagcttctcaggtttgcttaggaaggtcctggagcctgtgtctatttttggatgtcatcctagagccttgtgtggctaagcagtcagccaagggacagcaggtttgctcctcaccctatctgtccctccaaatcaccacaaatagacaatatgtctaagagcctccttagtaacagtatagagcccctgacatcatcaaacctctctctacctcagaggctcaccactcagctgtggccctcctggaccgccaaggacccagctccttcaaagcccactgtgggcaggagccatgcaacttgttcaaaaaatgctttccaaaaccaaaatgatgatgatgacgatgatggtatgtgtgtgtgagagagagagtgtttgtgtgagtgtgtgtgtgagtgtatgtgtgtgtatatgtgtctctgtgtgtttgtgtatgtctctgtgtgtccatgtgtctgtgtgtgtgtatctctgtgtgtctctctgtatgtgtatttctctctctatctgtgtttgtgtgtgtgtgtatgtgagagagagagagagagagagagagagagagtgtgtttgtgtgagtgtatgtgtgtgtgtatgtgtctctgtgtgtatgtgtatgtctctgtgtgtccatgtgtctctgtctgtgtgtgtgtatctgtgtgtgtgagtgcatgtgtgagtgtgtatctgtgtgtttgtgtatgtctctgtgtgtccatgtgtctgtgtgtgtttatctctgtgtgtgtctctctgtatgtgtatctctctctatctgtgtgtgtgtgtttgtgtgtgtgtgagtttgtctacttgtcatgacccacatgtggaaggtaaagcgtaccctcctggggtcagtgttctccttctatcatgtgggtgtcagggatagaagtcaggtggtcaagcttgtggcaatcgccttcaccggctgagccattttgcatctcttcttcttttcaagacaaagtctcacctctaattagtgatcctcctgcctcagcctcctgagtgttgagattacaagtgtgtatcaccgtgtttagcttattaagtcttccttttttctttttataaatgtagtttatttatttttatgtgtctgagtgttttgcctgcatgtgtatatgtgtacaatctgagtccttggtattctctgaggacagaagaggggggtggatcctctagtgtccctagggttacagatgattgtgagccaccatgtaagtgctgggaactgaactcaagtcctctgcaagaggacaagtgttcttcttaagcactgagccatctctccagccccttgccatctttcttgatgatatctaaaaacaaaacatttaaaaccactaggcaatagataagtcttgttttctttccagaaaatgatcgccactggagcctaaaactctttgtaaatgagaatgaaggcacaaactgcctgtgtcagcccgtctataccctgcaaacaaaccgtccttgcaaaggcctccctcaagtcttttcctgaacttgctgatcttgtgggacaaaggaagcaggcaataagagagtggcaggttctgggatgctcagcagctcagaggttcctaacagtctacagcaggttagctgacccagcctgagccttgctgtgttcccactagctggagactaaccatctactggtatcccctgaaccataaacttttcagtcctgtagatgcctcctctttttgggggacaggagtggtaggttgagaaagggtttctctgtgtagtcctggctgtcctggaacttgttatgtgaccaggctgatctgaatcttacagagatcacctgcctctgcctcctgcatgctgggattaaagatgtgtgccaccactcctagcatagatacctgtatgcaacagcactggtagcagaaaagaagccacactgaattaacacaagagcaggagagctgggtgaaagtcacttttcctccctttaacatataagcagttttcaggacgattataagccttacacatttgacatttacctgtcagcacaaggcatcgttagcctaaggtgacttccacatcaaatgcacttcatttcattggaatgacattgtatctgtaattgtagtgtctgtctgccattgtagctggggatgaacatttaattgcattcagaactgataaataacgtcggtaacaaaaggcgttcagttgtttgcactgaattttctttctgtatagactccatacaagtccctagcgttgacataaaatgtaaggcgtggtcccagtgggccaggtggactcgactttggagcagcatttgagggactccattcctgctggagtcttgtgcacacactgacaaggactcatctgggctgtcatggtgacccgtgagatgagcaagcgtgtggagcagacccatgaggcagctaagctgacctctgatcccactgacattcctggggcactcttagaagagataatgggaacattttggtccagaaacagcacagcatgtcagatgtgcacgggagggcatacggacatcccatgccaatccagtagcagcctggcacggggattcagccctacctactactttgtaaaaactgccaaagttccagaattcagccgctcattgaatggtcagagtgcaatctttcacgtgcatgacaaccccttaccaggggagaaagttagaaaggtaccaagttagtgagaatcatagttgttctgtctaggcttttgtcatgctggttttttactggacaatgttcagccaagcattacctagaaccctgtactctgagctgacctcaaattcatgtcttcttgtctcaaactcctgagtaccagaattttttggcttttgtcaccaaggccccaggtcattttatagagaatgtcattgggatcaatatgtctgctcatgggtttggaggagtaagggtggggaggcatggtggcacgtgcctgtgatcggaatgctggaggtgagggcaggaggacccctggggcttggtggccaggtttagtgagagattctgccgcaggcagagttggtgacagtggacaaacagcagtatttgcacagacgctgtatcctcagtacttgaattaaaggcatgagacattacacctggtaaaactgcaggtgcaccgagggaaagcgagacaaacgacctgagacccagtggaaagggcttcaaggtagggtttcccctcactacatatatttttacttcaaaagggttttgtttatttattttttatgtgtatgagtgttttgcttgcatggctattacatgcatgtatgtatgcacatgcctgatgctcagggaagtcagaagaggatatcagattttttggaactggagttacagatgattgtgagctgccgtgtgggtgctgggaactgaactcaggtcctctgcaagagcagccaatgctcttaaccactaggccacatctccagccccactcactacatttccttcttttcttttcttttcttttcttttcttttcttttcttttcttttcttttcttttcttttcctttcctttcctttcttttcttttcttttcttttcctttccttctctctctctctctctctctctctctctctctttttctttttctttctttcttttttttttttttgatttttcaagacagggtttctctgtatagccctggctgtcctggaactcactctgtagaccaggctggcctcgaactcagaaatccgcctgcttctgcctcccaagtgctgagattaaaggcgtgtgccaccactgccggacctcactatatttcttaagtcaactgagcttcctacagcttgatgctcactcccatctatgagcaatcactgctgggatccagcggaaagctgtctgtttccacgaaatcctgctcatttttatgagctgtctcatttccacagaaattcatggctatttttgtaaactacctcagcccatagagtacttgcaaaatcgcactgttaccaaatgaactataaatgggttaagcggtattagcattcatttcaaagctggatgtggtggcatatacttcatctcagcacttggagacagggttttgttggagacaggctctctctgtaattctggctgggctgaaattcccaggacacagaagaccatgagttcaagagcatatagcaagactgtaaggaagaacaaacaaacaaacaaacaaacaaacaaatccagagttaacaggaataaaagctgtcttccctaaaaaagtatcaaagcccttgcttacaaatctcagctgagatgaataccagggacattgggtgtataaagggaccgggtttagctagtagggggcagatgcaaattactataaaattcagagcaatgtggattagcaagcatgtggaataaagaatatgtgtgcttactgttgcctgacaggaaacatttctccgaagaagggaaacatttactgggagttacgggagggtcagaaatgtactgccccaatgaggaaatagagaattccaggaagatgaacggagggtaggaaaggaagagccaggcacaagcaggagtgtttgactgggaagctgggtgctcaggaggaggaggtcagaggactggccagcatgtctgatagctttatcacagggtcagcgtatcagccgagcactaacacagctggagtttggttcttagccctccaaaaacaagagacctagtttggacagcaaattaaatgctcctagtggccgctgcagagaaaccctcaatctatcaactactttgcagaggaacggaaaaggaaatgatggttgcttgacgattagagtttgtacactgtgtttccacccgcccttgtgattgcaacctgaattttaccaggttccctctgacccattcccatggtagtttccagtcccatggatgagtcagtgaattaggttctgtaaaaagttgccaaacagaatcccggagctttaagcaagggcagacaggaccggcctaaacctactctggaaatttctcagagtacaatggtccatcccttttgctgtgaattttcaggaacgttggggctgcttgcaatacacaaccttgatgtggtagtatgtgcctgtgatcccagcattcaggatgttggggcaggaggatcagaagttcgagactcccctcagcaagctcacagttgtctgtttgattattgtgtgtggaggggaggcacacatggaggagtcaggggatagtaactgaccagagtcagttctctcttaccgggagggatcttcaggcttggcacctgtacctgctgagccatttctggagcctacgctttcccgtgtgggatggaaatgaatgtgaacaggtgagatcgtggaaatagtctcccggggcccaatggtacctgttttccagtgtcattcagtgcttgcacgggatggatgttttagagtagcagaatggacctggaatggggcaaagcacagtcctatatattttttaaagttaatttatttatgtaaatgaggactgtctgcatatacacctgaaggccagaagagggcgccaggtctctttatagatggtcatgagccaccatgtgccaatgctcttaaccgctgagccatcccacaggtctccaagccttattaaccccaggcctctagtaagagcataggtgctacatgtgaggagagtgtaccctgagatggagtcttcagtatcccaggcaaactttccatggagccttgaattctccatcctcctccctccacctcccattctgggattacagccatgctcaccatgttagacttctgcattgccgaggcttgaacccaaaacttcctgcatgtttagccaacgaacctacattcctttcctctgtccctcccaccccaagaacagataaatattctgattcagtggttctcaaccttcctaagtctgggaccctttaatactgttcttcatgttgtgctgacccccaaccataacattatttcagttgctacttcataactgtaattttgttatgaattgtaaggtcaatctctgttttctgatggtcttaggaaactcctgtgaaagggtcacgagtccacaggttgagaaactctgctctaggctagtaaccccaaagttcccagagcacagctagattctcattaggctaacataggtggtcagcttccaggtggactgccactatcctggagtttacatgagctcctagctaagaggcactgagagctggccctggagagcctttagcgtttagagcccgaggttggcgactgtcctgctttttcccaggagactctcttttcatcgcttcacggtttagttactactctagcttttttttctaagctgcccagcttaatctacagcataaagtggggtgtgtgctgggctctaagagtagtcgctacaccgatccaacggcggcctgcagcgccctctggcggtgcctgttgctggcatgcaacactgcgagagtctctggaggctcacaggcgcctgactgccagtagctaggtacctgagttctgaaacctttctttgctgtctcgcttctttccaaggattttcactgctcttcaggctcttgcggaggagtacgcggcatctaagatgggtttaactggagttcatagaaagccaggatgctcccattggaacctcaagtgtggtcaactggataacgagtctggattcacagtgtcctcggtattcccccacctggtccccctcacacttcctttcctgtcctggacattgaagaaagtctgacagtgatccctgaagctagggacctccagaatagagggagcagcatctccaccacaggaagtgtgtgtaggagagattctcggtttcagccattacatacaaacacacaatacaaatccgggtggtctgtgacagtttatacccttgccacacaggacacagattcaaatgtgatcatggatgagttgttggccttctctggttgtcccattttaatttggaccttctggaaaccaaaggtcacatctctgttgaagactaggaacgaaaagggttattgggtcagtgtgaatttgtattggattctaagcaagctcttgacgggctgacgggagcaaagagagagccaaaggggccttctgatttagcggaaggacagtgttttgggcctggagagccttccagcggtcccatgatactaaagaaggactcttactcatttcccatcctttctaccgagtcagaccaaattgtcagtagcagagatccaggagattagactccttccgagtatcatggaaataacccttttgccagctacaggttaaaaaatatatatgtatgatttccatttgtctttcaatagctcaagaatttaggtctggacatccactttaattgataaaagggctcaggtagcaaccaagccctctaagacactcaaagagtgggagtcagggctccaggcactgcctagtttgcagcagctccatctcagcaggcacagatgctcatgcgcacacttattaacagggaccctagagcagggctggtggaaacagaggcaggccggctctgtgagttcaagctcagcctggtatacagcatgagttccaggacagccagggttacacaaagaaaccctgtcttaaaaacaaaaacaaaaacaaaaacaaacaaacaaatcaacaaaggaccctagagcctgaatgggccacatagatgaggaggaggcatttgggagaggaacatgatttaaggtcctggaagctggagtttaggttagaccaaattcagagcttcagagaggagcaagtttcttaaagaaaacaggattccaagtagggcctggtgacacaccctgcaacagggtctcagaccttaacacaactgactccacgattttgtctataactaaagtctatagtagccttcaaggttagtcatagcccatctattctgactcattagcctggattcctttagcctagccactgatctgctctgcagtcagtcaactccaccatggcttgtagtggcatgaagcacaagaaaacctacaggctcattttcagagtcgtgcaaatgcacggcttgacactaaaattccagtctcttccttagtcctttccccattctgttttcacttcaagccttgtgctcctagggaagagaccgtcttccaatcatccccagtgtctggacattgtagaactcacagtcggggttcaacaagcatttgtcagcagctcagcctcaaatgtcttttgggctgggagaagtggcttagcagtaaggaccgctagatgctgttacagagtttgagtcttaacattcacagtaggaagttcaaacccgcctatctctagctccattggatctgatatctttttctggtctctcttggggcagggacatcatttaccccggcacaggcgcacacgtatacagtttttttttttttaatgtctttgattaggcatggtggtgcacacttgtgatgtcagtgtcagggatgcagaggcagaaaaatcctgagttccgtggcctgatttaatcagaggaaaaaaatccttgacgcagcagctctaaatgcacatcgactgtatcgacactctacaggtgaggcctagaatagagaacaggatcaatccattgcttctgactgccaatgagtgcggagcgctgtgattggcccttgtttaggtaaaagagtgagcgcgggtgtcttctgggaagtcatggcgtcgctgaattgtaggactgcggtctgtgtggtctgtttggagaagccgaaataccgttgcccgacttgccgcgtgccctagtgagccagagcgggtagtgggttcggagggaggccgggctgcgggcggcggctgcgggcaaggggtacgtgctgcggccgctcgtgctgatcgtgctgacctgagcctgtctgtctcattacagctgttcggtcccctgttttcagaagcacaaaggtaagaccccgggacaccgtcgcagcccttgctccttctttgtaccgtacaggccccatgcccccaggaacccgaagcgggaggattcccgctagttcaaagccagcctgactacagactgagaccctgtctcaaataatccaaagcaagtcagctgctttcttgggaaaagtcttagctatttattcatcttgacattctagtgtagcccctcactatcgcagaaactgccttggctgaggtcaattagccagcaatggttgtctttaaaatatggttgtttattatttacaataggagaaattttctttttctgtgtgtggtattttgagacaggttctcctcctcctcctctttttttttttttccgaggcagggtttctctatgtagctctggctgtcctgggactcactctgtagaccaggctggcctcgaactcagaaatccgcctgcctctgcctcccgagtgctgggattaaaggcgtgagccaccacgcccggctggttctttttcttctttcattttccttctttctttgtttgcttttcaataaagggtttctggctgccttcgaactcgctctgtagaccgggctggcttcaaattcatagcgatctgcctgcctcttgcctcccaagtgctgttttattttgtgctgagaaagagtatctcagattcactatatattcctttttttgttttgtttttgtttttgtttgtttttcgagacagggtttctctgtgtagccctggctgtcctggaactcactttgtagaccaggctggcctcgaactcagagatctgcctgcctctgcctcgcgagtgctgggattaaaggcgtacaccaccacgcctggctgaactatatattctatactcctcccagactcacaatccccatgccttagtttcctaatgctgggattaaaggcacaagccaccacggcccagctgagactggctcttttttttttttttttatgtagttcaggctggcctatctatcatgatcatgctttgtcatcctcaaatgctaggattataggagccaccagaactggttaaaataagttcctgacctattgagaatggagctggagcgatggctcggctgttaagagcttcttgttgctttcccagaggttctgagtttggttttcagcacctgcctactataggcaacttgtaggtccattcccaggggctctgactccccttcaggggctctgactccctcttctggcctctgtaaacactgcatacatgtagcacattctccctctgtctctgctgttttctcccaccccaggctcagacctatccctgccgaaatgcttgctttctgcttgtgaaagctcgctccgttaagtctctgggcttcctcaggtagacttagagcagacttttcttaccttatccatgtgttccatgactactaaacccctctgacctgggagttatgaccttcatgtcctagcggcacatgggtgcacacatacagtaactgttgatgaattgtgttatgtttatagaagtcactgccattaatcctgggggaagtcctgtgaaggtagggtggggcacacaaccaccttgcccaggtccaagctcagtcggcttcctcgccccttctgctggactcggaattactcacggttctctgactgatcgcttggtttgacctgtctctccctctgtgtgtctctacccagtacacattcagtacactggccgtgatggggacttgcggcctcgttggctggcatggagggttgtgtttggctatgcctgaaatttgtgtctctctcagagcagtgcagctctgaagcccgacctgttgagaagagaagagcagggcctcctgtgaggtctgaggagagcaaaggtgaggtggttggggcttttgttgttgtgtttgtttgtttgtttttcgagaaagggcttctctgtgtagtcctggaaatcattctgtaggccagactggccttccttgcctctgcctccagagtgccgagattaaaggcgtgcaccaccactacctagcatggtggtcgagtttaaacaacacacttcaattgatttcaaagatactaaatggtaaggaaaggagagggggtaaatggacaggatacaggaggatgcctttttgggggagcagcagcctcagcagggtggagtacaaactagcgtcctgaagcatggctctggggaggggccctgggcctggggttaggcccatgtgggaggcttcctttgaattaggtcacctccttgctgctgaagtcgccttagatttccagcagtaatgggctgtcctccactcacacatttcatgcatccatggattcgtctgtctttaatgcctcctgggtgttgtagatctgcacacagccccttctgtgcctcaaagaggttcttaagagtcacagaaagagttgggctatgtgtcctttgagaaacgtctagtatgggcttgggtgtatctgcctttggtgaaagtgggggtactatgcttgtcagggttttataggcctcgttcacagtcacagccctgggtcacgacgaggccaggaagggtgctgtctgcagaccacagcatgtcatgctcttgtgaagcccagtcaccattctgccacctactcttggtttaattgtgaagccagagaagcaagctgtcattttatttgaacacgactgttagtgtgccctccctgtggcacctcagtacacacgtggtcgacgtggctgccctggcttcctgaggcctgaccagctgtgctctacactcctcagatgatgactcctccgtagctgatttcctcaacagtgatgaggaagaagacagagtgtctctgcagaatttaaagaatctaggtaagtctgtgctgggcttgttaactgttaggcttgttaactgttagtttgtgctctaaggccgtggggcatgggagagtggagcacggactaagtcgtgcagcagccagctttataccccccccctccaccccccgggggagagtcacctgaccaaggtgtcccatcatcaggacaagctgcacttggcagacacgttttccatagaggcatataaagaagtaacaatcaccagttataatgactgacataaactcccattggctgcacctgggaggatgtgaaagcatatgtcaagaaaaaaatccgtgttattaaagaaactgaggtcactaaagtcttgtttcttgggagttttctcacaaatactgagaattccctcgatatgactattcttgggtggtattctgacaccatttcctctgtatagaatgtggttggctttctgaattgttttggctggaagctcggctatacctcagggctactctgcttctgagtgatagtctttttcttatttatttatttatttatttagtgagacagagagtcgtattgtgtagtcctggctagcttagaactcactgtaacccatactggcttcatgatgccatcctcctgtctctatgtcctcatgatgtttctatcctcagaagaattgctaatttttttttttttccgagacagggtttctctgtgtagccctggctgtcctggaactcactttgtagaccaggctggcctcgaactcagaaatccacctgcctctgcctcccgagtgctgggattaaagacgtgtgccaccacgcccggctcctttttttttttttaatctttaaagatttacttttggggctggaaagatagcttacctgctagctcacctttcctagctggctcctccgttactgttgctaatctcactgtgtgtgtatgcacaggccagagtgcaaaaccctgtgacccacccacccaccagtctctgccttgttcagtgctggagttttaggtatacataggaccactcttagcctttaagtgggtgctgagatatgctttgcacagcaagtgctcttaaccactgtatcttctctccagcccatatttcctttgttcacctgtatattgaagtttaatttgtgaatacagtaatctttctgatgtctaaggcaccttgattccaggacctatttctcaaaaatggcataatacatataactgtctctgcctcccaagcgctgcgattagaggtgtgcattaggttttgatgtatagttggtgtacagtctttttttttgttttttgtttttgttttgttttgagacagggtttctctgtgtagccctggctgtcctggaactcactttgtagaccaggctggcctcaaactcagaaatccgcctgcctctgtcccccaagtgctgggattaaagacgtgcgccaccacggccggctggttgtacagtcttcgcatatgggagtgacagcataagggtggagatacaagtccttcctagctttcagctactgccacaggtcccccttgaacttaaagctggtattgatctttaaggtgaatcggaaactttaagaagcttgctgctgaacccacacctgaggcagttgatgattagcctcgatcagggtgacaacaaagcaaagctgatgcgagcctgtatgcaggagccccttttcgtggagtttgcagactgctgtttaggaatcgtggaaccatcccagaagagggattcctaagactggatgtgttctctgctcaagttacctgctgctgctccaagaggtggctgttttcaaggccaccatacgcagcatgcacacgtgggtcttcctctaccacatggctcgctgcagcaacttcatgaagaggaaacttgtagccctggagtgatggctcagcagttaggagcattgactgcttttccagaggaccccagttttcagcacctatttgactacttacaactgtaattggttgcagaggatctgacagtctttactgtatgcatgtgcatagccatatgtacagggaaaactcctacatacataaaatacttaaaacaaaaacaaaaggttggctatttatatttagatggttctaaattttatttcttgtacagttcagagttgcatcataaataccaagtatatccatttgaattaaaaacatagtgtaacaatttaaggtgtggttctcttgatgctgcattgttcattgttcttggtaacattaaataaatcagtttattaaatattattgttcccttagtaaactatatgcaagttctcccccagccaaaattctagaggcaattttagggtgacttggcccttttaaagtgcttgtggatggcccagtatccatcttgctgtagtgacaacattctggatggagcttgagcacaaagatactaagctgggatgttgtggccctaatcctggcttggtacccagcacccccagatcctgccagtgctgaagccacagccctggaaggctggcactctggccatgaagccctggctcaggctggaatttgcttgcacgtgcagttggagtcgccgtgggaatagcttggcacttgcgtgtgggatctaatgtctttggcaagacagctggcaggaaaaggccttgtggaaacaaaggcactaaagatcactcaggcaggtgggggtagaagagtcacacttggactggcctgtggctttctagcagaatctgattaaagccagtaacacaggaggctgaagggtcagggcagatgtcagcatactgaagtggagacttcctgcagtgaaactttatcgagccctagggagaaagagatgcatcctatgagtggcagggcttagataaataaaggaataaaatctcacatccattccatgagactggaaatatcttgtgactagttagagctggaagatcagaacacttctgtttacccccttgttgatttcagggagagtctttacatattatatagcatcttgttgattgcctttcttttctctggtcccttgtactaggctaagtattaacccaggctcacggagaaaatggaagttctgagacaacgtgccatcaatcacaggttatccagggaggggctaagctgaggccaggcttgaggctctgctttcaagtggaacgagctccacagtacataggacagccatacctttgcttttttcattgagagagtgacaaccaggaaccaagtgatacagtctgagaaactgcctaatgcagtgtcatttgaggtaacagccacactcatttcttccaagtgggactcactatgtccttcctgggttaaccatgcactctaattcttacacttaccctgtacgatgctgcttatgtccatcagggctcagctacatgtctaactgaggagctcatattgtgaggcagagccaaaccttcaaaggcaaactgtttggaagtggttttaaaactgaagggctctgaagagtcccggtcggtcattagttgaaaaaacggcagtaatccacacctggagtttttggcttacccagcagggttaggaagtcttttgctgctccaagcctttttccctgcctttctcagtgaacagttcggagctgtgggaaggactgccatgatatcacagaacgagaacatacctggggcagtgctctgatagatgtaataccagcctgatcctgttgtggtgtctggactttgttgctgggtctgtctgagggaagccgaaggcaggcatgggctaccagtttcctctgaaagccacgtacgccatcagctgagttggctagcaccagtcccaggggccagagatggattattgctcccaggaacctagtgtgtgctggggacatcgaggaccgcagggtaccaggagcctgaggcatgggtttctcctccataccatccagttctttagaggcaagacaggccattctgatcttaaagagaaacagtcctttatagctttaggttgtccagccctcttcctaagagaatttacttttgcatccatttatttgacatagaggcatgctacagtggacatgtagaaattagaggacaacttgtgtgtcctggggattaaacttgggtgggtaggatttagctctcttaaaaaaaaaaaaaaagcccgtcgtggtggcgcacgcctttaatcccagcacttgggaggcggaggcaggtggatttctgagtttgaggccatcctggtctacagagtgagttccaggacagccaaggctacacagagaaagcctgtctcaaaaaaccaaaaaacaaaaaagctgggtatggagcacccgggagacaggacaggcagattagagtttgagcccagcctgttctacgttccaggacagccagatctatacagagaaactctgtctcaaaagcaaaaccaaataaaagatgacattcgttttggaatacatgtatgtgtaagggtgtgagcgtgccgtgggatgcttgtgatggtctgaagacagcttctgggagcttgctgcccaccaccagagcctggggattacactcaggtgggcgggcttggcagcaagcacctttaccaactgagccatctttctagatctttctagcagatagaaagaatcagcttgatgaggtaaactgaagacctttggctgtggtgccctgaactagacagacaggctctgtgtggcagaacatagagaaactgaagcgccttggcagtttgttcccggagttgcatctgcactaagcccatctcatcatgcaagaggaccgacacaggctgagaggctctgtgagctgccagtatgcccacaccacagcagcagagacgttctgtctcaggtctgtcagaagcccagtcttcaagtactgcccatcctggccccagtcatactcactctccacttatgccatgcgtgcttgatgaccgtggcagctatgtgtaaccttctgatgtgtttccgagttaaccaggacctaaaagctaaggaaacagcacagacgtcaaaaccaccattagaaccagagtaaaagtatggaatctgctcttccagggatacactctgtcagtacaaagtcattcctgagggaggctggctcagtggttaagagcacttactgctcttgcagaacacccagatttggttcccagcacccacatggtggttcatgatctcttttggctccaagagatctgattcccttttggcttccatgggcacctgcatgcatatggtaacacatacagccttagactgggagctctaactgccaagggcctgtctcagactcagtcctcagcagtgcccaaggaaggagtgggatctgggttatctgttcctttaaaaccgtttgtttgtttgtttgtatggatttgtagctctgtggtatagtacttacaaaaagacaagttacatattttttccttggagacaaggactctacatacccaggctggcatcaaacttaagatccatctcagttccccaaagctgggctcacaggtgtggacactacccttggcctttgtgttggtcacacccgccatacgggatcagccccacctaccagcctggatgagcacggcagcccgcctctgtttctcctgcttttggagccggtgtcgcctccagccacactggatgcaacgggcacactgctccagcatctgggcacgcccacattccagaagctctagctgagagaaggggaagccgatgaagtgctcggtgcacccccaggacccccaggagggcctatacttgcagctggcacctgtaattcatccccagccagtttaccatggagtcagtcatgaagatctttgtcctgccacagtacagtgggatttgtgtgttcttagccgggtcactgggagtggctgctgtctgaattaaagctggcagagcatggagaatgtcctgtagtagaggttgcagtgtggcctccttggcacacagaggctgctctgggggtaggagaaaggcttcatcagtccctgctttcccatagactctgtagcctgaagacactggactccctagagctctttaagccttgttcttgcagttctagacctactcatttcttcctttccccctctcttgtgtcccccgaaatcctggctgtttgggagtgtcctgaagcttccttggacaggctggcaaggggagctgggagcctggaaaagggcctcccaggctgcttggccactccctcagccccaccactccccccttccagtcagtcctgcgtagaaaagggagaacacacccagctgtgtgacagccctcccagactcgcagggctgcctcctgtgtggcaggatttacctgaggcctcagaccacagttagctgcctagtgcctctctggagacagaggccaccaaagcagatgctggagacgagagatgagagacatccacaaaatggaccagcgcccagaggggcttggaagagacaggagagcaaaccatggagagaggagagagaaagggagggaagggaaggtgacacaactcccaagaggaggagaactggctgatggggcccagaagagcatgggtagtgggggcaccactgtggttggctgagatttgtcctgtgtctgtccttccacctgtccctagcatttccacattcctagttatggacagctacactgtgccagacgacttctcaatcatagtcacaggctagacttgcccaagtgctttggacataactctccttgctgcttcctgggactggagctcaggccctgtaggaccagtccagacccctaagattcccttctgttcttccttcccactgccaaggctggctcacctccgttttgtctgtatggagtcatgctaccaatactgaaaagttttgtccccttattactcaactgcccacagctctggcctctctactgggatagctccacaacctcactcccaggacctcccacagggcccctagagcagatgagagcatgaggcggatagaacactggctctctcccctgaagggtggtaccccatctacccagaaataaagtccatgttggttttgttttctctgcatggtcctggctgtcctggaactccctctgtagatcagactggccttcaactcgcagatatcagcctgcccctgcctcccaagtgctgggattaatgatgtgtgccaccactgcccagcttccaagtccatgtttcctgactagggcccagctggcaccccagccttccttaccactactgtgtggacttgctcagaccttctgctctgtcttaggcctggaggcttttgttcagattacctttgtcatgtgcagtgttgtcacgtggctaatccaacttatcctcctatacacctcccccaaaatgctctcccatgtccacctctccctgactggcacccgaggaagctctctgcctgtctgcactgttgtcagctggggtttattacctccagcaaccataagtctctgaaccctcatccccaaggacgcacaggtaagtcctcagtaacctagggctgaacaaacgacaaaaacgggccccgctcaccagaggacccttcggcaggctccaggcccccgaggccagaggacatgcgaggtccgagccttctcagtagtttatatctttctatgaagttctggtgagagaccctagaagccaaagcaagcaaaaagagaaaatgactttgttagccaggtcctagctgggactgactcgaagccagtgctgccctgactgtcgcccctggatcaatgaggagggtatgttctagagatgcctgacgtcactcagtgggaagcctgcagagaccatttaaaattgtttgtggctggcaagacggctggactcggcagataaaaatgcctgttgccaagccttgcaacccgagttccatcctgaagacccatacagtggaagagaactgtgctaagttgtcctctgacttccatgtggtgtggtgtgtctccctgctgacagtggggtgctcacacccactgaggacagatagcgtgtacctgcacagttcttaaaacgctactgaggcttggctctgaaacttttcaaatctgacaaagccccaggagaattcctgattctcacttcctttttccttcacactccacctcgggcctcctccagactaaacccattttggtaaactgtcctgattcaaccgtctgccccagaaaacagcaagttctttctacaggctggaagctgactactccctgagccctcacacgagtctgaggaagcatccagttctctctactgccaactatatcccagtctaccccattgctcctgttttcacagctattcttgcctcctagatgccagcaacagcctcctcactcatccccgtccatcctaaccctgcaccaacctccagcgagcagacaaggattctctgagaatacagatactgccggtcccttctcagcttccagtgcacgcaggcagctgtcacggccttgcatggatggcctgctgtgtcggctcctgttctcttacactccctgttgctgcttctctgtggcctatctcttggtggctcacttcctgatagtattatggctgttctctgtcctgagtgcccccagctggccctttcctgttctctgggcctgtactgaaccagcccatggattttccctgcatgccagcaacaaattgtgtttctttctgagcactagttgtactttacacttgtgtatatgtgtgttatccgtgtgtgtgtgtgtgtgtgtgtatgtgtgtgtgagagagtatgtgcttgcacatgtggaggctttgacaatgaaaaagcctctgtctgtctgtctgtctgtctgtctgtctgtctatccatccatccatccatccatccatccatccatccatccatccatccatctagtttcttatggaacctggagctcactgactgcttagacagctggccagcagaccatggcattctgtgtctacctctagcgctgacattacaatgcttgtggccacacctagcttttaactaacatggatgctggagattcggacttaggtcccagcaagctctttacccacggagccatttccccaggcccttttaaaatttatttttatttattgatttttttttttaaattttactttgtaaattgaaaacattatgtatatgagagttttgcttgcatatatgtctgtataccaccatgtgcatgcctggtgactctggaggccaaaggaaggcttcagatgccctggaactggaattaaacattttttagctgctatgtgcttgctgggaattgaactctaatctttctggagagcagccagtgtgcttaaccctgtaccatctctctatccccagacccttaaaaaaaaaaaaagatttatttttattctatgtgtgtgtgtgtgtgtgtgtgtgtggtgagtgggtgggtgtgggcgggtgggtatgtgcctgtaagtgcagacacccataaaggcctgaggggttggatcatcctggagctggactgacaggcagttgtaatgtgccctgtgtggctgctgggaaccaagcgtgggtcctctgcaagagtactatgtactccaaacctcagagtcatcaacctctctagcacccacccagccattctgttgattttgaatcattcttaggtgatctctaaggtctcactctagctcagcctcaaactcacaacatagcccaggcttgccttaatattgatcttcctgtctcactgtctctagtgctgggctcataggtgtgtgctaccgtgtctggctcatacttgattttcttgtttccataggaatgtaggccctaccagggcagagattccacactgagtgacagaataaatgtaaaggtgctatcccttgccttcccggtgcccacctccctctgtctggcccaagttctgagtgccaccaggctttggccctacagcaatgtggcttacttaccggatgggaaagccagcagcactgatgtgaatggtttccacaaggccacaggcctctaactggttcaggacctataagggtggggggagaaagtcagtacctacaggccagaaatgtcgtttgtatctctggtcctgacctttatttaatgacaagcagaattggctgatggagatgtctgtctctgtgggatcatgagaaaccgaggggtcctgcccagtacctggctcctcatatagctaaggcctgcaaaaacatacaggcttggctctgtctctcacctccccagggctgacactgattcacaatacagaactgcctattctcttcctgcatcagagttgctcaagcaaagaaggccgttttgtgaagattcttacgtgatttgaacccaaactgtgccacacagcccagttatctttggctacacagccacacttagcaggtgactgtgggacattcttcggtgctgtccagaactcacatatcatctgtattccctcagagcctgaaaccctgaggaatgattttatgtagactggaaaatgagattgacagtccagagatagccatacttcatagactgtatagatgttaaacaaatcacaaaagacccattgccctgagcagtttcaaatctcctgtcaggattggctaggtgagcagggagcaagatgctctagtgtccccatgtggtaccttggtcaggctttggtggagtgtacagaccatacagccactcatgattgccctgccagagcagggaaataagcccccccacacttttttttcccccgagacagggtttctctgtgtgtccctggctgtcctggaactcagaaatctgcctgcctctgcctcccaagtgctggggttaaaggcatgtgccaccactgcccggccaaaataagctcttcttaatgtcaggctcagcccaagagactgccagtgaccatcccatctggagatgctctcctccttattcttggtgctaggtagctgtagctcagggttagttacctcttcttggaggaaagtctgtggctgactctggctgttgggcttgatgcagcgaatgtagtggggtgttgtattatgtaggacctgcaggagctgttccagtgaggcctgaagacacagaaatttggggttaggcaggattggggcagctcaggggcctaagctggctgctggctgtgagtgtgttgtgtctttggaggacctcccagccttgcgatcaggctcatatataccctggggactactccatgttttttaagaacatgtgcaaagcacatggtaaccaccccttacttctcaccctttctccaggaatgctgtggaccagtggctcttactgactgagcctctggtctggggcttttccctttcctctcttcctcaggatcattttcctacagatagcttcacgccacccctgctgttccattattaagccttccctatgtgccagagggatatgactcagacgttgcttatgtcacagctcatcagcagaggttgggagtccccaccgtatgccttatcctcatacccagtcatgtcttgtctgtcccctgtcttttacactgaagcataagcttgatgagacagggactatttctgcccggcacatcactgctccccagtaagcagccccagttttgaagggcgctcagtagacagttgtattgagcacttcacgtcagcaccactagacccaccttgaacttggacaccacagtcaatgcaggagcccggctctggccagacagctcctcctgggtcttctcttcagggttggcaggaaacagcatcgtgagcagggggtcttgggattgctgcaggagctcagtcagctcagggggaacagggtcctatcggaaagggcaagggcggcagacagagaggtgagctgcttcctagtgctggccaccccctccccccatgaccagggctcctggggagggcaggctggaatcccaagaagactgggtctgcgggccaagaggagccatgtgtacatggaccacttccaggcagctcaggatggattagcaaagatcctaggcagggctcaagagagtgagattggattttgaggaaaggacactgaggagaaagtagatgccctacaggaactactttgtatatgcagtagtgactcagcttccttatccggtagctctatgctgtggcccaggcttaccttgttcttttccaccaggccggctgtgtggtaccgtacaggtcccgcgaaatgcacaaccacgaagctgggctcccggctgagcttgttatggcccaggcagggccgtcctgccagcgtgctctcgatgcgcgtctgtagttgtgctgcactgcttggccggttaaggcggcattcctgtgggatgggagtgggcagtcatcacagtgatgaggacttcccacacgtgcagcatcctcagtgtctggacccacggtagcagagttgtaacacaagcattatagcaactccagggagagcccggggattagcacacttatttgtagatgggggagagaggcggacaaaagagcacacaaaagaatcaccaaggcaccagaaaagcccagagaccggctctgttggccggctcactggcctaagcgccttacctcatttatgagggaacagatgctgatggggctcccttcaaggagatctaagcaggtctggttgtcctg

SEQ ID NO: 1741 - DNA, 1414 bp, Mus musculus
gtgagcgcgggtgtcttctgggaagtcatggcgtcgctgaattgtaggactgcggtctgtgtggtctgtttggagaagccgaaataccgttgcccgacttgccgcgtgccctactgttcggtcccctgttttcagaagcacaaagagcagtgcagctctgaagcccgacctgttgagaagagaagagcagggcctcctgtgaggtctgaggagagcaaagatgatgactcctccgtagctgatttcctcaacagtgatgaggaagaagacagagtgtctctgcagaatttaaagaatctaggtgaatcggaaactttaagaagcttgctgctgaacccacacctgaggcagttgatgattagcctcgatcagggtgacaacaaagcaaagctgatgcgagcctgtatgcaggagccccttttcgtggagtttgcagactgctgtttaggaatcgtggaaccatcccagaagagggattcctaagactggatgtgttctctgctcaagttacctgctgctgctccaagaggtggctgttttcaaggccaccatacgcagcatgcacacgtggctcgctgcagcaacttcatgaagaggaaacttgtagccctggagtgatggctcagcagttaggagcattgactgcttttccagaggaccccagttttcagcacctatttgactacttacaactgtaattggttgcagaggatctgacagtctttactgtatgcatgtgcatagccatatgtacagggaaaactcctacatacataaaatacttaaaacaaaaacaaaaggttggctatttatatttagatggttctaaattttatttcttgtacagttcagagttgcatcataaataccaagtatatccatttgaattaaaaacatagtgtaacaatttaaggtgtggttctcttgatgctgcattgttcattgttcttggtaacattaaataaatcagtttattaaatattattgttcccttagtaaactatatgcaagttctcccccagccaaaattctagaggcaattttagggtgacttggcccttttaaagtgcttgtggatggcccagtatccatcttgctgtagtgacaacattctggatggagcttgagcacaaagatactaagctgggatgttgtggccctaatcctggcttggtacccagcacccccagatcctgccagtgctgaagccacagccctggaaggctggcactctggccatgaagccctggctcaggctggaatttgcttgcacgtgcagttggagtcgccgtgggaatagcttggcacttgcgtgtgggatctaatgtctttggcaagacagctggcaggaaaaggccttgtggaaacaaaggcactaaagatcactcaggcaggtgggggtagaagagtcaca

SEQ ID NO: 1742 - protein, 151 aa, Mus musculus
MASLNCRTAVCVVCLEKPKYRCPTCRVPYCSVPCFQKHKEQCSSEARPVEKRRAGPPVRSEESKDDDSSVADFLNSDEEEDRVSLQNLKNLGESETLRSLLLNPHLRQLMISLDQGDNKAKLMRACMQEPLFVEFADCCLGIVEPSQKRDS

SEQ ID NO: 1743 - DNA, 29707 bp, Homo sapiens
gatttgaaggtgtcatcagatatcacctttgtttctgtctcaaggcaggaaagttttgcttccattcaatgcaaacatagctgcctggatctggctagtgttaactcatcagaagctttgtgtgagggacccctaagttctttatttcaggcagtgaaagggccaagggggtatcattgttgggctgtgtttaaggcatcggttgacctttatccagctttgaagtcatgatatagaacagttccagcatcctgaaaaatttcctcataccacttggccatcaacccccaccctgcccccaccccagcctctgtcaccatagttttgcctttgctacacctttttttttgtttgtttgagacagagtcttgctctgtcaccaggctggagtgcagtggcacgatcttggctcactgcaacctccgtctcctgagttcaagtgattctcctgcctcagcctcctgagcagctgggactacaggtgcgcaccaccacgctcagctaattttcgtatttttagtagagacggggtttcaccatgttgaccaggatgatctcgatctcttgatctcgtgatctgcccaccttggcctcccaaagtgctgggattacaggcgtgagccaccgtgcctggctgctacaccttcatataagtattagacagtatgtagtcttttgtatctagcttctctcacttaacataatgatttggattaatccacgattttgcttttatcagtgatttgtttctttaggttgctaagaggtatttcattctataaatctgccataaattgtttatccacttatcagttgatggacaaatgggttgtttctaattttttgcttttaggaataaagctgatataaccttttgcagagaagactttgtgtgaacatacatttccattcctcttagctaaaaatctaggactgtgtttgctgggttggatgataagtacatgtttaacttcattaaaaaaaaatggccaagctattttccaaagtgattgaatcattttgcatttccagcagcaatatatgagatatccagttgctctgcctctttgtcagcacttggtattgtcagtttttttaattttcgtcattctagtagatgtgtggtggtgctgtattgtgagtttaacttgcatttccctaatggctgtttatgctgagtatctactgatgtgtttatttgccatctgtatatattctttggtggtaaaagacaaaagttatttatctaagatgtcttttgcaaatattttttcttgtctgtggcttttttccttttcttaacagtgtctttggagaatagaagtttggcgtttgtgggtttttttagatgaagttcaacttactagttttttgtgatttgtggattttatgtctaacctaagaaatgcttgcctgactcaaggtcacaaagatgttctctcatttttttctagaaattttagttttagtttttatatttaggtctatgagccatttcaagttattattatttgcatatggaagtcctttttttggggggagtggggactgggtcttgctctgttgcccaagctggagtgcagtagtgcgattacagctcattgtaaatttaaactcctgagatcaagcaatcctcctgcctcaacctcccaggtatctgggactacagatgtgcaccaccatgcctggctatgaagtccaatttttcagtcattttttgttgaagcaactattgaatcaccttggcttctttgttgaaaacaattgaccatactggtgtggctctacttctggactcctctctgtccctttatgtctattcacacatcaataccatgctgtccatgcctgtagtctagctactctggagactgaggcctgaggaaaacttgaccccaggaattcaaatctagcctgggcaacacagaccctctctcttattattattattattttttagatggagtctcgttttgtcgcccaggctggagtgcaatggtgtgatcttggctcactgcaacctctgcctcctgggttcaagtgattctcccacctcaacctctggagtagcagggattacaggcacccaccatcatgcccagctaatttttgtatttttgtagagatggggtttcaccatgttggccagcctggtcttcaactcctgaccttaggtgatctcctgcctcggcctcccaaagtgctgggattatagatgagagccactgcacctggctgggaccgtctgtcttagaacaaccacagcaataaaaaaaaaaaacacaaaaaaccacgatactgtcttcttcactgtattcttttcagagtattgaaatcaggtaatatacattctcaaattttttctttcttttataaaatagatttggctaatctatatcctttgcatttcctttaattttttttttttgagatagagtctcactctgtcgcttaggctggaatgcagtggcgcaatcttggctcactgcaacctctgcctcccgcgttcaggcgattctcctgtctcaggctcccgaatagctgggattacaggcgcgtgccactacgccgggatttttttgtatttttggtagagacggggtttacatcctgttagtcaggatggtctcaatctcctgacctcgtgatcagcctgcctcagccttccaaagtgctgggattacaggcgtgagccactgtgcccgaacttcctttaaattttacagtcatcttgccagtttcaacagaagagccttctaggattttgataaggattgcattgttctacagatcaatttggggagaactgacatcttagccatatagaatcatctgatccatgtatgtcatatccctccctcctcacccctttcttcttcatcagtctgactagagatttctcaatcttactgaattttttctaagaaccattttttgttttattacttttctatagtttctgttttattgatttctgcttttcgtttatctgtttcttctgctgactttggtattctttatttagtctcttagtgaggaagcttaaatcatttatttgaggcttttctaatttagcagtattttcagcatcagcgctgttgacatttggggctttataattgttgggggactgtcctatgcacgacaggatgtttagtagcatccctggcctatagtcactagatatcagcagcacccctctccagttgtgacaaccaaaagtgtcttcatgtattgccaaatgtcttgggcatgggagaattgctcctggctgagaatgactgctatagtaggcattttatgatagaaacctcagttgtgtatcacaaattttgacatttttttcatttagttgaaaattttttcttagtttcctttgcgatttcctccttggcacatgcaatactatatttttttaaacttttatttttttagagacagggtctttctatgttacccaagctatctttgaactcccaggctgaattgttgctcccacctcagcctccctgagtagctggggctactggtgtttgccaccgcacctggctgacccatacattatttgtaagtgtattttttagttccaaatatttgaggattttccagaaatattcctgttactgattgctaatttagttcttttgtggtcagagaacacacttgaatggcttcaattcttttgaatttgttgaaatgtgtcttatggtcctgcatgtgatctattttgggaattgttcagcgtgcacgtgaaaataacgtattcttggatagagttgtctataaatgtcaattgggtcaagtgggttgatagcgttgttcaaggtttttatattctggttgggcgtggtgggtcatgcctgtaatcctaacactttgggaggccgaggcgggtggattacttgaggtcaggggttcaagaccagcctgaccaacatggtgaaaccctgtctgtactaaaaaaacaaaattagccaggattaatccaatatggcaatatctgtcttttaagtaagtgtttagaaaccatttccttttttttttttttttttgtgaaacagagtctcactctgttgcccaggctggagtgcagtgggcaatctccgctcactgaaacctctgcttcccgggttcaagtgattctcctgcctcagtctcctgaggagctgggattacaggcacccacgaccacgtctggctaatttttatatttttagtagggacggggtttcaccatgttgcccaggctcatcttgaactcctgacctcaagtgatctgcctgccttggccccccaaagtgctgggattacaggcgtgagccacagcgccgggcaaccatttacatttaatatgttgatacagaaaggtttatcatcttgctatttcttcttatttatcccatttgcttgttctttttttcttttttgctagctcctctcttttttattgaagtactactccacaatgctgccttctttgagactaagtacccgatgccattttacctccacagtggagataataatattagaccatgtcacatatagtgtaagagtcttacctagtaacttctatttccctccatcatttttatgttttatgaaaatgttattactttcatatatttaattctgcatgtgctaagaactccacactgtactgttatatttgcttgaaccagttatcatttaaagagattaaaaaggtaaaaatgggccgggcgtggtggctcacacctgtaatccccagcactttggaaggccaaggcgggtggatcacctgaggtcaggagttcgagaccagcctggccaacatggtgaaaccccgtctctactaaaaatacaaaaattagccgggcgtggtggcgggcacctgtagtcgtagctacttgggaggctgaggcaggagaatcgcttgaacctgggaggcggaggttgcagtgagctgggatcgcgccattgcactccagcctgggtgacggaatgacacattgtctcaaaaaaacaaaaaaaaaaaacaaaaaaaaccccaaaaaagtaaaaatgtttttttgattttacctataggtttacaatttttggtactcctttgtgcagatccaaatttccatctcatgtcattttccttttgcccgaataactaacatttcttgtagcgtagatctgctagtgaagaatcctgttgggttttgtctaaaaaaatctgtttcttgtcctcatttttaaatgataaggaaataaacctggggtctcagttcctcttccccgcccctcactgagcagagttcttatgcactgctgccatgtgggaggtggagatgggttcagaggtttgtgaaaagcttgacgcgctgcacgcccactccacagggcacctttagaggcttcttggggaagctggtcgggtagctctgactcctcgcatctctgtgtgtccttgggaatgtcaggtggaagatcgatgtgcatttgcaaatgggagtgagtgtgagaaaagaaaaatgtggggttgtggctggtagggtgtgttcagggagcaatggtgacctctgttgtctgtgctctcccaacagttctgggattgtggggaatgcaattgttctgtatcccttttgtattttggaagttctccgtgaagtctaactgcaggtcatattgtcatttagtctagagttggaggatggatataatttcatgagtatgaaataatatgcagagttgttggacaccaactgggcccacccactccaccagaactcaggtctccttcatttgactcccaccggcaacgtcactcacctgaattactctctcttagataccagaggggaaacggaggcatgcaggtgagaacgtggcagcagtccctaaaagtcacttctggtgctggccctggctcatccgtgccctgggggagaaatgcaagtgtcagagctgcggaaaggagctgagatctagcagggctcgcccttatcaacctccgcctctaacaagggccacacagcacgtaggggagattaggccgatctgcctgcctcatggcgggaggccaggagggtggaaggcagcggatcgcgccctagcgagcaacccacatgctctggaagtgtggttcaactttcaccaggctactgcgggcggccggccagctgtcagcgggcactccgcccccaggagctgtccgcaagcgcggggcggtgggcaccgcggggaacagcccccggacagccagtggcacgcggagacctcggagagcgcaggccctgctttcccgtaggaacactcgtgggcatcgggtcgcccgcttcgcccccgcgctctagacgcactttcctgccgcctggcgatgtccgaagtgcatatcagagcatggacttggtcttcccagcgctaccagaccgctgagcctccccgcacgtggtggggcgcaggcggggcgccagctgcgcgggaatccgggcgagcgcgctccacccgggcagtgcgggcctggagcgccctctggcgggacggtgcgcggcgttgcgcgtctccagccttgggattggcccggactcgccttcaacgcaccggacagcgctgccaggaggcagagctctgaaaacctcgacaacgacgcctctctcttcagtgcccgcactgcgtcccaggctgacgccaaggaggcccaagacagccctgggtggccattaggacgggtctggaggggacatcagtgtggacatctagttgctgggcctggggtcacagccccctttcttgtctgaactggccactgcccggaggagctgcgctgtgcgccttagtgtgccaccacctaaccgccatcgcggctgagcccacctcctttcccggacattagaggacgaggggtgcgaaggtcggggaaagctgggggcatccagatatccagagtagaggaggggcctcttccctgcgtggatgtgcatgggaaggattccaggaatttaattttcttttcttttgagatggagtctcgctctgtcaccaagctggagtgcagtggcgcgatctgggctcactgcaacctccgcttcccgggttcaagggattcccctgcctcagcctccctagtagctgggactgcaggcgcgtgccaccacacctggctaattttttgtattttagtagagacgggggtttcaccatgttggccaggatggtctcgatctcctgacctcgtgatctgcccgccttggcctcccaaagtgctgggattacaggcgtgagccaccgcgcctggccgaattttcttttttcttttttttttctggagtcatcatctctccactcgcagatagggagtcagcgtggtttgtatgcaggtgggagggactgagcccctgaaaatggttaggattgtctctggcctcagccttggtacacacatcacaggacaaatcaagcagacagtggtgagtccgccacagtgggcaaatttctacccgtgccagacagtgtacaggatcttttgtttttttttctctctctctcttccttttgagacaaggtcctgctctgtcacccaggccggagtgcagtggcgtgatctccactcactgcaacctccacctcctgggctcaagcgattttcccacctcagcctccccagtagctgggattacaggctcaagccactgccccccgctaatttttgtatctttttgggtagagatgggtttttgccatgttgcccaggctggtcttgaactcctgggctcaagccatgtgcccgccttggcctcccaaagtgctaggattactggcgtgagccaccttacctggtggggcacaggattttaaattaaatttttttttttttaatttttagagacagagtcttgctctgtcgcccaggctggagtgcagtggcatgatcttggctcactacaatctctgcctctagagttccggcgattcttgtgcctcagcctctctagtagttgggattacaggcgtgcaccaccacacccagttaattttttctatttttagtacagacagggttttgctatgttagccaggctggtcttgaactcctggcctcaagtgatctgcctgctttggcctcccaaagtgctgggatcacaggcgtgagccactgcgcctggcctaaatttttcgtctttaagacggggtctctctctctctgtcatccaggctggaatgcagtggcacaatcatagctcactgcagccttgaactcctgggctcaagtgagcctccagcctcaactttctaagtagctgggactacaggctgatgcgaccatgcccgacttggcacaggatttaaatatggccctggacaagtcactggccttctctggccttcccaggtaagcttggactttctgggatgcttcaagttcaaatcatcagtggtacaactgttgaacaatatgaggaacgctgcgggttactgggcctgtgtggacccgttttggattctaagctgggtcctgggcagaagttggaggctggggcagctgcaagcaggacaggcaggtggccagagggcccagcagcttcagcactgaggactggactgggtcgccacgcccaaaggaaggataattactcacctcccactcaagaagcaggcggcagaactgttttggagagcatggcttggggcctgggacctatgttcatgcggtccagacggagatccatgagagttaagactctttctagatatcaggtagcacttctgattacaaaacttttgcacatggtctcctctctgctttacaacagctcaggaaagtaggcccaaacatccactttaatagatgagggagctcagagggggtaaccaacccctccaggtcacacagccagggagggggttgagccaaggttcaaaccactgcctcggttgttgcagatacatccctgcagacacctttattgaagagggaccctgaaggctgaacggccaacacagaagaggaggcacttgggagtaagggtgatttatggccctgggagggcccagtgcaggtaggatgggagctaaggtaaggctgggccatgcctagctgcaagcaaatttccttaaaaaacaaacaacaaaaaacattactttttctaaacctaaagtttgtggtggcattcaagtcccatcatagcccatctatccagactcatctgcctgggatccccgtcttgggactagtggtcactggcctgcttcctggtcaattagcttccgggactagggggaggtgtgaggagcctagagtgcaaaatttaagaagcactcagtctcaggggcgtgcaggtgcagggtagcgacggcaggactctaagagtgagtctctttcctccccgtttccccgtcctactttcactctaagcatttagttcccaggggacagagacgacttcttcattagaagaccccggggggtccccagcccggaagggctcacagttggagctcaaacatttgccactgttcaggctcatctttctttccccagtgaaaaatggtctaggttgggaagggcaggttcctgtctactgcgtgatccaaccgattctggttcgcccaatgtctggacttgtcctttgccaagaataagcagatgagatgggcggatgaaccccaatgtccctgcaagattcaggaagtcccagccagaaagtaaaggacgtttagttccatgtattgttttcttttttacatgcggggcaacacacctggacagtgtcgatggcttgctccaagccacacggccgcatagggacagggactgggctacataacaagttcttcgacgctgtgatctaatcaaggaaaacctgggacgcagctaatagatgcgcatcgagtgtatcgacgctctaagtacgagggctggaacagtgagcaggatcagtccattgcttttgcctacctgctgagcgctgattggtccccgtttaggaaacggaaaaaggggcgtgcacgcgggcgcggctgcgtgagaggcgcgcggcggcgcagtgaacagtctccttccacaaaaccatggcgtcgctcaaatgtagcaccgtcgtctgcgtgatctgcttggagaagcccaaataccgctgtccagcctgccgcgtgccctagtgagcggggaggtcgcggggtccaggggcgcgggtgtccggccatggcgggagggcgggaggccgggaggccgggcgggagcgggcgggctgctggaggggccggggaccctcggggctgacgcggcctgtggcctctgttgttacagctgctcggtagtctgcttccggaagcacaaaggtgagccccgtccccgccagccctcgtaccactgcgcacggggcagcccccacgtccagcctccgtcttgggggcgtggacccttgggctgcgcttcctttcccgcctcgggtctccgcgggttctgcaggaaccttgcttcctctgacttggtccctggtgtctctgtgtgtcggacagttccctctgttgtccctgcctgtaatcgctctcagggttttggtcagtagcctttcttctaccccgcttctccttctgcgtgttactcttttttgcttagaaatagtttccgattgcttttcccaccgaggtctaccctagcagtttcttcctcagtattctgatgtagcccctcaccatttggctgaaactgcgctaactttaacagtattttcactcgtgtaaataatgtcttgttagaaacaaagaggtaagtccatgtacaatacaaggagacgtccttgatttgttaagagaaaaaaagaaccaagtaagttctgtgtatgatgtgaacacacttttgtacagttaaaaagaagtgacctggccgggcgcggtggctcacgcctgtggtcccggcactttgagaggccaaggcgggtggatcacctgagcccaggagttcgagaccagcctggccaacatggtgaaactccgtctctactaaaaatacaaaaattaggcgggcgaggtgcgcgcctgtaatcccagctactcaggaggctgaggcaggagaatcgcttgaacccgggaggcggaggttgtagtgagccgaaatcgcaccactgcactccagcctgggctacagagccagactcagtctggaaaaaaaaagaaaaaaaaaagtttgatgtaggtggggcgcggtgggtcacgcctgtaatcccagcactttgggaggccgaggcgggcggatcatttgagctcaggagtttgagaccagcctgggcaacatagcgaaaccccgtctctataaacaaacaaagccaggcgtggtggcctgtgccagtggtcccagctactcaggaagcagaggtgggaagatcgcttgagcctgggaggaggaggttgcagtgagccaggatcgtaccactgcactccagcctgggagacagcaagactgtctcaaaaaaaaaaaaaaaaaaagcttgatgtagattctttcagcttatttccactcttgtaccaatatatagaacttttttttttagcttttagaatctcagcaatgagactgtacccaacatcctcatttgagtttatatattgggcactttttaaaacctagtgcatacaggctgggcgcagtggctcatgcctgtaatcccagcactttgggatgccaaggtgggtggatcacctgaggtcaggagttcgagaccagcctggccaacattatgaaaccacatctctactaaaaatacaaaaataagctgggtgtggaggtgcgcgcctgtaatcccagctacttaggaggctgaggcaggataattgcttgaaccatggagacgcaggttgcagtgagccaagactgcaccactgcactccagcctgggcaacagagtgagactccatctaaaaaaaaattaaaaaaattaaaaataaagactagtgcatacaagttctagctcactgacttaaaggactgtatgttatttcattatatagttggtacgaccattatttatataaagcctcctattggttgatttttctttttaatatttgtttttaattgacacataattgcatacaatttgagttacagtgtgatacttcgatacctgtatacaatgtttaaggatcaaattagggtaattagcatattcgccccaaataatcatttcttcatgttgggaacactcgcaatcctctcttgtagctatttgaaagtataaattgctgccaacatggtcacactaaggtactgtgtaacactagaacttattcctcccatctagctgtaattttgtatccattaagcaacttctccctagccccctacactctactcttcctagcctccagttaccactattctgctctctacttctgtgaaatcaacttgcttagcatccacatgttaacaagaacatcttatggtgcctggcttgtttcacttaacattatgttctttgggctcatccatgttcctgcaagtgacaggatttcatggttttttatggctaatatccagtgtatatatgtaccgcatttctttatccatctgttggtggatccttaggttcattccttatcttggctgttgtgactagcagtaaacgcaggagtgcaggtatctcttcggcagactgatttcatttcctttggatatatatacagtagtgggattgctggatcatatggtagttctattcgtagtttttttttaggaacctctatgctgttttccataatgactatactaatttacattcccaataacagtgcagtgtataagagttcccttttctccacatccttgccaacatgtttttttctttttgataatagccattcttactgtggtgagatgatacctcattgtggtcttgacttgcatgtccctaataattagtgatgttgaacattttttcatgtacttgttggccatttatatgtcttcttttgagaagtgtctgtttggctcatttgcccattttttttttttttctttttgagacagagtcttgctcttgtcgcccgggctggagtacagtggcgcagtctctgcttactgcaacctccgcttccagggttcaggtgattctcctgcctcagcctccaaagtagctgggattacaggtgcctgctggctgatttttgtatttttagtagagacaaggtttcaccatgttggccaggctggtcttgagctcttgacctcaggtgatccacctgcctcggcctcccaaagggctgggattacaggggtgagccaccatgcccggcccatttgtccacttaatttttttttttttttttttttggctgttgagctccttgtgtattctagatattaatcctttgtcaagtgaatattttgcaaatattttctcccatcctgtgggttgtctcttcattctattgtttcctttgttgtacagaagcttttttgtgtaatagaattccatttgcctatttttgcttttcttgcctgtgtttttgagattttattcataaaatctttgcctagaccaatgtcctgaagcatttcccctgtgttttcttgtagtagtttcaggtcttacatttaggtctttaatccattttgatatttatatatggtgacagataaggatctagtttcattcttctgcatatggttattcttacagttatcctatttttccagtaccatttattgaagagtgcttttttccccagtatatgctcttggtgcctttgtgaaaagtcagttggctgtaaatgtgtgaatttatatctgggttctctattctgttccattgatctatgtgtctatttttatgctagtaccatgctgtttagatattatagctttgtagtatatttcgaggccaagtagtggtgatgcctccagctttgttctgtttgctcaggattgctttggctattgggggtcttttgtggttccatattaattttagaatttttttttgacatttctgtgaacaggatcattggtattttgatagggattgcattgactctagattactttgggtagtatggtcattttaatatttatttttcttattggtggatatttacattaattttgcctttgttgctgctataggcagtgttaaagtggtatttaataaataatttttatcagaaatttctaatagccacatctgttgtacacttttcatttgtcttttttatttttttgcaacaaagtcttgctctgtcacccaggctggagtgcagtggtgctcactatagccttgacttcctgggctcaggcagtcctcctacctcagcctcccaagtagttgggactgcaggcgtgtgccaccatgcctggcttatttatttttaattttaatttttgtggagatgaagtctcactgtattgcctgggctggtcttgaattcctgggctcaagtgatccttccaccttggcctcccaaagcgttgggattacagacgtgagctacccatgctcagcctgtcatctttcttgattcccatgaatatctgctgtgtttggctttttctttcttgatattctttggaggctgggaagataccgctctgtggtattctctcctccctttctcccttcgaagtcctaaccaggcctgaccctgttacagcttctgaggtcagatgagatagggtgcattcagggtggcttagctgtagactctcgttttcttttttttccttttttcgagacagggtcttgctcttttgcccaggatggagtgcagtggtgtgatcacagctcattgcacccttggcctcctgggcccaagtgatcctcccaccttagcctcctgagtaacggagacaaactttatctatttttcgtagagacagggtctcactgtattgtctaggctggtcttggactcctgggcttaagcagtcctcctgcctcaacctcccaaattgctgggattacaggcaggagccactgtgcccagcttctccttccttttgctagatctctctcttgaaatgtggtccttgacttttattcctaggtaggtgatctctctttcactttaaacttttttttttcttgctgacatccaactgtttagctccagcctctttttgagcaccttagacacaaatgtattttggggtcaggtacaacccagaaaattcacctctccttcagtccctcctgctgtgttccttacacatatagcatagccgtaaagttagacccggattccaaatctgcctctgctacttactagctgtggaccccaatggacaagtttattacaagaaaatttaatcctttcatctgtaagtggaattaacagtctccatgtcatgggggcttcgtaaaggttcattgagccactatgtatctcactgtgtacctggcacagtgctcggcacttagtcactggcagctgttgtaactgccacctacatgactagaacctttccgtagcatattgtcaaatctacattttaagtctctacaatctggtcctgcctttatgtcctcagaaccctttcctgtgacttcatgctctgttgatactgtcacccaggctggagtgcagtggcacaatcacagctcactgcagccttgacacactgggcttaagggatcctcctgcctcagcctcccaagtagctgagaccacatgtgtgtaccaccatgcctggatgattttttttattttctgtagagacatagtcttgctaggttgcccaggctggtctcaaactcctgggctcaagtgatcctcccaccttggcctccgaatgttaggattacaggcgtgagccagcacagctggccttctgttgactctgtaagttctttggtggttttgcccctagttttatcccatctggtatctggtttacagcagctatttcaaacacctcagttaattgtggtgagaattttgtaagattcggcagggtagggaggatggggacaggttcttggggtgcatgaatgagtcctgctttctcagcctgctggcggttttccttaatctctctcttgctttgatctctcacttcttccacattcctgggcacccacccacatcccttaccccagacacttgcttcctacctagatgctaccttggtagggaggtgcagccttgtcgctgaaatggaggtaatgtgggcctgggatttgtgtctttttcagaacagtgcaaccctgaaactcgtcctgttgagaaaaaaataagatcagctcttcctaccaaaaccgtaaagcctgtggaaaacaaaggtgggttggttgacttcaaacaaatctacaagggacttcacatagaataagtcgaaggaaaaggggagagtggggctggtcagggaatccagaacaatagcttcattgggaaggaacagcttccttagccttgagcatcaggagtggggccatgtcatcatgggtgatattgaggcaacagcctgaaagcagtattcaggagaagaaaaatgggcagaagacagagatgagaaaggccatggctgtggtttgggggtttgcggtgggccctgctggcaggagccttctctagcccatagctgctggtctccctccatgaatctggctgggactgtcagttcacctgaactcagcccaggcaggaggctttctttgtcctagatcatctcgctgctgctgggggttcagagctcacagcagtagtgggctgtcaacccatccgtccagccatctaaacgttctttaatacctcctgggtgtcaagcaccatgccaggctctgaaagcagcccctctggtgccaccaaagaggtattgaacattcactccaaaggcatggcccatttttgccctttgagaaatttccaggttgggttcaggcaatgccagcagtttctgcccatgctgaaagcacaggagattctacttggctggtttttacagagcatccagttaattggcccatcacagggttggagccatgttgaggtggggatgggtattaagttattagacaaccggggtctaagcctaaagaccacaggaccacatatacagtaaggctgtgaacactagagtgcatttgttaaaatcaccaattctttcacttagcctccctcttctaaaaaaggagtgttagtatagtcacagactccggagaagaggatttttgtctgtacctgcttgaatacccctatcactatcacatgtgcgtgcacacatttttatcctgttcaagtagtggttaaaatctggtgcccaggcctcctttttagccatgagccattgactgttttgtattccttagatgatgatgactctatagctgattttctcaatagtgatgaggaagaagacagagtttctttgcagaatttaaagaatttaggtaagtctgtgctatgcttgtcaatcgttgagatacatttactgtgttgtaaggattgtgattttttaaaaagtttttaatttcttgaataagtatggcatgtagggctcttactatctagccacataatctgtaaacatacagggtttcacacctcccagcctgcccacaccattccttctgcctggaatcctgctggtcttgtgggttggcaaaattctgctcctccttcaagccttggttcaagttttcttcactcagctaagcttttcttgaccttttgtgtctctttcagaattaggcacttttttggtttcccatagcaacttggacttaatagtaataaatcactgttacatttcatggtaatttgtctctcacataccgatttgtacagcagggacctgtattcccagatccccagtgctcagctcacagtccagcccttaacacaaactggttatcacatgatttgatttagggggaaacaggtgttgccatttttgtagcactgcttattcagtccttacaacattctgttacatgtgcatggggtctgttaatttcattcttcccatttcacagaatcatgttaaaaggttatgttttgcacttagtctcatggtaatgattagttagactgagtttggagatgagctagtaataggtgtgaaaaattttacagactgtgaagtaccatgcaggtattattgttggttccctgctactggtgctgctgcatgccaaatggcatgcttagacatcattcagattatttcgtatagccgtcttcaccactggcaacttttatggctagaaagaaagaaaacatgccagcagcttaatgctactatttgctttgtgattgtgctgataaagcatttttttcttagctgaagtggcacgaagttacaatatttacaaagataccaagaactggtatctgttactgcatttaatgcggaaatagtttgatatgctggtcttacctttcattttatagaggtggggtctcgccatgttgcacaggctggtcttgaactcctgagctcaagcaatctgcccaccttgacctccccagttgctggtattacaggcatgagccaccacaccttgctgatagttttattacacttgaaatagctcttcacttttcagccatctccatgtgtttccacttgaactcagactggctttttttcttgttaatttttaggggaatctgcaacattaagaagcttattgctcaatccacacctcaggcagttgatggtcaacctcgatcagggagaagacaaagcaaagctcatgagagcttacatgcaagagcctttgtttgtggagtttgcagactgctgtttaggaattgtggagccatcccagaatgaggagtcttaagatggattattgtgctgcttgctcaagcgtgtgcttgactcctggaacctgcctgctccctctcccagaccagctagtttggggctggggagctcaggcaaaagaggtttccaggatgcagattaggtcatgcaggcctttaccggcattgatgtggctcatgtttcaggcagacttggggtccttaaggtggcaagtcctttatggagagaaaacttgacattcagatgattgtttttaaatgttttacttttggtacagttgatagacatcataaacgatatcaagcttacacttcatatggagttaaacttggtcagtgttaataaaatcaaaacgtgattctactgtacattgcattattcataatttaattgtttgaaattacattaaataaatcaactaattaaatactaaagttttgttcctttttaaaggaaataaccacaagatttttcccagcccaaattccagcgccaattttaggccaactttggctgttttcttccaaaagtgcttatgtggaattgggatccccagtgtagtgacagacagtcatgactgctgctgagtttgatctgtgaaggtagtgaaatgtggccctgatgtttcttaaccctgatttggtaactaccagccctgacaccatcagtgcttgatgtagcctggaaccccaggcccactgacgcactgggcacggggctctgggtcgaaggctggagccgtcactgttgttcatgtgcatttggagcactgtgggaatagtctggcagctgtgtgctgattaaatgtctttggcaaggcagggggcaggaaaaggccttgtggaaacaaaggcaccaaggatcaccccagcccagtgaaggcagaagaggtcacgtggatcagcctgtgtctttccagcagaatctgattaaagcctgtaatgctgtagggtgaaggttcagggcagatgtcagcataccgcagtggagactttctgcagtgaaactttatcgatccctagaggggagagagagatgcagctttagcactagttcctgggagtgccagggcctaacaaccccacagagcagacgctaaaaatgcaagaaggtatggacaagtactagtattgggggccacagcaggattaaaatagcattacatccactcagtgtgagacagatgaggaaaccctaggaggaggcgctccctaagaggaatgtctgtcacattcctatgactgcttaaagccagaagggcaaaacatttacccttctgtttagcaggcctgtgtgttttcatgggagacttcatccagattaaggcctatagttattcctctgaatggaaatttggtgtttccttctgccttgtcatttcacttactccttgctgtgactccatgcagtaggttgagtattagcccattttatagacaggctccgagaaaatgtgtcttagccaagatcatccagtgaatggggcagaaccaggatccagaccctggggttctacctcccagtgcaacatactttcacctttcctcggccactttaattctatgaggcctggcttactggggtgactcacaaagccctgagtgacaatgacttcctgagtgtgctggctgacttttccctggatgcttatataaaaacagctgggcacggtggctcacacctgtaatcccagcactttgggagggcaaggcaggcagaccacttgaggtcaggagtttgagaccagcctggccaatatggcgaaaccccgtctctattaaaaatacaaaaaaaaaaatatagccaggcatggtggcacatgccctgtagtcccagctattcgggaggctgaggcaggagaatcgcttaaacccactgcattccatcctgggcgacagagtgagactccgtctcaaaaaattaaataacatgaaaaaaaaaaaaaacccacagagaacttggaccactgaccctgcttgtcatttcgtcagccagaaaaggaaaaaaccaagcaatacaatttggggaaaacatggtgccaaatccagtgccatttgaggtaacaaactcctcacaacccaagttgtgatgtgggactaattagattatttgctctcaagtcttgggtagtttcttttttgctatgtctcgtgaatttttcctcttttctgtaattgacctattattaccctaaaccaaacttttttttttttttagatggactctcgtcctgtcacccaggctggagtgcagcggcgcaatctcggctcactgcaacctctccctcccagattcaagcaattctcatgcctcagcctcccgagcagctgggactacaggcgcctgccactacgcccaaccaatttttgtatttttagtagagatggggtttcgccatgttggccaggctggtcttgaactcctgacctcaggtgatacacccgcctcgacttcccaaagtactgggattataggcgtgagccaccgctccaggccctaagctaaactttcatcacctcctgctcctgactcatctaaagccttggttctcacagtgtggttcatggagcatcagaatcagctgggagcttgctagaaacgcagcattgcatttggaaatgggactagaagatttagagatgctgaaataattagaagcagtttttaaaaagataaagggctctggaagattcccagttataacaaaataaataatccaaacctgcagctgattgggacatgcagccctctggtttacccagtagggttagggatggatcttgtcccagcctcagtctcattcccgctgtgaacttgtaggctttgctcctgctgttctcaggaacaaagctgtcatggccatcacacacaacgtacctgaggcagcgctcggatggacgtgacaccagcctggtcttgtgctgtctggacagtgtagctactggggctgcccctggggagctggaggcaagcccagaccactaatttcctctgaaagctgcctacacccatagccgtattggccaggaccagtcccaggggccagaggcggattattgcctccaggagcctggtctgcagcggcgaggtgctcagggaacagggagcttgagagaagtgtttttcttccacaccatccagctctttagcagcaaggcaggccattctgatcttaaaaagcaaatatccctttatagctttagatttatctagccctcttagcagaaaatggaaatcaaaactatctttaacaaatcatcttaacaaggtgaactgaaggcacctggttgcaaacagctggctgccctgaaccaaactggttccatatgccacaagtctatacaccccaggcaactgtgcttaggccttacatatgctacttgaaaacaagataagagtccatcaagatataactgatatgccataaaacccagtcttctaaagtgtacatcccagagtttggtatattcccagagttgcttataccactcttcacctacataaccaccctgcagggtaggtgttactgtgcccactgcatacatgaggaatatgaggctcagagaggctaaacaacctgcccaaggccacctgcattgcagtggcagagccagcattcccactcgggtccatctggtccccaaaattgatccactgcccaccccgacttcttgggtcttacttactctccacttctgccatgcacgcttgatgactgtggcagctgcatgcagcctctggatgtgtttccgagttaaccaggaacgaatggctaagaggtttgcccagaaacaggaaagagataataaaggggccattagagctgtcagtgacctcgctgcagcagcaccacagttgctgtcaaagtttcaaatacgttttttttttttcaataaattgctacaaataaggttctaaaatcaatacataaggcaaaattggcttttaaacattccttacactgcccacacacttgaatacacctacacaacacagtgaaggggcactggggagaaggactggctgagggcccagcaatcacttcccgtctcaggctgggtccaggtcagcacccagggaatgggaggggtctggattgtctgtgcctttaaaaacttttttttttgttttgtttttaatcctcagttgaatttgttcgctttatgcatccctgatctcacatcaccatatacccaaacactgatacaattaatagatggtggtaatttttattcccttctctgcaatttcagcatattctttttctttttggttccttttttttttttttttttttttttttttgagacagggtcttgcccaggctggagtgcagtggcacgaacagcttattgtagcctccgtaaggctgtagcttcaatctcccaggctcaagcaatcctcttgcctcagcctctggagtaactgggactacaggcatgtgccaccaggcacggttaattatgttttgttgttttttttttttttgagacagagtcttgctctgtcacccaggctggagtgtaatggtgcaatctcagctcactgcaacctctgcctcctgggttgaggtgattctcctgcctcagcctcctgagtagctaggattataggtgcatactaccacacttggctaatttttgtatttttagtagagaaagggttttgccatgttgcccggctggtatgaaattcctgggctcaagtgatcctcccacctcagcctcccaaaatgctgggattacaggagcgaactactgtgcccagcttccttatacaattttttaatgcctacacacacacaaacacaccttaaaaggagggcatcgcccttaatatgtagtttgacatctaggtatgaatatcattttggaagtggttctccattaaatttataatattcttcaaaaacacttagctgcatcatagggatggtccagtccatcatttggccatgatgtcaccactgttagatatttgggttctttccaacacttttccttttcaaaataagaccactatgaacatgttggttaatacatcttttcatctgatgaactccttttggtttttaccttctccttaaattcattccagccctagagcccagcaggtaatggtttgagttgtcataaagggaaaaaaagttggcctaaacagctgtcagggtctgagaaaggaattaaagacaacgcttagacaacgcttagcctccacttcttacagagcacctttgtttgtggagtgacttggtttccattgaactggagagacgttatgagtgagggggacagggaatttgaatcccagcacaccacagggacatctcttcaggctgggacacagcttcaggagatggggactcgacgagctatgtttcaaaggaaaccaacatcctgtggggtctgtgagcagtgctgacaggtgacctgcccacctacctgcctggatgagcatgacggcccgccactgccgctcctgctctcggtgccggtgtcgcctccagccaccctggatgcagcgggcacactgctccagcacccgggcacgcccacattccagaagctccagctgggagaaaaggcatccattgagggcagcctcttctccccctgccccctcctgctgaggagagcacacagcttgcctctgtaacctcctcatccccaaaccagctcaccatagagtcagtcatgaacaccttggtcctgccacagtgcatgggggctggcatggcctcagccgagtcaccagttatggctgctgcctgagttaggaccggcagagtgtggagaatgtcctggatgagaggttcaagcgtggcttcctcgctgtgtggacaccattctgggggagggagatggccccatcagtgcatggtcatctctacatgcctctgtggcctgaagaaactggctttggcctccctagcactctacaggtctctttcctgctgttcttggctctagccattttctccttgttcttcttttggaggaagccacaaacagcctctctgttgtccctcagggtgctagctgttccgtggagccttggaatacccacttgcgcctgtgtgtcctggggtgtcccacagcctctactgccatgagtccctttgggcaggctggcagagggtgcttgacacctggaagggtgactccttccaagcttggaatcccaggctgctcagccagcatttgtttccaaggcccaaacacacatcctgagggccaaatagggcagctataggccactccctcagccccgacccctcaactccccaccatgtatgggaaaagggagatccaatcccagcccttagtttgggaatcttctactgcaaataaaaagaataaattaaaaaataaatttaaaaaatcccagccctgcaaaggtcccgtgtcccactgcctgccctcccgcagctcgcagagctgactcctggagaggtaggatttacctgagggctctgaccaccttagatgcccagtgcctctctgaagacagaggctgccaaaggagacaccacagatgagaaacagcagcaaaatcaaccaggggccagaagggctatgggcaagagacacggaacaggacagcaaaccatggagagggagaagaaaggagaaagggtgaaaggaaagtgaaaactgcccaggaggggaggaaacaaagcaggattgccccaatggctgtgaggggcccagggtaaggctgggtgggaggggcagaggtgctgggctggggtcctgccgaggcggggccccccggcagcctgtccttggcctgttctccctctgcctgtgtctgggccctgtggctcccacagcctctcttttatctgcatgccgacaacccccatatgagggcctccagatccttcctttgagactaaagcctgcctaagtgccttgcagacttcttcactggacctgcaggacaagtcacccatgcccgggctcttcagcctccctgaacctcttttcctcttgcttttcctcacttcccaggctaagttaatttactcctttcctctccctctacatctagtcaagcccctaccaagactgaccagtttcttccaacaaatatttcccgactgtgcccacaattcttgtttctctctattggggcaactttgcagcctcaatcccacagccctccatggtgcccccagagtggtctccagaaagtgtgaggctgataagagtcatttgctccttcccctgcagtgcctgctcatctgcccagagaataaagtccagattccttgatggagccctacctgccactccagcctcacctgccccagttctctgcctcaatgaaccagcaacacagaactggctggagttcctcatacccacactgctgcctcaagcctctaggcctttgttcagattacatttatcatgtggaccacccatcacctggctaatccaatttattctcagatactacctcttccaggaagccttccccaattcacacctccctagcaccacccacagcatcctgctcatagctctgcttttccactttccatgctatttgtcttttttgaatctgtttcccccactgaaccaaaaccagggctgtgttttattcaccagtaagccccagcccctagccctaagacagggcacagggtagatgctcagtaaactgtggttgcacaaatgactaactcatgggtcccactcaccagggagccctttggcaggatatgggctgtcggggccagaggatgtgcaaggatgaagccttcttagtaacttgtatcgttctacaaagtttcggtgagagaccctggaggccaaagcaggcagaagtagagaattacttcatctgtgagccaggttaacggttcagggctcatcagaagttattctatttaatctgctcaacaacacagcacggtgctgccctccccgagtatccccactgaatgtgaatgtggttttgaagcgatttctaggatcacttagttggaaacccataaagactatttaaaatgggtctgctctccctgctgccttggtctaccaacacaaagcatctcttgtgttagcaggggatttgcgggctgcctccctccaaaggggctgacaggcctctccccaaacaattggaccagtcctatgacgcagacatgcttggccacatctcccctctgacctctctgaccccacagtctcctctgcctcccccagatctccctgctcctcatcaaggcaacacttctcagacagctgctggcacctgatatctgcacttcctcccaattgcttgtcagccctcctgagtctggcttctgtccccaacattgtaccagtgtggcttttgtcacagccatcagctgggtacaaaatagtgcacaataagtgaatggatgaacgaatgggtgctgctccctagttcccagttgacttctacagaccagcctctttctcttcatttccacatctcactctgggttgggcaggctcttgcccaatgagagtcctgagccccactctgtactggccctgcactgtgccgtgatcgagcccactcaccggatggggaagccagcagcactgatatggatggtctccacgaggccacaggcctccagctggctcaggacctgcaagggtggggagacagggcaggcacctgcagcatggggccagcaggccagaaatgccattctctcagcccttcttcttagaccctggccagtgccaagctgcaggctctcccaaggcttggctaatgggggtatctccttggggctgtgagaaatcgagggaccttgaaaacaaatctcccactagaaagggtcctggtggtcccaagtccccctcatccgacgcatggcttctgatacagctgaagcaagtgatgtcctggctccgtctcaccctgccctcagtgtagtctcactaccacacaacccagcccaggcaaatttccagtttggattgttttcactgtctgcaggcattagagggtggttcacagctgagaggcagggaagattatactatgaagattcttctgtgacctgaacccaggtctttaccacagagctgagttgtcctggctacaaaccggaaggccacatctaccaggccacaccttcagcagtgcccagcattcacccctcatccacatccctcagaacctggaatcccaagaaaagggcagctgctggctagagtgcttttgttagattagaaaaaaatgataccggctgagtgcagtggctgctcatgcctgtaatcccagcactttgggaggctgaggtgggcagatcacctgaggtcaggagtttgagaccagcctggctaacatggtgaaactccatctctactaaaaatacaaaaattagccaggtgtggtggtgcatacctgtaattccagctatttgggagactgaggcaggagaatcacttgaactcgggaggcggaagttgcagtgagctgagattgcaccactgcactccagcctgggtgacagagtgaggctcagtctcaaaaaaaaaaaaaaaaagaaaaaaatgatacctccagtgagaaatggctgcactgtgcggggactgtgtggtgatgtagactttcagctaatcacgagacacccattcctctgggcagtttcagtctctcatcagggtacatggctcaaaaaaacaagatgcactggaacttgcctccctggctaggctactatgcacagaccacacaaccatacatgcctgccctgccacagcaagggagatgggtcctctctcatgtcaggcctggccggagagaccacttctgtgcactccatttggaacagatgtcctgcccttcatctctccagggccttggccagatggggtttggtgcgaagcagctttggcccggtgttaattacctcctcttggagaaaggtctgcgcctggccctggctgttgggcttgatgcagcgaatgtagtggggcgtggtgctgtgtaggacctgcagaagctgctccagtgaggcctgcagatgagagaccatggggttaggcagggagaggggctgcccagggccatcaactgggctctggttagtaactacatcaaatgcctccagcgggcccttccatgatcctgagaccaagaatctcctgtgcagggatgactgctgcaggctctcaacgagcaggctcagagcacattcctctcccaacttcccatgctcctcacctctgtcttaagggacccttctaaacctgtgatcctccctgactgttctccctgaatccaatctcctcctctttcccctccccacttctccccagagcaatcttcttagaaaagaacaatctcaaaacttcttgccattcgtccagcaacaactgttatcactcagctcatcctgtgtgttggaggctgtgccacaggctgcctgctgccatgtcagagctcactccaatgggccacacatgttggatgaacaccctcgggggtgtgtttgaggctgggtaggaaggtgctaatcaaacctggttttccaggtgcctcctcgaggtggtggtgataaagctaaagtctgaaggatgagaaggactaaactaggaaaaggggcgtggaggatgggagtgaggtggagctgatggggcagtagtcaagagtatcccaggaaggtggggcggtacatgcaaggactgagaggtggtagaaagcagacgatgtgagagaagtgagtgagggtagggttagaacaggaagctagacagctggagatgagccaggtcaaagaagctcatgtagctgatcctcttcccatgagcaccccagtggcagggggtgagaggctgcatagtgcccccataggcccctagacttcccatcatattatacctgatagcctatttgtctactgtttctgtcttccacactgaagtataaactccaggggactgggaccacatctacttgacttgccactgctccccaacaaac

SEQ ID NO: 1744 - DNA, 1470 bp, Homo sapiens
gcgcggcggcgcagtgaacagtctccttccacaaaaccatggcgtcgctcaaatgtagcaccgtcgtctgcgtgatctgcttggagaagcccaaataccgctgtccagcctgccgcgtgccctactgctcggtagtctgcttccggaagcacaaagaacagtgcaaccctgaaactcgtcctgttgagaaaaaaataagatcagctcttcctaccaaaaccgtaaagcctgtggaaaacaaagatgatgatgactctatagctgattttctcaatagtgatgaggaagaagacagagtttctttgcagaatttaaagaatttaggggaatctgcaacattaagaagcttattgctcaatccacacctcaggcagttgatggtcaacctcgatcagggagaagacaaagcaaagctcatgagagcttacatgcaagagcctttgtttgtggagtttgcagactgctgtttaggaattgtggagccatcccagaatgaggagtcttaagatggattattgtgctgcttgctcaagcgtgtgcttgactcctggaacctgcctgctccctctcccagaccagctagtttggggctggggagctcaggcaaaagaggtttccaggatgcagattaggtcatgcaggcctttaccggcattgatgtggctcatgtttcaggcagacttggggtccttaaggtggcaagtcctttatggagagaaaacttgacattcagatgattgtttttaaatgttttacttttggtacagttgatagacatcataaacgatatcaagcttacacttcatatggagttaaacttggtcagtgttaataaaatcaaaacgtgattctactgtacattgcattattcataatttaattgtttgaaattacattaaataaatcaactaattaaatactaaagttttgttcctttttaaaggaaataaccacaagatttttcccagcccaaattccagcgccaattttaggccaactttggctgttttcttccaaaagtgcttatgtggaattgggatccccagtgtagtgacagacagtcatgactgctgctgagtttgatctgtgaaggtagtgaaatgtggccctgatgtttcttaaccctgatttggtaactaccagccctgacaccatcagtgcttgatgtagcctggaaccccaggcccactgacgcactgggcacggggctctgggtcgaaggctggagccgtcactgttgttcatgtgcatttggagcactgtgggaatagtctggcagctgtgtgctgattaaatgtctttggcaaggcagggggcaggaaaaggccttgtggaaacaaaggcaccaaggatcaccccagcccagtgaaggcagaagaggtcacgtggatcagcctgtgtctttccagcagaatctgattaaagcctgtaatgctgtagggtgaaggttcagggcagatgtcagcatac

SEQ ID NO: 1745 - protein, 153 aa, Homo sapiens
MASLKCSTVVCVICLEKPKYRCPACRVPYCSVVCFRKHKEQCNPEWVEKKIRSALPTKTVKPVENKDDDDSIADFLNSDEEEDRVSLQNLKNLGESATLRSLLLNPHLRQLMVNLDQGEDKAKLMRAYMQEPLFVEFADCCLGIVEPSQNEES

SEQ ID NO: 1746 - DNA, 667 bp, Homo sapiens
gcgcggcggcgcagtgaacagtctccttccacaaaaccatggcgtcgctcaaatgtagcaccgtcgtctgcgtgatctgcttggagaagcccaaataccgctgtccagcctgccgcgtgccctactgctcggtagtctgcttccggaagcacaaagaacagtgcaaccctgaaactcgtcctgttgagaaaaaaataagatcagctcttcctaccaaaaccgtaaagcctgtggaaaacaaagatgatgatgactctatagctgattttctcaatagtgatgaggaagaagacagagtttctttgcagaatttaaagaatttaggggaatctgcaacattaagaagcttattgctcaatccacacctcaggcagttgatggtcaacctcgatcagggagaagacaaagcaaagctcatgagagcttacatgcaagagcctttgtttgtggagtttgcagactgctgtttaggaattgtggagccatcccagaatgaggagtcttaagatggattattgtgctgcttgctcaagcgtgtgcttgactcctggaacctgcctgctccctctcccagaccagctagtttggggctggggagctcaggctcatgtttcaggcagacttggggtccttaaggtggcaagtcctttatggagagaaaacttga

SEQ ID NO: 1747 - protein, 153 aa, Homo sapiens; identical to SEQ ID NO: 1745

SEQ ID NO: 1748 - DNA, 134625 bp, Mus musculus
  misc_feature (1)...(134625): n = A, C, G or T/U
tctaccattattagatgaaaccaagcagtgggtcagacccagtggattccctaaggctcttcccctgaacactgctgccctgaggatcaggccttcaacacaagagccttctgggggatgcacacacatatacacatgcacacgaacacacacatagaagcactcttgaacacacctacacactcacacatgtaaatgcactcatgaactcactcatacacgtgcacacacatccacacacatatgcacacatgcacgcatatacatgcatgcaaacacacatgcactcataagctcacacacatgcacacacatactcactcatacacacacacacacacacacacacacacgcctttctaagtgaaccagtaggaggaggtatcagtaaactggtaagatgggctagatagaaagaaatggatctgcacccagaagaaacaaacaacaaatgctcaaacaaaaggcataaggagactcaaggcaggagctgagtaaagattgacatttgtatttaggaggaaggacctttcaatcttatatagaatatactcttatatatgcttatataagaacttccatattaagaagagaaatgggcagactgtgtaggaagttcacagaaaataaaatacacatgtctccacatgaggagatgatattaacccagaataagagaaaagcaacttaaaacattgtctgcattttttacttctatatttttatgtgcatgcacgtgtgtgtgtgtggtgtatgtgtgtgtgtgtgtgtgtgtttttcttttttttttcctttttttattaggtatttagctcatttacatttccaatgnnnnnnnnnnnnnnnnnnnnnnnnnnnnnnnnnnnnnnnnnnnnnnnnnnnnnnnnnnnnnnnnnnnnnnnnnnnnnnnnnnnnnnnnnnnnnnnnnnnnnnnnnnnnnnnnnnnnnnnnnnnnnnnnnnnnnnnnnnnnnnnnnnnnnnnnnnnnnnnnnnnnnnnnnnnnnnnnnnnnnnnnnnnnnnnnnnnnnnnnnnnnnnnnnnnnnnnnnnnnnnnnnnnnnnnnnnnnnnnnnnnnnnnnnnnnnnnnnnnnnnnnnnnnnnnnnnnnnnnnnnnnnnnnnnnnnnnnnnnnnnnnnnnnnnnnnnnnnnnnnnnnnnnnnnnnnnnnnnnnnnnnnnnnnnnnnnnnnnnnnnnnnnnnnnnnnnnnnnnnnnnnnnnnnnnnnnnnnnnnnnnnnnnnnnnnnnnnnnnnnnnnnnnnnnnnnnnnnnnnnnnnnnnnnnnnnnnnnnnnnnnnnnnnnnnnnnnnnnnnnnnnnnnnnnnnnnnnnnnnnnnnnnnnnnnnnnnnnnnnnnnnnnnnnnnnnnnnnnnnnnnnnnnnnnnnnnnnnnnnnnnnnnnnnnnnnnnnnnnnnnnnnnnnnnnnnnnnnnnnnnnnnnnnnnnnnnnnnnnnnnnnnnnnnnnnnnnnnnnnnnnnnnnnnnnnnnnnnnnnnnnnnnnnnnnnnnnnnnnnnnnnnnnnnnnnnnnnnnnnnnnnnnnnnnnnnnnnnnnnnnnnnnnnnnnnnnnnnnnnnnnnnnnnnnnnnnnnnnnnnnnnnnnnnnnnnnnnnnnnnnnnnnnnnnnnnnnnnnnnnnnnnnnnnnnnnnnnnnnnnnnnnnnnnnnnnnnnnnnnnnnnnnnnnnnnnnnnnnnnnnnnnnnnnnnnnnnnnnnnnnnnnnnnnnnnnnnnnnnnnnnnnnnnnnnnnnnnnnnnnnnnnnnnnnnnnnnnnnnnnnnnnnnnnnnnnnnnnnnnnnnnnnnnnnnnnnnnnnnnnnnnnnnnnnnnnnnnnnnnnnnnnnnnnnnnnnnnnnnnnnnnnnnnnnnnnnnnnnnnnnnnnnnnnnnnnnnnnnnnnnnnnnnnnnnnnnnnnnnnnnnnnnnnnnnnnnnnnnnnnnnnnnnnnnnnnnnnnnnnnnnnnnnnnnnnnnnnnnnnnnnnnnnnnnnnnnnnnnnnnnnnnnnnnnnnnnnnnnnnnnnnnnnnnnnnnnnnnnnnnnnnnnnnnnnnnnnnnnnnnnnnnnnnnnnnnnnnnnnnnnnnnnnnnnnnnnnnnnnnnnnnnnnnnnnnnnnnnnnnnnnnnnnnnnnnnnnnnnnnnnnnnnnnnnnnnnnnnnnnnnnnnnnnnnnnnnnnnnnnnnnnnnnnnnnnnnnnnnnnnnnnnnnnnnnnnnnnnnnnnnnnnnnnnnnnnnnnnnnnnnnnnnnnnnnnnnnnnnnnnnnnnnnnnnnnnnnnnnnnnnnnnnnnnnnnnnnnnnnnnnnnnnnnnnnnnnnnnnnnnnnnnnnnnnnnnnnnnnnnnnnnnnnnnnnnnnnnnnnnnnnnnnnnnnnnnnnnnnnnnnnnnnnnnnnnnnnnnnnnnnnnnnnnnnnnnnnnnnnnnnnnnnnnnnnnnnnnnnnnnnnnnnnnnnnnnnnnnnnnnnnnnnnnnnnnnnnnnnnnnnnnnnnnnnnnnnnnnnnnnnnnnnnnnnnnnnnnnnnnnnnnnnnnnnnnnnnnnnnnnnnnnnnnnnnnnnnnnnnnnnnnnnnnnnnnnnnnnnnnnnnnnnnnnnnnnnnnnnnnnnnnnnnnnnnnnnnnnnnnnnnnnnnnnnnnnnnnnnnnnnnnnnnnnnnnnnnnnnnnnnnnnnnnnnnnnnnnnnnnnnnnnnnnnnnnnnnnnnnnnnnnnnnnnnnnnnnnnnnnnnnnnnnnnnnnnnnnnnnnnnnnnnnnnnnnnnnnnnnnnnnnnnnnnnnnnnnnnnnnnnnnnnnnnnnnnnnnnnnnnnnnnnnnnnnnnnnnnnnnnnnnnnnnnnnnnnnnnnnnnnnnnnnnnnnnnnnnnnnnnnnnnnnnnnnnnnnnnnnnnnnnnnnnnnnnnnnnnnnnnnnnnnnnnnnnnnnnnnnnnnnnnnnnnnnnnnnnnnnnnnnnnnnnnnnnnnnnnnnnnnnnnnnnnnnnnnnnnnnnnnnnnnnnnnnnnnnnnnnnnnnnnnnnnnnnnnnnnnnnnnnnnnnnnnnnnnnnnnnnnnnnnnnnnnnnnnnnnnnnnnnnnnnnnnnnnnnnnnnnnnnnnnnnnnnnnnnnnnnnnnnnnnnnnnnnnnnnnnnnnnnnnnnnnnnnnnnnnnnnnnnnnnnnnnnnnnnnnnnnnnnnnnnnnnnnnnnnnnnnnnnnnnnnnnnnnnnnnnnnnnnnnnnnnnnnnnnnnnnnnnnnnnnnnnnnnnnnnnnnnnnnnnnnnnnnnnnnnnnnnnnnnnnnnnnnnnnnnnnnnnnnnnnnnnnnnnnnnnnnnnnnnnnnnnnnnnnnnnnnnnnnnnnnnnnnnnnnnnnnnnnnnnnnnnnnnnnnnnnnnnnnnnnnnnnnnnnnnnnnnnnnnnnnnnnnnnnnnnnnnnnnnnnnnnnnnnnnnnnnnnnnnnnnnnnnnnnnnnnnnnnnnnnnnnnnnnnnnnnnnnnnnnnnnnnnnnnnnnnnnnnnnnnnnnnnnnnnnnnnnnnnnnnnnnnnnnnnnnnnnnnnnnnnnnnnnnnnnnnnnnnnnnnnnnnnnnnnnnnnnnnnnnnnnnnnnnnnnnnnnnnnnnnnnnnnnnnnnnnnnnnnnnnnnnnnnnnnnnnnnnnnnnnnnnnnnnnnnnnnnnnnnnnnnnnnnnnnnnnnnnnnnnnnnnnnnnnnnnnnnnnnnnnnnnnnnnnnnnnnnnnnnnnnnnnnnnnnnnnnnnnnnnnnnnnnnnnnnnnnnnnnnnnnnnnnnnnnnnnnnnnnnnnnnnnnnnnnnnnnnnnnnnnnnnnnnnnnnnnnnnnnnnnnnnnnnnnnnnnnnnnnnnnnnnnnnnnnnnnnnnnnnnnnnnnnnnnnnnnnnnnnnnnnnnnnnnnnnnnnnnnnnnnnnnnnnnnnnnnnnnnnnnnnnnnnnnnnnnnnnnnnnnnnnnnnnnnnnnnnnnnnnnnnnnnnnnnnnnnnnnnnnnnnnnnnnnnnnnnnnnnnnnnnnnnnnnnnnnnnnnnnnnnnnnnnnnnnnnnnnnnnnnnnnnnnnnnnnnnnnnnnnnnnnnnnnnnnnnnnnnnnnnnnnnnnnnnnnnnnnnnnnnnnnnnnnnnnnnnnnnnnnnnnnnnnnnnnnnnnnnnnnnnnnnnnnnnnnnnnnnnnnnnnnnnnnnnnnnnnnnnnnnnnnnnnnnnnnnnnnnnnnnnnnnnnnnnnnnnnnnnnnnnnnnnnnnnnnnnnnnnnnnnnnnnnnnnnnnnnnnnnnnnnnnnnnnnnnnnnnnnnnnnnnnnnnnnnnnnnnnnnnnnnnnnnnnnnnnnnnnnnnnnnnnnnnnnnnnnnnnnnnnnnnnnnnnnnnnnnnnnnnnnnnnnnnnnnnnnnnnnnnnnnnnnnnnnnnnnnnnnnnnnnnnnnnnnnnnnnnnnnnnnnnnnnnnnnnnnnnnnnnnnnnnnnnnnnnnnnnnnnnnnnnnnnnnnnnnnnnnnnnnnnnnnnnnnnnnnnnnnnnnnnnnnnnnnnnnnnnnnnnnnnnnnnnnnnnnnnnnnnnnnnnnnnnnnnnnnnnnnnnnnnnnnnnnnnnnnnnnnnnnnnnnnnnnnnnnnnnnnnnnnnnnnnnnnnnnnnnnnnnnnnnnnnnnnnnnnnnnnnnnnnnnnnnnnnnnnnnnnnnnnnnnnnnnnnnnnnnnnnnnnnnnnnnnnnnnnnnnnnnnnnnnnnnnnnnnnnnnnnnnnnnnnnnnnnnnnnnnnnnnnnnnnnnnnnnnnnnnnnnnnnnnnnnnnnnnnnnnnnnnnnnnnnnnnnnnnnnnnnnnnnnnnnnnnnnnnnnnnnnnnnnnnnnnnnnnnnnnnnnnnnnnnnnnnnnnnnnnnnnnnnnnnnnnnnnnnnnnnnnnnnnnnnnnnnnnnnnnnnnnnnnnnnnnnnnnnnnnnnnnnnnnnnnnnnnnnnnnnnnnnnnnnnnnnnnnnnnnnnnnnnnnnnnnnnnnnnnnnnnnnnnnnnnnnnnnnnnnnnnnnnnnnnnnnnnnnnnnnnnnnnnnnnnnnnnnnnnnnnnnnnnnnnnnnnnnnnnnnnnnnnnnnnnnnnnnnnnnnnnnnnnnnnnnnnnnnnnnnnnnnnnnnnnnnnnnnnnnnnnnnnnnnnnnnnnnnnnnnnnnnnnnnnnnnnnnnnnnnnnnnnnnnnnnnnnnnnnnnnnnnnnnnnnnnnnnnnnnnnnnnnnnnnnnnnnnnnnnnnnnnnnnnnnnnnnnnnnnnnnnnnnnnnnnnnnnnnnnnnnnnnnnnnnnnnnnnnnnnnnnnnnnnnnnnnnnnnnnnnnnnnnnnnnnnnnnnnnnnnnnnnnnnnnnnnnnnnnnnctgtctttttccctgagatgggtttcctgtaagcagcagaatgttgggtcctgtttgtgtagccagtctgttagtctatgtctttttattggggaattgagtccattgatattaagagatattaaggaaaagtaattgttgcttcctgttatttttgttgttagagttggcattctgttcttgtggctgtcttctttttggtttgttgaatgattactttcttggttgttctagggcgtgatttacgtccttgtattgcttcttttctgttattatcctttgaagggctggattcgtggaaagatattgtgtgaatttgtttttgtcgtggaatactttggtttctccatctatggtaattgagagtttggccgggtatagtagcctgggctggcatttgtgttctcttagtgtctgtataacatctgtccaggctcttctggctttcatagtctctggtgaaaagtctggtgtaattctgataggccttcctttatatgttacttgacctttctcccttactgcttttaatattctatctttatttagtgcatttgttgttctgattattatgtgtcgggaggaatttcttttctggtccagtctatttggaattctgtaggcttcttgtatgatcatgggcatctctttttttatgtttgggaagttttcttctattattttgttgaagatattagctggccctttaagttgaaaatcttcattctcatcaattcctattatccgtaggtttggtcttctcattgtgtcctggattacctggatgttttgagttaggatccttttgcattttgtattttctttgactgttgtgtcgatgttctctatggaatcttctgcacctgagattctctcttccatttcttgtattctgttgctgatgctcgcatctatggttccagatctctttcctagggtttctatctccagcgttgcctcgctttgggttttctttattgtgtctacttccccttttagttctagtatggttttgttcatttccatcacctgtttggatgtgttttcctgtttttctttaatgatttctacctgtttggctgtgttttcctgcttttctttaagggcccgtaactctttagcagtgctctcctgtaattctttaagtgacttatgaaagtccttcttgatgtcctctatcatcatcatgagaaatggttttaaatctgggtctagattttcggttgtgttggggtgcccaggactaggtggggtgggagtgctgcgttctgatgatggtgagtggtcttgatttctgttagtaggattcttacgtttgcctttcgccatctggtaatctctgaagctagctgttttagttgtcactgttaagagcttgttcttcaggtgactctgttagcctctataagcagacctggagggtagcactctccttagtttcagtgggcagagtattctctgcaggcaagctctcttcttgcagggcaggtacccagatatctggtgttcgaaccagactcctggcagaagttgtgttccactcactagaggtcttaggatatcgtgtggaatcctgtgtgggcccttgcgggtgtcaggcaactccgctggcaaggtaacccggggctcgagtcgagcggaaggggtttgtgccccagatcaggcccgggtagcctgcttccctatgtaccgcagtctcaggttccgcgcgattggattggggccggcactgtgttccactcaccagaggtcttaggatcccgtggggggtcccgtgtgggcccttgcgggtgttgggcaagactctgctggcaaggtagcccggggctcgagtcgagcggaagggacttgtcgtgtgtgtgtgtgtgtgtgtgtgtgtgtgtgtgtgtttgtgtgtgtgcttgtggaggccagaggtcaacatcactcaccttttcttattttttgagacaggctctcattgaacctggaatttcttgactgtctggcaaaccccagggtccttctgtctctgcctcgcctgtgctgaggttacatacatgtgctgcctcccctgtgctgaggttacatacatgtgctgcctcccctgtgctgaggttacatacatgtgctgcctcccctgtgctgaggttacatacatgtgctgcttcccctgtgctgaggttacatacatgtgctgcctcccctgtgctgaggttacatacatgtgctgcctcccctgtgctgaggtatcatacatgtgctgccttgcctgtgctgaggttacaagcaggtgctacactcccatcttttcctgtggtgaaggggattaactcaagtcctaccacaaacacctcaccagctgaggtcttctcagcccctaaaaccttctttaattggataaataggttccatttctgatcaaactggaggaagcccactacgccctgtgtctcactcttattgttaaaacatctgacaaaatataccagcaatgaagtaaatggcagcagtggactggacggggaaccccaaagttgaagagagatcagtgcagggtagtgagcttcctcttggttttgtcgttttgtctttttcctttctctctgatacctttttcctttttctcttgatctgaagcctggctgaaatgagagctaacaatcagaaatgatcaggaaacaactccaaccacagtgagcaagataaagcgaggtgaagtaccgactgctttcctgagattagtttattcaggaagctggcgcctaagacagggagagaaaaactgtccttttagagcagtgattctcaaccttcttagtgctgcaaccttttaacacagcccctctgctctggtgaccccaaccatgaaactattttattgctacttcataactgtgactttgctactgttatgaaccataatataaatatccatgttttccaatggttttaggtgacccctgtgaaacgtcattggagccctccaaagggtccacaacccacaggttgaggaccactgttctagaggaagcaactggaaagaaggactcttgggaacatgagagcatggagccttgcaaagggggttgttacatagcaaagaataactaagacatgcctgtcctagcctgcttctttggttgctccaataaaatttagaccagaactaacgtgggaaggaaagggcttatttgacttatagtccatcattaaggtaagccaggtcaagagctcaaggcagggtcctggagacagaacttgaagcaaagactacagaagaatactgctgcttactgcctgctcttttaaacagccaggttccaccctcttaggatggtaccacccatagtgtgctgggccctcccacatcatcaagagaatgctcctccctaccccccctcccccccaacacacaagctcaaaggccagtctgatggaggctgttccttaatgtgatttcctctcaggcaactattggtgtgtcaggttcacaaaaactaagtggcatggcaccatgactcaggctcacatcttgtactttgctttgagatggagattcactacattgctcaggctggtctctagttcctcagttcaagtgatcttccagcctcagtctgctgagtatctgagactacaaaagtgtgggccaccaacacagcttaactaaattttgttaattcagctgtgataagattactcccaagagggctgggataatctcttccctaggatgcacaaggccctgggtttaatctccagtataaagactatctgagcaaaaaggatttaatagatattccattaaaatgattgtttttcaaaaaatttcaaacatttccaatcagataccaaagaatgaagttatatgcaaggatgaatgtaagttcaggggctgagaaaattggaactctccaactgaaacccacaagtctcctgagtcgtcaattgactctaattgttaaagttctgaaagatttgccttggttttcagagagaagagagcttcagaattctgctgaaaaccagccaagaattgctccttaaggcagagagggggctaggaggacaacctccaaaccggaacacccccaggggttggggtgaaggccttgtcccctggaggaaggcaaaaactggaagggtgtggagggtggaggctagacggtagagggtagaggtgggcaggtgtctggattctggtctaagagattaagaaaaggaaagcgtaaggagccttatcctttcccttccattccctacccagcaaagccaagacccagcccgcacccataccaccacgaggaccgctagcgaggccccacccctccggatgaggctccctttctgccgtgagtgacagcaacccaagccccaccccactcgccacagccccgcctttaacatgtctctctacaacgacagctgatgaggccacgcccatgcagcaccaccacatcccaccaaaatgagaaccttcatggccccgccccttccgtcgcggccccacccctctcccgagggtcagccagtgaagcttcactctgacacctccgccccccttcctcgggacttacaactgttaaggcaccgcccctttcacggtgatcccgccccccacgccgagtgacagccggaaggccccgcccctcccggtcgttgacgcctcctgtcggccaaggcgccacgccccggtcgtgtatccagtccgccttagcgccgcgggcctggttctccccgctcccgcggtccccgaggacgccgcgtgggcggccggtgagtggggaggggcgcagtccgtgtggtgggcccgctggggatgctccccccccgcgacagggaaagagccacggaagcactggtcagggctggagatccgcaagggtgtgaaagccggcggaggcagggggatgtcggccggctctggatttgcgtcaggcctggagcagggccgtctctgactgaccatgggatcccggggtgtcgggctgctctgattgacacttcggggaaggtgcccggtagccttgattgtgtcacacctcgcggtctctctagggttgtgaacagatccggtctgaggtttctgaccgggcccattgtgcgctttccgtgataggtgtcgcatgactccagtgaagggtgcagagccctgtccctacccgaaaccctgtttgttctttcccatagctgaggcggtgcgtagacggtctgactgaagtctcttcaagtttgttcccactccacagttgaatcgcaatcccttaaaccctgatgttgtaatcgaatcccggcagttttaaaagtttcaggtgcactgtgagtggcctggtttccatttaaagtcacagtaaccttagaggactagatatttctaaggactctttctgtctttaaacaattttaaatgcaaccgtgcatcccttaaccagggtaaactgggagggagatgcttgctgtttacctggcatgaacgtccgagggcactcacacagacaaagaggctgtgactttactaggcatatagttttgttttctggggtttttttgttttggtttgctttggtttggtttttggtttttaaaaatttttgtctgtgcgttcgtgttattgtgagtgcaggcaaacggatacacacaggcttgtacaggacagaggacacaggtgtgggcccttgcctcccaccgtgtttgagataggatgtctttgtgtcttttcatttttgctgctgtgctgcctgttccaggccattcagccctatggcttcttagggttttactgtctctgtctcccatatcacctggagttgggattacagaagcactctactgcgtgctggagtccaaatttaggtcctcttgatgagaaatgagagatgcagaatatcagacaggcatagacaaggcctggtaaactgtaacgagtgtgcatttggatagactgtagtgtggttgcgtgtgcgtgtgtgtatgagtgtgtaaagaggaaaactagaaaggttggaacacagaaaagaggataaagttgagaatataaatgccctgtaggaatgctcagaaccctatgacctctagtagcattttgtttttcttcctaatttgtatatttaaaagtgtttttttttttttacatattattgtatgtgtgcatgtgggtttacacataccatggaatgtgtgtagggatcagaggtcaaattctgggagtcaattctctccttttgtgtatataaatacacatataattaatggggtagtattctaatattaatttgtgactttttccaacttaacattttctcatttatcattttccttgatcactaaatattcacactgaacaaccagctacttctttctaaaataataatagtatttcagctatgtgtttaatacatgcatgcttggaggtgaagaattagggctgatcaaggcaagtatattagtaagtgtttaaatgccatctatgctacattgagctagtccctcacagtatatacatgggttgtctgtagctctctgcatttttacacagtaacacctgcttttggaagatgccagctcagaatgctgtttgtcctggttgttttttgtttttatttttgtttttttttttttgtttttttttttgtagttgttgttttcaacttgacacaaactatcctcatctgaacaaatccctccaccatattgacaggtacacagatctgtggggcattttcttgactgatgattgattggggtgggggtgtgcagtccacggccagtggagccagccctaggcgggtggccatgggttgtataagaaagcaggctgaccaggccagtaagctgcaccctccatggcctctgcttcagctcctgctttgagtttctgtcttggcttcccagatgatggaagtcaaaaaacccttttcctcccaagttgcttttggttgtggtgcttatcagagcaatagaagctctgagacagtgttacctgtgatgtgaagctatggttggaatacatggtagtttttatacatacttattagaaaggggaaaataagggatttggggaaataaaagatttttattttgaaatgatttgggtttgttttttgtttgtttgtttttgttttgttttgttttgtttttttgttatctgcaaaggcattagagttctcatgtgccagcttccctgagccttgtatggtctcagtacaacaattagtgaacacaggaaagcagcctgacacagttccattaagtgacttgcagatctcagtagagcacaccagtctcacacttgtgataggatccattgttgtacttacctatggtgtacgtccttagcatttaacaaaggcgtcctcccagacaggatgaccaagtatggagttgtgcagtatagcaagcttgctaggcagcaacatcttccttaaattcatctcttgaatgctgtgtattaggaaggatgcttattttcatttcctgtggacacaagctgctatttgagtaaattacacactaaaaagggtactctttcttgtgtgaatgtttagagggctggagtcaacctcaggggatgtctcggttactctccaccttgtgtttttaagtcagggtccctcactggttgaaaactcatcagttaggctaggctggctgactggagggccctacttagctttgcctgcccagcaccaggaatccaagcctatgctttgatacccagcataataatgtgagtcctggggatggaactcaggtcctcatgctggaatgacaggcagtctactgactgagccatctctgcaacagaacagctttaatcacactctgtatcaagcacatcaccacccagtcacagaatagagctgatgaggtcatctaagtgccttaactttttgatttacataggaatcccactaagaatctcttaaaagcagagtgccaagtgccaactccttactcaggctgttctggaactctctgtggtccaggctggcctcaaacttgccatcttgctttagcccagagagcacggggaccagatttgtgccgccacttccagcttaataagatggttcataacaacactcctgtgcgtgatttcctttgtagttgggaatttgtgactgttccaccgactagcttaaatccacaaagaacacactccccagaacacagcaccctcattctttccttggaaaatcccttccatgcacaactgccccaccctacctcctcaaagtgaactcaatgtctttctctgcatcttaagcaccattcagatctgcctgttgtgggctaaggatctggtggctaatgtgaaaaccctgtgtatgtacagtagctgtctgtgctctccaacacatgtgtctgctgtaatccaacacatggtgaaagagcacagcccactgcagctttctggagcctgtgcagggctccagaaacctgggctgctcagctttctggtcactctagctgttgtcctgatcacaggcaagctgaacacagaggagaaagccatcctaccccttggtgccctggaggttggtctgttgcccctgatacagccatgcctgctgcacactaaagcccacactgtctagtatcttggctcctcctttctgtttcctctgtgtggcaatggcagagcaaattcccattgcgactcctggcaaagtgagtcacagaactcaatttaggccaagggtattttcaccacacaactcttactcaagctgtcggggctgccagtgagccaggtaagatggaggccagcaccccattgccagttactatagtgtgaaagtctgtcataaccatatcctgctgtgtgcagagcacagagaggtatgggaaccccccagacagggccacccaagaagtatcatatgaaaaagggggtcaggagagaacactttagtgctgttgcagtggggagataaatactctgagcagtgggcactcttagtcgggaggaggaaggagaggatcagtggtagaagagtgggtctactctctaggtaacctgttctcctggtacactgcagctcaggtgatgacacaattgctgtgtaactgagtgtgggtaccgacaagcagctgtgatcaccagggcctgcctgctgcccttcactcttcacatagtttgtattgctcacagtggaacctaagcaattctgacggatgtgatagatgtgtgtgcgtgtgtgtgagggggtgtgcattcctgtgcacctgctttctgaggccagaggaggaactgggattctgaccttatttttctcctcctatccctttgagacaggtctctctctggaattaagatggtggccagcaagccccagagatgcccctgtttctgttctccacagctctagggtaacagatgtgcatgtccacatctagatttttatgtgggtcctgggaatttgaactcagctcatcttctggtattacttagtaatatttagtgtacattttacatggattcataagtacagttttcttaaaacattatgagaggagttggcatctattaataactaagtataatttcttaagatatttgtttgtttattttatgtatatgagtgctctgtctttacacacaccagaagagggaatcagatccattacagctggtagtgagccaccatgtggttgctgggaattgaactcaggacctatggaagagcggtcagtgcttttacaactgagccactgctccagcctcccaatataatttttaatgtatgtagtgggctatttccttttttgagtggtcctataataacataccataccatattaggttgtctttgttgttgtttctttgatataaaccctaaataaatacaataaaataatgaatttttatactcacatttgctttaaagttcctttagagacaaatttcattaataaagtggtaatgaatgtctagatatattttgtttaattttcttcttggggtaaatttatggaaataatactgttgttactatgtagacatatttcttattgctggtttgctttggcaatagggatatatttggaaatagcgatgtatcttgttaccatttgttttattactgaccttaaatgtcttttcaaatgtggttggtatgattcttttgacagttgtgtttttgtgtttagtgtgtgggtttttgtttgttgttgttattgttgtcttcctgttaatttctaggcactctgcaggtgagagatattatcacttgcttgccgtatattgccaatactgttaagggtctgccttggacaatgaatggcagagtttcttaagtgagaataaataacaagcagtgctcattatgggtttctaggagtgctcatgtacctgctttgaagagaggcctgttctggttttctcagaaagattgttttacgacctggtgattaagaataagggtagactctgcacatcagacaatggagaaaggccagcgagctgacctttgatgtctgtcctctgaacactccgctctctctcctccagagttctcatttaccccagctggaagccatgtcttgtgtgtgacaaacagaaggttgtcactcccagccaccattaagagactaggcagaccccctttttagtcttccctgcctcctggttcctttttcctgagcctactctgtaatgacttgatactattaggctctatcatggcatggttgtagcaaacacacaatgcatgtttattgctattactcatgttgtagagaccatgagctgagcctcccttggtaaacgactgtcttaacttcatcatgcagctcaggctggcctcaagctcatggtccttttccttcagcctcagtagtgcagacagacaccacagagatgcaccacagtgctctgtgccccaggcctcctactatgaaagacacagtccctcagtttataggacaggggtgtgccttcctgctttcctgctggtctcctgctaggacagctgctgcagtcagttgaaggtgcatcagaaagaaagccagtctttgtgacagactctcagagacctgtcgctgctgagcgggtgctttgcatcattcttgtcctgcggctcctttgattccacaggtgctgctccctcccatctagaaaatctctctaccaagcgcactatacatgttggttgaggttattgtctgtattttgaaggctatgaagctaagccatggcccttttgagagccaaggcttgtgattaactattctgaagaaaccattagctgtttggaagcactagttgatgtcttcatagaacttagcctgctggtctacagctaaaccactcctaacccagcagatcttgcctggtcctagaagctgagcagatccaggcttggatggagaactcagcacgatgaccggtggttcctgtgcatcttcacacagcgtctgaagcatctggagacacagggttccaactttctgctgctgagataaaacaccctggccaaaaggaatttaggggaggaagggctcacttcagcttacagttctaggttactatacatcatggaggggaagccagaggcaggagctcgaggatgctggtcacctgacatccgcagccaagaacagagagaaacaaacgctcccaagcggcttgcctgcctgctattcaggttcagctgtcttctccacatttgcacatctcatggcccagcctaggggccaccctcaatagtctgcatcttctacaccaattaactattaaggccttgtcccagcatcatagtcacaagccaacggtatccagacacttcctcaactgaggtttttctgtaaggagcttctaagttgtgtcaaatagacatttaaaattaagcacacgtgtgttgtttaggttagtatttgacatgcaatggagaaggtcgccctagtggggagtgtgtaatttaaacctgatattggtttcaaaagcctgttataggccagactcaaagtctacactattttcagggcaggaagaaaaggttgatcagtccaaaccaggcaatctctgttgagttgaagaggtagtggcccagttgagcagtgctgtgtgcaagtgagttttcagactgagtttataatggaggagggatctgaagctgaggctgatgttgtggtttttaggacaggcattggcattgccagggccgctggtcctatagctgtagggcttgggtgtgtgtgggagatgtccagacgggactatttatttttgtatctggaagaggagttcccctattatgtccatgatataccattaagcccagacctttcgagcctcccatcatctgctcttttgtcccttttccatgactgagatggagatgagtggggtccctcactggtgttgagcccaccagtcccccacatccaggtgtggggttcgttgtcatgcctatcattgaaacagatggaggcacacataaccttaagagttagtaagtaaagggccaggcttgctctggagactcccggctcagaggtgcctgaggaaggcaaggttgggtctagctttaagaagggagacagtgcatcgtggctgaggggttggcagtgagagcatgagactgggtcactcaccatctcaagtcacaatgcagagactgactaacgtaggtgctcagctcactctcctatttactcattcaggttcctgctccttggaggtgactgtccccgtggcttccccaccatgatagactgtatctcctcacactgtgagccagaagcaatcctttcatcttgtttcctgctagattgtaggccacagcaatgaggacaatgactattattgtagcatgtaagaaaaggctccatttcaccaaaaccccaactacagaaacaaaacaaagggttgcagtgatgagagaccatgtgtgtgcagaaggtcatgctcagtagcagctcaggggaggtgttctggtgggcatgcaacgcccctcctctgattcaggaaaacagactgctctgtctctaccatcccagggtccctggacaggagagagaaacatagaggagggctggcccctccccagggcgttctggctgtagttcttgaactctcacctgccagtggctggagtttagtctatgtccgtgtaacacagcagactagcacagaagtccagacatgcagcggtggagaaggggaatgaatgttcagtgtctgtcaagtggcttagctgcagacaactgtcctgtctttggctggactccttctccatccatggtgtcttggtcacagctggttgtagtctgtatacaatacagtcttccttcagggtgaactccgttccttacacttttgtttactccgtgggaagggagcacgcctcctgctgcaaggaatgcctcaggcaagaaacttcaagtccctagtttatcccattcaaagacattatgcaaacaacccattcagccccctgctgtgagacaggctttctgcctctccactggtctggagaaagtgacagagctgctgtttatccttgggctctgtctctatcttctaagaaaaacttaaagagagccccaaaggcccctcctctgagtccgtgtccgtcnnnnnnnnnnnnnnnnnnnncgcccccccccccccccttctgctgagtctctaatttgattcacttcctcagagcctgtcactggaggtggaaccctgatctgcttggttggttttgtggctgctgaagttttttgtttgtgttttctgttttgttttgtagcttttgttatcttcttatctttgaaacattcaattttgctgaagtattcagactccagcatctacaatgtaacaaactggggacccataaacaccttaaactggaaggatccgaaaggcctacactcttgagcctacacccccatcccccaaacacaacacacacacacatacacacatatatactcacatggatacataaaaattcgttgattcttttataaaaacaagaagaggaaagtattaaattatttatctattaggaggatttagtggagttaggtgagtagatacttaggccagcctctcctgtgcaatgggcaatcagtaaagggagcctctcccagctgaccaaagctctgcctaccttactgtgtccttaacatgacagctgctcccaggagcttgatggctgctcccaggaagcactgtgttgtgtttgttactcagctccagaaagaccacaccaggcccaactgttccccgtgatgtttattgaaggagagaagggcaaaggtggcagcgaaaagagaagggggggagggagagggagagggaaaggaagagagggagagagagatatatatcagaggggttttccttttatatagatagtggcataacttcaggtaaaggtggaaggtgagctaaatggattctgggaatatagtggctgttgcctgggcgagaggtgagctggtcaggctgttgcctaggtgtgatgtcacagggttaggagatcctgataccaacactctgtttcctcttgctatgaatgttgacattgtttttattaagtctgaaagtgccacacagagaccgtcactcatatgtgccattggcaagagtgtttttattttgtaaaagcaagaagcctgcatacaagggtcccacttacaaaattggtgacaatgacagactaaggcgcataggtctttttatagggaatgaggggaattttagctagggtttggtcatctaaacgtcactggtgggtgctggggatgctacatgagccagtttctgattagttttccccttttcctattacacacagtccctttccagtcactgtttgaagggtgagaggaaaggggtccttccccaggaacaccttggtgggcttctaggggtgtgggcacattaactgtggttatcccagccagtatagtatggcggcctgggtgaggctagtggtggagttaatacaactgcaggtaaagttgagcagtctaagcaggactgatgtgttgacggccccaaggaggggtatgatgacgggggcaagactgagtttataatggaggagggatctgaagctgaggctgatgttgtggtttttaggacaggcattggcattgccagggctgctggtcctatagctatagggcttgggtgcgtgtgtgggagatgtccagacgggactatttatttttgtatctggaagaggagttcccctattatgtccatgatataccattaagcccagacctttccggcctcccatcctctgctcttttgtcccctttccattactgagatggagatgagtggggtccctcactcgtgctgaagaagcaaaaagatttagtttcctgctaatcctcccatcaggggtcctgtaccatcccttttccttgtacactgccaagaaggtttggatcctctgtaatttcttgtcggtgtaagttgagacctccggcaatgtgggtgtcaccatctggggcagctgggccattagggtagtggtgatctagagtgctgcccagttttttcctccaaggatggcaccatcttcctttggtgtctagggcagtgatgactgctgctttcttgggcagccacactgtttgcaggatcctaatttaggctctcctgcttattttagacagttttccttctgaggtgagaagccctctttcctatggctctatgaacatgtgtggttgccaaggcatactggctatccatgtggatgttgagtcttttttcttggcctagctgtagggccttagtgctttctgggctgatactcctgaaggcagggcttttgcccatatggttctatccttggtgatcatttagcccctgcatatcagatggcatctttgacaagactgctgccttctcagtaccatgttaattctgcttccttaaggggaatgtccttaaagtctggtcttgtcccttgtaggtgactcagaatctctgaacagtcatgtaaagaactatctagtccgagtcagggagcaggattaccgggttaagggcgctggtggtgatgaactcgatttggggaagggttcaggagcagagtctggtaataggttagcctggcattggtcagccacctgtcaggaggaggcttgagaacccttcagtggcccacggggaatgagtgccagctccagggtctgtctgagtctttgaccagcaaggtgacgggcattattatccggagccatgggggccgtccagttgccactgggtccagtcgttttgacacataggccaccggtctttcccaggacctgtgaggctgggtaaggaccccttctgctactccttaattttcccccacatataagtggacagaatggcttggtgacttctggcaaggccaatgcaagagcctccagtaagacagcgttggccttgcctaatgccccctccatttgctcagtctgctccaatggagcttttcctccacaggtcacctcatacagaggatggacagaccacctcatacagagggtgggccagatcaggaaacccagggatccagagcatacaaaacccggccgaacccagggattcccttacttctggtgattggtgggccaggggatcctttggtttgtctcttcccttgtaattgacagccatctctccttcccccttgagtatgcatccccgagttggcagagctgagctttcttggcagaccatggaaccccagtcttcccagtgttttggggacttccttagtggtggctttacaggccaccatggtgtcagcagcagtcagcgagtctactactgcatcagactgacataacaagtctactactgcatcagactgacatagcaaagtctatatactgtatcaggcggacatagtgaaagaactcagtggggaaacccccactcagctcccgattcggcgtgcacccaagaatcacgaatagaacacaacaccttgatgtaacaacaagaggttttttaatggcggagctccaggtcgaaacgtatctcacataacaggagacagtggattcgaccacgaggcttggaagctaggggtttttatagaaaaggagtggggctgggggaggaattggcgcggtttcacatgattggtccatttaaacatcagcagcctgtaacatttaacttaggtcagaggggtggcagctagggaggcgatgggcttgcccgggcatgtcctggtctgttctgctatgttctcagccccaggtttcaaagctcagaaacaactctttgggctatttaacatacattacatgaattacagttttatttcctttcattagcaagtctcctactgcatcaggctaacatagcaagtctatatactgcatcaggctaacatagcaagtctactactgcatcaggctaacatagcaagtctactactgcatcaggctgacatagcaagtctactactgcatcagactgacatagcaagtccactaatatatcagacatacatttgggtgggcttgctgtactcagtgagtatcagtgcattcccattgtcccctgtacccaggtttgtctttgagatagtggcctcaggggttgttttaaaatggagtgttgtgcccctgtgtccacgagaaactcgatgggcttcccttctacttttagggttacctaaggctcagggaggagtgccaaggcctgtctcccctattcactcatttcctctagctccagcaccttagcttctgtgggagttttctgctcagagcattcacttttctcctaggaagtcctaactgtttatagtaagcacgctgatccttctgtaatcctgaccttggtgaatgtctggcgttccctgattgacaaaggccatatttactgccaactggttttccttggcctatgggtttaagggcgtgtttccctaagcttctagttccggtgactcatcctgtttctgccatacctggctcactttgaacaaatttgttggccaccttgcagctgcccagagacaccccattagagtctggaggtagacctttaatctctccctatctgctgcagtgttgaagtcccaatcaggccaggtcaaggggaacttctcttgatgtgtcaggttgttgtcctttctggtcccagaaccaatttccaggtcttagtcaggatcctctctctttcttcagtggtaaagaggatctgaaacaattggtaacaatcatcccatgtaggctgatggttaaaaaggacagagtctaacaatcagtaagttttgcaggcttttgagaaaatttgggactttgtaacttccagttgtagaggtcactagaggagaaaggccagtgaataaactgctgccttccctgtgaatggggtgggggagggagggatgcacacagagaagtgtagtacacttggccccagtgagtggtggacttgctgtttcccctacaacttgtcttgccctggcttctctctccaccactctcccctgccgctttccctcctgccccagatttctacatcttgcgtgcgcccaactggccaggaagaacgacgctgcaacaggatctttctgcacacgtgtttattcagtcctgtttcttcttgtttatatctcccttgtttatatctcccttgtttatatctcccccgaaccctgggcctctcactcttttatactctcagttcccatccacgcacagcaggccacgccacctcaccaggcacgcagcttcagctaatcagggcagcaggggcaaatctccaccaaattggattcacctgtatcctggtacacctgcgcagcactcaagatgtttgtgtcttatatgaggaagtcaggtgcaagtcatatgacttagctgcagtccctggcgcctttgggactgccgccacacccgctccccacatctacacatagcagtttcctgatggtgaaaaaagactaaagtgtggagagagaactttctcttcacaatctcctgaggggcaggatggcagaaaggggagctgatggcctagccctctctccttttctctttttttctctgctgtcacagcagtgacagcccctagggggaggaaagaagagttttaatggggcaggaggctcttccaccagggtctgccaggtggttatataggcaacctgatcctggtggcctggctttccatagacaacatccttaaccctatagatggtggggcagttggaggtttcttctggccatctcacattgaaggtgggccagtcatttctgtaaaagacagacatctttttcttttctacatgaagatcttgtctggtgctaatttacagaccttcttgaaatgatctaacacaagactcaagcgggtggaactggtttggcccatgtttagaatcaagacagttacaaatagagacataaaagtcaatacaaatagaaatgtaccagtatagtgtgagaaaaagaaccaaaattcagaaggaaggcctgtcctataagtgggttctatgtggcaggagtgaactaccagagggatcaaggatcaagtgtgtcagaggcgtcttttgacctacttggcacaggttccactggtccacctgcttaaatcactcgggcttctagaaattggcttaggccattcagactcagactgtctaggcatacaggggcacagacaacacagagcctcagacagagacacagacagagcatttactcagcaatgggtggccaaacactcaatgtggtgagggccttggacacttcctggccaatgcaacaaaagtttaagtctgaaaacacatatagaccaccactcacatatgcaattgacaagggtgtttttattttacaaaaggagaaagcctgcatgcagaggtcggccacttacaaaaatggcgaagatgacagacaaaggcacacaggcctttttatagggaacaaggggagttttagctacggtttagtaatctaaaactttattggtgggtgctgggaatgctacatgggtcggtttctgattggcttgtgtccatgtggtcagtgggctgcaatcctgtgacatgaacatttaaccacaggctgagaggcccaaaccatatgaagctgtccagcacagatggcccatcctgagataagatatttctccatcgttgtggttatctccaggctcttctttggatgagtgattttatagctttgctcttggaatttacggtctgttcttatggtctagttcttgggacttatgactgggttatggccagttcctggaagtgcctttccttttggagtcagtcctgggcctaaaatggagtttatgttggcctcacattttcatgtcaccatttcagtgacatttagacagtcttttttctaattgtgtatgtgaagatatatagttcacatctttaatcccagcactcgggaagcagagaggcaggtagatctatgtgaatgtgaggctagcctggtccatctacatagcaagttccaagtcagccaggggtataagctatgtaatgagaccttgtctcaaaaaaaaaagtaataaaaaagtgtgtgcacatgtgggtgcatgtgcatgtgtgggtgcatgtgtgtgttgtcatcttcagcaggagggttgttagaagtagatgtcctatcttaggtccttctttagtgcgccactttagctgtgtagtttgagaagtttctgtagtggcactgcttagccagcagtgcagtgtgtagcatgctgctttcctcccagaatgactggattttgctttttgttttaattttcaggaggtttgccaaagatgagagtgactttatcaacgctggatacttgtgagagctccttcacacctctagtggtcatagaactcgcccaggatgtcaaagatgaaaccaaagaatggctcaaaaacagaatcattgccaagaagaaagatggaggttagtggaaacgttactctgccagcttggccatgatggtggctgatgtgtgtctaccaatgtgttttacatgttatctctgggctctgtatgacctactggagcttgaaaggagatttttcaatcaacactagaccatgagccctgtaagtggctttctacatgtttctaaaggccatgtctaacacagtgcccagagggagcttgccacgtggtaagagcatcataaatatgtctcatgtgagtagacacaacctgctgaacaccatgggtcaatatgatgccatgaaagggatacatctgatctctgcctgcaaacactgtccaggtgggcaaaatgaacagcgatttctagacaccgaatgacagttcagttagccgatgaactgtaagggcagtgtgctgtacacacatgcaaagtgtgcagtacacacatgtgaagtatgtagtatacatatgtgaattgtgtagtatacaatgtgagccataattatgtctgctataataaatgaagaggaaggaaaggattggggcactttgacaccatgttgtggaatgctggagataacttcaaacactgtggcttcctcctctgtgaagagcaacaggagcttgagctggtaacaaagctgagggctttgggtgagcagatagcccctaggatacacagagccactcgccatgccggctgaggcctgaagtcagtggtgtcgattggaaattgatgccttaagaatagatttttggacaaaagtggaaataaaatgtctttaaaagtaattgaaccagagggaaagaatattttctttcagaaatgtaaggtattttcaactggactggagccccctcttcacatttctgtgatttaagagtcactgccgtgagtcctcaacttcctttgctctggtcctgcgtctgtaggaacactcgggagggggagggactggggcaactgcagcagaaggcactttggaccccaggggaagggtgtgcatttactacaccacttttgattttattctctctgacctcctgctgaaaccatggtgaacaaaacaaacaagaaaaacaccatccagccaaccaaccaagacaaaagaactgaaaaccagaaggaccgttttttaaaatacaaaatcctgtggggttggagatggctgagaaacaggctgccatcctagagaccccagaatgggaggtcagtgagcgctgaagacctgcaggatctgcacagaatccacagggtgctgccaccggagcctcaggttcactcttgcttctgtggaaggctagagaagagtccactgagaagaaagacaccattctcctttcccaccctttcctgcttttgttggctcttgtttaagaaagggactccaagaaccaacagaaggaagactgccatgtgcctgacacgggggagacagtgacacccacgaagaggaggcatatagaagccacccacaagtgaagaatgtgttggaagacagtcttgttggaaaagcagctttacaaagtgaaacataaatcccatgtgcagagtcactgagtagctgaggtgactctgtacatggcatttatgttttacatttctgtgatttctcatcgagcagctgaggtggcactagaaggcctccaagagcagagagcaaagctggagggcaaggagaggaagaaccagctcggaggcacacaccaatcagagggcagggaaatgagaaatcagcaagcaggctctcaggacccctctggctttcagggaaagggtgtaccctgtgaccagatgctccaaagaaagttccagaacccgagggattaagcacaacagaccttctaggaaaaaaacaaaaaacaaaagaacgtccagtgcaaaggatcagacatcttagaagcacccagtgaagcagtgggatcctccttatttctgaaggaaagggctgcagtctaggattctggacagacccagccaacagtggaaagggcagaccacagagaggctcactagtaaagactgggcttccctcatgtcaatgtgtcaaggggagacttagccagagcacagagactagacctgttaactgtagactaggcaatgataagacagaaactttggtgaatgaaagcaagtgatgagaatcacccgccagccggtgctttttaatacacagtatggcatcatgtccttctgggagttacaccaagtcacttcctatactgtggtcttcctcacacttagagcctagcagagtatgtggaaacctgcaacctggtgaagatgtgactgacactgcaaggaacagccttgaacacagcccatctctacaaaagcatcaggctgaggaacctgctcagagggacagccttgcactccacctctggtgctgctcagtgctgctctaagtcgggagtggagagatgggtcaggggcatgtggagatggtcatgggggtggggagatgggtcactgggagggaggaatgattgtcctgtaagcaggaggacttctttttatctctagtacccacattaaaaagctaggcacaatggtatatgtctgtagtcccagagcagggagtgtgaataccagatgaccctgggagctgctggccagccagtctagctaagttggtgagtgacgggttcagtgagcagccatgtctcagaaaatgagaacaattgaggaagacagtgaacatcaacatgcacacacacatgcatacatgtacacattcaacacgtgtacatatatatccacacgtgcactcatatccatacacatccacagacaagaattaacttctatcccaaacttccttatatttctttttacttggatcccagactgaaattgtttataccaatataaacattgtatttttataggttttgatttcctgagagtgtgtgtctgttttgttctataccgtactatcttttgtttgacaggtgcccagctattgtttagaccactgctaaataagtatgagaaagaaaccctagaaaaccagaatttataccttgttggtgcctccaatgtccgactgttactgggggcagaagcagtcggtctggtgaaggaatgtacggacgctgccatgcgggccttcacctatggaacacgccacaactttaaaggtttccatggtaagcagcagaatcttttcctaccccaccgagcttgttacagagaattgtttgattcctagatcaggtgcagcatagcatcaactagtgagtatctaggcttggtgggccttagtctcttcttaactactcagttctgccattgggagcacacagtagcccttgaccatagtcaatgagaggccaggctgtcgagggcccttgggccataacataaccctccgtggagtagatggacacagagtgtacctcatttccttgttctaagttcaggaatgagtgtgcatgggctccccagcaaatgtaagagtaactcgaaacctcacttcctgggttttctggctccttctgatgtggtgggagggtaggtgtgtcctcgaatttacaggcatctcaaagagagtattctggagacaatagggccttggggtctgtgaaggaagatgctctggctcctgacagagcttttggaattaggcctcttggtactgacttgctgtagaacatttcccctcagtgacctggtgatctaggtgacatttccctcaataacaagagttgtctgtcagagctgctgctttcctgcagacttcattctccaggatgcttggttccagtctgtagtgagacccatgggacagtttggaggggctttcccttttaagtcagcttgcccaaaaggttagaaacattagtacagttcaaggatgtgcaagctcacacagcgtcaccccacaatcttacctcccccattaaggagtacaacctctggctctaagaaaacccaggacagtgtgtgctgctgggctgctggggccagaggaggactgaaatcactgaaggctaagttagcattcagagacgtaccttatcctaaagtgctttgccacctgacagttttccagttttgtactctgacctctctgtaggttgtttcggtttatgacatttctataacaagcacaacaatgtaagcattaccaatctcagattgctactaagaaagtaaccagaaagttttgttgtattttagataacaataatgacttcctcaccatggctgagtgtcagttcattatcaaacacgaacttgagaatcttagagctagagacgagaagatgatccctggctacccacaggccaaactgtaccctgggaagtcgctgagtaagtcactatccacttgcatctctgagtctgctcttaactctggttacgacccataaatctggattgctcagcaagttcctgccccggtatgttgtgccttcacgtcgcctactctctctgtctgtgactcacctggttcttgcagcgtctgtccaccgcatgtgctgttgtgtgcctttgggatctttggatgggacagtttctcatttgcattttcacagtactgatttttttggataccaagcttttcacatttcatctgcacgtgataataatgtttcaggtgctgggtctctgcccaccgccttctcctcagcctgtgttcagaaaacccaatctctttcctaggatgcagatttgccttgatttgatggcatttttctaaaatttaatcttttttgaccttttgttttaaattttggtgtactttttttttaggatgaattatcttgactttttagaaaccttcccccccccccccatactcctcaaagtgagctgcaacagttgtttttgtgtcttgcaaactgtattctagatgcctagatcaatgggggcttttactttttagtatggtattaacacaccatgctcaggtggtggtggtgcacacccttaatcctagcactctgggaggcagaggcagaggcaggaggacctctgtgagttcaagtccagcctagtctacagagtgagttccagaacagccaaaactacacacagagaattgatgtcttgaaaaacaaacaaaaaaatattttttatactccataaagcaagaagacacttccctagggcaattttcacatcccatgtttattttccccagagaaggatcatgagaagaagggagacataacttttcagtatctgaatgtgaagactggttgaggtttcgttggctctccttcctgtcccaggctgccgcctccccagcgtttctcttctgagaggcaccgatctagagaacactgtggaacaacggggactgtgcacagacacttaactgttgttgcagatgctttgcccatccaagcttctggagttactccagtgtgttcctttcctgggctgcttggtgccccaccacgaatctgtcttcatattgatgagtgtctaataccttttctccactgctttagtcgtaaagtaggagtggctcaggcatggctgtcaggtcaaaggtgtctgcgtctttggggacgaacacaccaagctgcttcctatgcctgttgtctctgagtcacactctggctttgcatgaggtcatctttatcaggactagaaagctcccaccttgttgcttggttagactgcatgtttgtgaatttactggactctgcagtgtctgataggctgtgaggttttgctctgtgtcatcagtgtgtggacaatggtgttctggtgtgggcctattctgacctctcctggtgaacccttcttatcttattaactcctgatgaacgccacttactgcttttttaaatgataggaatattttatctatttttattgtgtttttgaccatttctatttgtcctaaaatttaattttgccatttgctttttaaaaatcatttgtattttgttttgttttcttgatcagtcctaatcctggagattgttgactatggggattccatcatgtttctgaggatttgttgtctgtaaggtgtgctgtttgcttgtttgctttttgctgtgtagcttattatttgctgcaggaagatttttggcaggtttccagtgcagactgtatccttcacagttgctaattactctttgtttccttgtttagtgttgggtaaggctgaactcattctgtgtgcctgtttttatttatccttttgctgttagctctgctgagggtcattttagctgcatctggtgttaggatttatgtctttcatgcagcccaatctgcaggcttttctcctatggatatttccttgttgatgccattcagttctgtggctctggtggtcaagctctgggctctactcataccaggcaagccctctcccactgaaatgtaatttggatgtatactgtttattaatgacctgctttctgttgggctgtttgatgtggtgttgtatttcacgttgaaattgcttttttctgtgcttaagaagaagtttgtacctcatggtgtgtcttgttattttccttttttcagtgaaaatgctaggtaatgccaactttaaaatacatccaatcaaatttaacataacattttcttaatttctttgacttcatgtttgcattttttaacttatatcaaaagttaaattcttttctcttttttaaattaatttttagttgtacagaaaatggatgttgtgatattttcatacacatatatttctgacttcatgttcccttttccgtgaccctccattgctgcccgcctcctcctggtcactcttcaactgaaaagttccaccttctgctttcacattaaatttagatttgcatatgagagaaaagaagagatctgttgtcatcattccctgcccctcccatgactttttgctgccccctctccatgttgacctctccctacccattgcttagagggtccgagggccaaacttttggaggcgctacttaagtggctatacttgatccatttctctgcagttctctgtaggttggatcatggagtcgaccccagtataaccttggaggcacagatgtggtgctgtggggacaggtcctgtgtggaagcaagtctcctcatagggagcaagctcttggtacttggccagctcaactgtgtccacccatttggggacttccagattcctggacttcttgatgaaggctgccagagctctgacaaaccctgctgttttacattgtgtgacctaagcgctgccagccgaggggaagactagactggcttttgtgagtttttgtcttgggcaccatctgggtatcatttaagaaagatggccatcatctgaggaagcatttccacaactacctttgaagacttggtggtattgactgtgttctagaggtgtagattgtgtgtgtgtgtgtgtgtgtgtgtgtgtgtgtatgcatgtagggggctcttatgcactttctggaacatcaactgtcctagtggattgtgtatgtgtaggcttttatgtaccttctgcaacatcaactgtcctagacttatatacaatttttttcacctgtgtttctttctctctttgtaactttgttgatttggaatttgtagtcatttcatgcttcctcacattgctctttggagcaattccttctgttctctcagctcctgtttgcattttaattttggagatgtgtttgctggaatcccttcactatatcagcttttcctcgcatgacactcagcacggagacttcctggcactgtggcttccaacactgacctcctgctgttacttctctgcccattttttgctttgatttctcagtgctctcagtttccctgtcatgtatctttatcagtttctctgtgattagtacttaatattatttttgtcttgggtttttgagtcagaagctcagtctagagctgagactggactcaaatttgtagcaatcctcctgcttcagcctccctcatactgcaagtatgagccactgttcatttaaaatgaagcactgtatccccagattggcaattttggaaggtaggacatgggaggaaggggccagagtctccagcaagaagcaatgatagagagaggcttatactctgtcctgctgtgagttctcctgaggcagctgcattctatagagagctctggggaacactgttcttgtagggagcactattctagggagcactgttcttgcagggcttggccttgactcagcaccaaagctaatggccttcctcctggtggtagctagcaagacactatggatgtgcaccaagtattggaggctcatccatgcccccctgggccccaggaactctggaacaccaccactgtctgcctgctccatccaggttcagacttttgtttaccctctgttgaccttaaaggctttgtttcatgctttgtgttttgcatttgtaaattttagtttcataaaactttctttttaatgtttctggatctttttgtttttaattttgtttcatgaacaagtaagtgttggtgtctccagtgttctaggtaaccaagcatcccacattctgtatcaacagaatgttgactgatgtatttgcaaaaggatatgtgtagtctttctcattcacttggctgtgaggcatgctccagatacttctgggtggtgctgcagtagagtacagacagcaaggtcctggcgctgctggaagccccagctctctctgttcccctgtaccaatcagccaaccacctagacatgaccagttctacctggagtttgcacacttactctggtgtgtctcactgggagtatgttcttccctaagcccagcctagcttcctgtttggcgatgtcatcacagctcttgtgagcatgagttctcactggagatactccagaactgtgatgggaagaaaccttgtttcttataaagttagcccagctcaggtcctctgttacagtaacagaagagcaggctaacatgtgttctaacacatgtgacgtctttaacattacatggctgtgctctagaaggcatcagcatcttgttaggacatcctctgtgtgtaaggatagacaaagtggagtaggggggtccctaaaaccccaaacaccataatcagaaatgtatgtaagaatattcaaccattgaaatatgtgtatattagataacacacagcacacatgcatgctcaaacacatgcacattgtgtttggccacatgagtttgtagtctttattaaacaggttggaaatcaaatgagaaacacaggagacataggtatccctgggtgtagctgtcttccagtttggatggaagtagcctgcttaccatgatatccagcagccacaggaaggggctgcgctggtcaccccttgctgtggaaccctcccttcctcagctgtctgctgtctggccagatgctccgcattgcacagagcctgtcaggagtcctgggatccctttgctttggaggtgaacacatgacgtcagcccaaggcagctttggaggtgaacacgtcgagtcagcccgaggctgttggtattagtgcttttgctgctacggtgtccttcagaccaggccagcctttgattcccttggataagatagtagtaatctgtttgccatctggtggctctcatgagtcactccagcatggagtggctattgatgtggaattatcagcactctggaaggagggaatctaactgaggttgctgccttcttttgttaggcccaagcaccatcctattttcctttcaaggtaagagtccttccttgtaattacagtcaaagctgacaggaggaggctggaggtttttaaagatgccagctcctatttttagagctgaaaccaaaaccctgctctggcattggtagcgatgagaagctggcaatttagacttgaagcctctctagaggttccattcactgtcctatttttggagatatacaagcgggcctttgagcctggtggagagccttccataatggagttgtcttgtagagaagaacccgcaacttcggtgctacaagccagctcagacttcaaacactggtggagcagtggaaaacactgtgatggagaagaccctgttgtcgctgtgtaccctacacgaaggaccaggactcgggttgtaggtggttaagtcaggttagctaaagaaaagtcttcagaaatcttagcataaagaactgacaaaaggtcttgacagcatccaaagctgatagaactcaaaccacatgtgtatgtctttgcaccctcagagctggtccttccgactggttccttttccagtcactaagaaggggacccttcacagtagcttgccctttacttccctcctcctctgtggagagtctgagtgatggattgtaagaggactcatgggtgaggagttctcttttcctccagctaactgagatcccatcagggtgtgaaagtggtagccatgactttttaaatgcaaattccatttcatgaacaaccttgctcttcagcaagagactgtctcaaagactcatgggaaaagtgccccagctccccagcatggccttaggactgaggatccctccacactgcaggtggctctcggtacctacagcagataagagattctgggtccattgagcatggccaggaggcactgtttgtcttttccatattgtgtgtgaatgttccagtcatacttgtcacccagcctcatggagaaggaggagtgctgggagtgtgaagttcctgtttgtggatgtgtcttgtcctgaggttggaaagacagaaatgagtgaggatgctgccaacacaggagcatctcatctgcctcagaggaggtcctgtagccagcgaaaatcagagtactggggcagaagaattaatttaaaatttgccattggtcctagaaatcctattctaagtgtatacagtaagaaaggagtgaagacatagaataatgtatgtgtaataatttcaggatttgggggaggggtgttggggtgctggatcagtggttaagagtactgtctactcttcagaggttccatctgtaatgggatttgatgccctcttctgtcctgcaggcatacaggcaaacagagtactcgtgtgtataaataaataaatctttaaaaaactttgatataccaccactcaaatgatcaagagtactgtaagatatgtaagatgattcctgttttgtatttaaacatcagtatatttgtacataaatttcagtgtatatcttgacatctggttacatatcaaattgctatttgtagtagctatttttatatagagagaaaaatggaaagtttacatgcttctgatttatagtttgtatagtttaaaattttactcaacttttttttttgtttgtttgtttctttggttggttggttggttgttttgttttgttttgttttgttttgttttgtttttagagacagggtttctctgtgtagccctggctgtcctggatctcactctgtagactaggctggccttgaactcagaaatccgcctgcctctgccttccgagtgctggtattacaggcatacgcaccacggccagacttttactcaacttgtactgctttcatagtgagagaacatagtaaagatatttctagactgaagtacatcgtccacgttcagagctgttggggcagctgtgatgtgaccctgcacaggaaactgccacctcggtgctgaggtgtccttgcactgtttgctgaaggcatcctaagccatgctggtgtcttaggtagttctcacgcttcctccgcagtgaggagactgctcacgtctggcatcgtgacccaagtgttcccgctgcatgacactgaagccctgaagaagctggaggacacgtggtacactcggtttgctctcaagtaccagcccataggtatgtgtcactgcctgtgttcactgatgaagccgccatctgcccgatcagtggatcagtgctttcctgccagtgcttagcagctgcacggacaaggagatggcttggtggctttgttccttttaaaatctcatgtaggctttggctaaatttgatctacaacataggcagttcagagcagctgttgtgaatatacatcttctaaaataagatctcatttgtttttaggtgtgtgtgtgtgtgtgtgtgtgtgtgtgtgtgtgtgtgtgtgtgtaggtgaggttggggctgtcatgtgcatgtaggtgcctgcagaggccagcagagggcatcagggcctggagctacagtgatggcaattctgagctgcctgcaggatgtagtctagagtgaacatgggtcctgtgcaagaccagcatgcactcttaactgccaagctgtctctccaacaaaggtgaaccatgtcttcatatgaggatagcttgactgaatatttagtatttgaaattttctattcccagggagggggccaagctatgcttaagttgagtcagactcaatcctttattttctgtgaataagagtaactttcctggtatatattgaatattactttatggaaagctccatcaatattaatgtttaaacattttgggtcggttatgtgtttgagtaaactcttcttttcagtgctggagattaaatgttgagcatgctaggcaaatgctctaccactgagcacacacggcctttgctaagattttctcttttcttttcttctcttttcttttcttttcttttcttttcgtttcatttcatttcgtttcgtttctttttcttttttcttttctctctctctccttttttttttttttttttttttgacagtgtttctctgtatagccctggctgtcctagaactcactctgtagaccaggctgtcctctaactcagaagtccacctgcctctgcctcccaagtgctgagattacaggcgtgcgcaccgctcccagcctttgctaagactttaagcatggagacagtattcacgttggagcttcattcagtgttgttgtcatctcattttctttaaagcacatttttaaattttattttaagagaagccttctttctatattttgttcctaatcttcatttccacaaccaactatttacagtgttgaacaagaagtttaaagattgaacgctagtgagatggccaggggttaggatgccttgctgctcctgcaggggccttgactttgtttccggcaagtcatgttggatggcttgcaaccatttacaactccagcttcagggagaccaggcaccctcttcccacctccgagggcactgtactgtaactccagtcccaggggatctgtgatacctcactctggcttctgtgggcactgtatgcatgtagtgttcgtgcatacgttcagacatacacatatacataaactacactaaacttaaaactagaaagctagtaaaatccagtatataattaagaactagttcctctcacgtgccaccctccccccgcccccactccctcatcccattcttgttccagcttagctgctctgaggcccagggattgattcctcacatggccaaggttagcagagctgctgtatgaatggcctctttggtttgtcagcaggctgcccaggctacctcctgaccaatactcatatgaaggtgtgcacaaacatccttgtctcaatttgggaagaaagtatctgttagatgaagggcaaataagggtgaaactgaggtaaggcccctgacagagtcacttcagcagctgatgcctgagctgtgaacttgggaaatgcaaggcctgtcgggctggcaggtggggtttgtgctgcatgcagggtagaggtggtaccccacacaggatggggatggaggtgtaaagggtcagcaaccactgaaaacacacatctgcttatgctgtggtaaggtggccgtctttggtggcctgtaccttcagccctccccttctttcccctgcagacagcattcgtagctactttggggagacaattgctctgtacttcgggttcctggagtacttcacctttgccttaatccccatggccatcattggactgccctactacctgtttgtgtgggaagactacgacaagtatgtcatctttgcctcgttcaacctcatatggtccacagtgatcctggaggtgtggaagcgtggctgtgccaacatgacctatcgctgggggactctggtcatgaagaggcagtttgaggagccccggccagggtttcatggagtccttggcatcaattcagtcacgggccgggaggagcccctctactcgagctacaagagacaactgcgcatctacctagtctctctgccatttgtgtgcctctgcctttatttctccctttatgtcatgatgatctactttgacatggaggactgggccttgagtctccacgaggacagtgggtctgagtggaccagccttctgctgtatgtacccagcattgtttatgccgttgtgattgagatcatgaaccgcctctatcgatatgctgccgagttcctaacatcttggggtaagcctccacactttgtcccacatctccttgcctttaagaagtgttgcttgaggtcagagggtcagggagcaatgactcagctggtaaaggcactgtccttcattctgaggactgaattttattcccaagacctacatagcagaaggagagaaccagccgtgacctacaccatacacacacacacacacacacacagagctgtacacacatgcacacatacgtagcactcatacatgctacacaaaataaaagtaaaagattaagttgttgcttagatgtttgggctcacacaactgaagagtagatagcattcctctgggcttgctatggagacctaagacacagctcacctgtgaccttcactcatcttcagactatgactccatagtgctcttatccaatgcaccatgccaggttctgggtgcctatgaacattaggttctcatctcaccttctggtgtactgtgaattagcaactcttctatgcttttgtggatcaggaggtattgatgtttaccaaggcaccaacactatacagtatagtcagggtagttcaagcatatctgtgttaaacctgtccaataccataacattgtatgtcacgctgagggtaaaataaaacttctccagagcagctgagatttgcgtcccaccgtcattggcggcagctcaagggtaggtgggcatgtatgcatgcctggaaaaaagaaccaggatagagtttaaaaggtcataggtcattcagtatttgtccatgcaagcaaatgtgttgtgttatcctgtgggaagaggtctggaccttaacttagtagatgcaacgttgttaagtttctgtctgttctctagtaacagcggccagttttctcggggctttctttgtattgggtcatatgttctgatatacacagccacacaaggcagcagccaatccctacagtagggcaggaggctgcaaagcaggaggtagcatggatggcctgaggtcaggtagtgtatactagtgaaggccagtcctcactgcaggagtccctcaagatgttttctgttcctacttctgttgtcttggggccactatacaatgtctctatttctaggtgaggctagaatctgaattcaagttgttcctgtccaaggctccacacagagatgtgctgcttcctgcatagccattttacagtacagtagaggctcttttgtgggatagctgggtgtagactcatttgccaacacttcccagatttctttttcccatatctaaaaaaaaaaaaaaaaaaaaaaaaaaacatccccaaccacaatgctatttcagtggatgagagcgtgcccttattgatgttcttggatggctgtgactgacagccggagatgccggggcctctgagcacagtcccactaatttgccccatgacagcacacctacagtgcttcttgtctgagatagtcttctttcctcttcacattatagagaatcacagattggaatctgcctaccagaatcatctcgttctgaaagtgttggtggtaagtgttaatatcttctaggccatggcgtctctcagccagcgctgccctgctacctcctggtgtgggacaaaggttcaagtctgcgggcacaaagtgactccaggtctgggctcctcagtgtagtagtgtctttctgccatggttgcctgggtcccagcatctccatagggcagcagtctgaggctccatgtaaggaaaaggagagcaggccctgcaggtgctgctgacctagagaatgcttgcagagcagactttgtacatcacagcagggagcctggctgtccctgtgtgggacagggtgcagggccctgatctcttcccaggtgggcactgctgggtgagactggaggggctctgtgcagttcctcctcatccctgctcttgtccttagctctgtgctttgaacccctctcacctctggagttgatagttgagttcaggcctgaggggaaagggaagcgccccaaagtccctgtctgcggcagttttagatggattgtgctgcttcagagctcttcacactgttgtcttctttggcagttcaacttcctgaattgcttcgcctcactcttctacattgcctttgtcctgaaggacatgaagcttttgcgccaggtgagtgtgtaacgggatgctgagggaaggctgtgctttatgctttattttgtctgtttttattcccctttaaagaataagcattaggctgggcgtggtggcacatgcctttaatcccagcacttgggaggcagaggcaggcgaatttctgagttcgaggccagcctggtctacagagtgagttccaggacagccaggaatacacagagaaaccatgtctcgcaaaaaccaaaacaaacaaacaaacaaaaagaataagcattagtacctgctcagtgtattatgcttagcagagaagttagttaagtgactttcccaaggcagttctgattacacgggtgtccgaagtctgtgatctgtggtcagtgatgtgggtggttaggataacctttcacaggtcttgcaaatttcatttttgcattaataacatgttatacctgaaagaatagtaggtcctgtgtggtgctgcttcatgtctgaaatgtttgacagagtcctgcctgcatttatagtatcatagtttctggatcatataaaaccagtaactaataaaactaataaattgaattcaaagtattaatttttctcttaaaaatatgtattttgtttgtatgagttctgggccacatgtatacttatatgccaaatacctgatgccaaggtgggggtggggagacagacgagggcatcagatcccctgtagcaggaattacagatgattgtgagctgccatgtctgccatgtggtgctggaattgaaccctcatcctctggaagaacagccagtgctctttaccactcgctatctctgcagtccttcaaagtattgatttcttctgtatgtgcatacacatatgcatacagaggcaagtctaatgttgggtttttcttgattactttccactttatttttttgagatatggtctctcactaaacctggagtttgttaattcagcaggaccagctagtgagccccaagggtcttcctgtctctgcctccccagcactgggatgctggcagtaaccaccatgtccatctctttattcagggagtctgaactcaggtcctcatgcttgcacagcaggcattgcactgatggagtcatctccatagctcacacttctaaaatactttagtcaacagtgatccccaccctgtgaaacctggagttttgtagtaacatgctatagttgggtaaaatgacaaagattgccatcacaatgtcaggttaacttactttcccaagaactctggattgcctaccagccggccacccacccatccatccactcatccatcccaatccatccatccatccattcattcattcatcatccatccatccatccatccatccatccatccatccatccatccaccatttatctaaggcagcgtctcactatgaagggtcctgggtggcctagaactcgatatgtagaccaagcctccctctgcttccagactgtcaggattaaagtcatgtcccaccacacctagcccagctggtttcttctgatattcttcatgagttagaaaccttgcattcacacccagctctctaatgctcatgtttgtgacatcatatgatctgattgtagtgttggaggatggtacatgttgtggttttgctctgttcttgctgagttgacactcatgcttctccttagagcttggccacactcctgatcacctcccagattctgaaccaagtcgtagaatctcttcttccttactggctgcagcggaagtactgtgcgagggtaaagcggaaggttcaggcattaaagtctgaggtcgacacaaccttgtatgagcaagtcctcctggagaaggaaatgggaacgtacctggtaagtgcagtattgttgagttatactttagtgaacgtgtatgagcgtgtgctgtgagctcattgtctccaatgtgccatgcttccctctaagagcactgcagcgggctccctcagcaggagccactttgacattagaaagatagaactatgcgttaagatgcctgtgttgactctttaacaccagagggtgagggtggaagattacctggctgtttcacacagagaggtgcagggacgggtgctctagtgtgacagtgcacaggagagatggtccctgaagcagcagaattgctcacccatgactattaggacatcagattagtgccattataggttattagtttatgtgttgtgttcgagagagtctgtccaacatggagtcaaagatcaacttcaggaggtcagttcccacctcccactcagtcaaggcagagtttcttatatctgctgctccgcataccccaggctagcttagctggctgagagcttccacgccttctgtgtctgcctcttgtctcacaatgggagtgtgggagttacagatgtgtgtcatggatcctgctttctgagtgggatggatttggggactgagtgggtcgtgaagcctaagagtgtccttgttctgtgttgtcattgtctctgccccaggacagctccagaagacttcccagttgttttgaggaaatgcacgtggattattagaggtttagttgcttgtaataaaaacctctagctcatgaaaacctaactcatcctccactcttatctgctgacaagctctgaaccaaatttgccaccctctcaggtctctctgttgctttctctaggctcattgtgtgctgtacagaccacacacacacacacacacacacacacacacacacacacatactcctttacactcactcatatacgcacactcacacacactcatactcactgtcactcagcacactcacacacttctttactcacatactcactcacacacacacattcaaactcactcacacactctcactctcacacactcattgattcacgctcacacagtcacacacactcattcacactcatactcactcaactcagttcttcctcatttgagaatgaatggccatagggacacccagaatcttcacactgatctctcttgtactctcacatcttcttcctttaggaagcacaacagcagtgtgaccgtagcccacttttgtgtgtgatagcacaaacactagaattatcctgagcagaaatggacagtgcagtcctgttgttggttagtaaccaaaccaggaagtgggtcctagcctctgcctctttggttctgagtctgtgcttaccaacttgcttcttactgaagtcagaagtcttggcatcagatgctccctggctgccatgcaggagtctgaagtgttattgtgagtttggaagaaggaagtttgtcagagtctaaactattaaactattgtgaaacatggcttcccccttcactatagaaaactgggaaaatttcaaacagagtaggcaaggaaaatgaagcttctgcctcttgggctacggtggtccctggctgtcctgacctctgacctactcaaagcttccgtgtccattgctgcccctcccttgcacccagtgctttgggccatctcccagcaagctcactgtgaagaagctggcgagggttgtgcctggatgttgatcttctcttaaaacattttctgatttgcaaaatgcaattacttttaagggttctttatttatgtgaatatattgttatttcagtgaatcaatttttcattcttaatttctagcagaactcatggaaggatggtctttcccctcactcccttctcacagcagtcagcctctgtgatcattcagtgtggttttgctggtgtgcttatgctgggccacactgagctgggttgtcctgtggcaggtggggtcttccatccgctcacattggtggcagacttcaaacgagtttttctgttttaaagtgactggttttctgcgggcacgtgctctgaagctgtgcccgctgctgctctagccctgtgtgtggacggtgtcagactttgtcttttcccagcaggcctgctgagcttcccagcatgcccagcatttcccatgatcctgctgggctttcagcatgcacaactctgttttcttccttcttcctgactccaccttgtcactgttggctgttgtgtttgttttgtgttttggagacatttaaaataccttgttttgtaagagttttaaatcatgaataatattgaaccattttctttctgttgtgattattatctctttaattgtcttatcatgttgctacactgctcagcgggaatttgctaagattttattttgtgttgagaccataagctactcatctccctttctccatcctggaggctgaggcctcattttattgaccatggaacatgagtttggcatcggtccctgccccatggccttcattccatgcctgctttccttgagagttggtttggcactgggtacatacactcagtagggatggggtaggaaaggagtcattgggctgggcccctggaacctggactttgtcttcagatattaatgaattaggaatgtgagatcacgattttgactgacatcccataaccattctacatgtcaactcttaaggctgccatcaggtggtctttgctggccttcacctaagaggtcagggagtcttgggcttgtgtttgctttgctaagtttgtatttttctcttcttgctcttgggtttacctggtgctgcctcacagtctctcctaagtgtaaatgtactggcagtgagcatgtgggcacctagagtcacctagaactgcagtgggctccctagctagccctttggggtataaggaagggccccctgaagtggactctcacatgccagaagccacccagcccactgtggcatcaggagggggttttctgagcaagggaccctaacatttcagaagccattcaactgtctcttttgaggaaactgtacatctatatgatcacgacagcatgattccaaatgtgaaaacagaacatgtaatagaaacacaaccacacacacacacacacacacacacacacacacaccccacacacacttactctcacgcggttgggggaggggtcttctagtggcagtggttgagttacctattctctgagtgtgttgtctttgttttggttagggctttctatgctcactcatcaagctgacagctcttcctcagccatgctgtgggcaaaggtcagatgtaggactgtaggatgtgcatgtgtgcatgctcatatggaccagaggacaacttacaagagttggtcctctctttccatcataggaattttggaagcaaattcaggtctctgaccttagcatcaggctccttcacccggtgtaacatcttcccagctcattgtcactttctagttaaggtctgggcatcttgagtgcctatggataaggatccgtcctcccccttgagtgtgtatctatgaagctttggctgtccttgaactcagagatctgcctccctctgcctcctgagtgttgggattaaagatggctagcaaggatacatcttttggatcattaaaaacaacatgtttagatttggtgttgtttgtcttgtgttggttcaagtggatatcatcagtttaatggtttatatgtgaggaaatgggtaaataatttttgattccttatttcagcaacttagtgcaaaataacttttaaatttgtatgactttgtggttgagaagaaaggattggcatagatcctgagtcctttagtagctaaaagccatcccctgcccctttgctagcattggcgcggttattcccgtgtgacactgagcaatgcctctgtctctccatcgcagggaacctttgatgattacctggagttgttcctgcagtttggctatgtgagccttttctcttgtgtttacccgctagcagctgcctttgctgtgttaaataacttcactgaagtcaactcagatgccttgaaaatgtgcagggtcttcaaacggccatttgcagaaccttcggccagtattggcgtatggcaggtaactatgtgaagaacaatgtgaaaagctgagtcattgttggggaaagaaaaactctaaaagcagaaaatgtataatacccagaacaccactaaataccagaaaagaagctcaaaagtaatattgataactcaggtaagaaaagtgaagagtaaagacagggatcagatagaaaacaagtgtctgacttaaatctcagcataccaatggttacactaactataaatggcctaaatatacagattaaagactgagaatggcagagtggatgagactgtgatccaggtgtgcactgtttatagaaataattcacaggggttgataaacagggtgaaagtaaaagaaaaaaaatacattgctgagaagaaaagaggaaaaatgcaagcagaggctgctgtggtactgtctgagaggaacactctgccatgaaaagggggacacattctcagaaaacatcaaactgaaataaatgtatatgcatcaagcaacagttttaaaacagaagagagaacaaaagcttgaagagaaaggaggaatggtgaacccacattgtacttaaagatgaaaacactctctttcccaagatagaagaggaaagtcaagaatgaagaaggctcagtggcgccatcagcaggcagtgtctgacagaacatccagttatctcaggactgaaagcacttcaaagagttggagttgtacatagtgcacctttgacaataagctcaaactagagttagtggcagaagataacagcaggatatccattggaaaagcagacagcacaaaatgcccatgaaaagaaactctcagatgacactcaaagatatactaaaccagaagaaaaatatgtggggtgtggctgatgagggaggggccaggaactcacagcactaggcatttatgctgaaaaagatctcaatgttaaagtagaaaagacaggcaagataaacccaaggccagtagaagaaaggaaccaagaaagagccaatttagtgaaagtgaaggcagaaatatgatcagtgagacacaaacacagtggcagggcccagcaggcgcggcgtgaggtcagatctgcagacagtgaactcacacacaatgcacacacacagtgagctcacacacagcaagcacacacagtgagcataaacagtcagtgttctgtaagtcccactgaagcctggcttctggatttgctagtgccctacaaggactttggttcttgtccccaggaagggaccacatcaataatgagcttggttgtagctaagccaggtggaacatggggcttatcaaagcgggacggttttgtagagtagcttctttccagatatcacctgcttttgggagcaaagtgctttcctgtgatggtctttacattcccttcagaaacaagcagagacaggtagcatggacagtgccggaggtgcccacactcaaagcctggccagcttaggtgggaaggctggacgtactgcagaggagtagtcaagtcaaaagaatctaaaatgcccactacatacagctttcctaagcaaagagaaccctatcaagatgggcggaggtttagcatgtatgtagatggggtagaagctagggaaaggcaacatggagatggggtgtgtctgctgctgctcctcatgctgtgccttttccctttcagttggcttttgaaacgatgagcgttatatccgtggtcactaactgtgctctgattggaatgtcaccacaagtgaatgcagtctttccagaatccaaaacagaccttgttctgattgtggtggccgtagaggtaagtcaaagtgtccatcccagcacaggcctctgctgtcctccatccgagctgccgcgctgtctggagtaactcatgtgccgggcggtaagaaaacatgtctgactagagagtgtaggctgtgcgctgctgctccctgcccagctcacaggaagagacctttccagacactgttggactctctgtttggaatagacatctgcgtacttgcgtgttttctgcctgttctagggaaatgccccttcttgctttacgcctggtccactgcactgtaacaccctcaggctctgtggtaacttgtaggaaggcacatggtcttacacacaagacacaggtactctggccacatgtctcacatctctgtttatcattttggaaaaatggggccctactgtgtctggaaaactaagcagggaccaaacatgagtgagaaatcttcagagctgcctccactgctggtgatatttgacaccaaagaacattgtgcccttttgtgactagttggaaatgtaatacttgtggaaatgtacagaaacagaacttggtagactgtagagcagcatacccaaaaactctgggtcagggttgacccaagaaaatgaagttgtggctttgaatgtcccacttggaggctgaagagatccatctccatggtcccctttcttctgtcctatgctgtgagctcactgtgtgttctaactgcgtgttagctcactgtgtgtgtgtgtgtgtgtgtgcttgcacatactgtgtgtgagttcactgtgtgtgctcactatgtttatgctcactgtgtgtgcttgctgtgtgtgagctcactgtgtgtgtgcattgtgtgtgagttcactgtgtgtgctgtgtttatgttcattgtgtgtgtgttcactgtgtgtgcatgtgctcaccgtggatgccatgggtacagtgtgcattcaggagaataatttatagacaccactgagcaggaagggagaaagatggccctggtgggtgccagtatgttggtgttgagtttggggtatagaaccatattttgaagagccatttgtgaggtttattacctgtcgaagagagggtaaggaaaagacctgaaggctgcctgggcttatagaagccactcagcggggctacgggagcccgtgtgatgccagaaatgctgtgcagctttgccgcttgtttctttttttaactgaggccagagttacccaggctttgggcacgggcttcaaaccaccttggtacagaagaggtcagctgggcactggaagacagtttgcatggaggatgctttcccagccactgtgatcctcagtgtcacgagaaaggtggacctggctgccaggtggtttcttggttggcaagtgcttaaaaagagcgagaagggatgagagtcctgagagacacagaaagcttgacagtcgttctgtctgcacagcagcaccgttccaagctggaggatgtgagtgtggccatctctgtttctaccttcccttctctgagctttcatgggctccatgttgctgcttccctgggttggatgctcctctaattggatccagggcctgatgctcctgccttggctcgggtgacccttggctcggggcagctctgcaaactgccaggctccagttgttggtactcatacacctgagagttccctccccctggttggtaacttaagtatttttctgtgtcagtacaaaaatcaaccttggaaaaaatgttagatataacattacagcaataaaaaaaaaagtaagttaaccagttttactgtagcactactgagacagctgtatgccatatggcctctctgtaaataaaaatggagcatttagaaataaattagaaaacgtaggttttggttgtgtgatcatgtcagtttataaagtcatgttgagattcagttcagagttagaaggtaactgctaggcgacatgaatgtcagtcagctcagccgtgccaaccactctgtaatgtgtgtgcgattcacactgacccgcagctgtgcacagcttttgcttgtcagttctactcaacgaaaaactaccactgggtcaaactactttaaagaaaggaagtaatccattttctataaagtaaaatcattaatttatatcattccctgttttcccctgaagtttttgttgctgtttgtttcttggagacagggtgccatgaagcccaggctgtccccaaagtgtctgtgtagctgaggatgccctgaaccatgactgtcctttctctgtgtctaggtgctgggattacaagcgagcttcaccatcggcttttattagcttttgaaaatgtctatctcacagataatactgcatgttttactttaatgtatttattcatggtctctaagtaaaattttgctcatccaaaacgccacagcaaattataaaaaatacataaattatgttttaaataaaaatttaacatattgatagaaagaagcaatttaaaatgttacatttcaaagtcattagcatctaagtgtatttatgtgattaagatttgtcgcagaacaaagaccttttggaaaacagtccctgtgataaactcggctgtacttgtctcctggcctcacacctccaaccccagataacttccacacttctgcttctttctgatgcttggatttctttagagttggatccactgcaccctccaagcatgtcaggaccaacagtgaaagctgctgtggcgtctgtgtgcttactgccacctagcgctgcccttagagacatggctcgtgacacggctttgtgcaatagatttatcggggatggacagtagacctgagcatgaggggagagcacactgaatgtgaccgttttatgggttaaagtttgatattggaaataccatgaacatcagcccacagatcatgttccacagtcccctgagaagccacctcatgcctgagacatccttttgtctctgatgttgtttccagccgagggccacgcctgtaagtgcagagtcacagtaccagtggaaacagcagtgggccacacagtccaaactcctgtgtggaatgatgtcccgttatcttgtgtatcagttatatcagtccgatatgccaaatgctaaccatttaacctctaaatgctaatcctcggaatgctaacactctaaaggcaaaagtgagccaacagtttgttgggagattgactgcattttaggttctagtgactagtgaatccgttgtctctgttcatgcttaattactagtttgaaaaatacccctttaaagcagtttcttgtgggtatgggagaagtaagttataggatgcactcgccccctactggttagaaatggaactgcgggtcatctatgtagtatgctaagagaggaggacgggtttttcctagtttcagtcataatatagtcagctctcggaagacagctgttcaggatttactcactttaactctttgttgaatgtgttgccccctctctagagcagggtgggccacgatgtagattgctgtgtcctgtggttactgtggagtctgtcactgagccaccacttagagcacccaccctgtcctcagcgggatcgaggtgtgtcagcctgccctgcagagacaagggtttggagtgagcagggtttgctgccacctgtaacggtgagatccgagggggactgcttgtgtgagagagtgagcacagagtccttgtgacgggagacgggtgtgatctgactggtgtgacagtgccagccctgtcaccatcagttcttcaccaggtcatcacagcagagatgtctgagtcagagtgtagctgagtgaccacctaaggctcccttctctgagctctgtgaatttctcctttcagcattagtgcgagtgcccgtgctggccatggcgtgtctccccagcccacgtcttgatggttgactgtgtcacagtttgctctcatattagtttcctgctcccctttctttttcttccctgctgggtttgcttccacacctcagtccaaccttccctgccccgactcacccctccttgttgttggttctgactctgtccaggccctcagcattggctggagccagggtcccgctgtttctcatctgtgctctgcagagtgtcagttacgtgtcagtcttgtgtcaaacattacatcactaagtgtgctgtagctgttctctgctacttcatgggttctttcgtccacccttctctgcccattttccattccatcaaccctaaacactagagaagagagaaaaaaagaatagggagggaaggaaagaggtacttgaatagtcaggggtctgaaaggggaactgtgttatcattagactactttttgctgatgaggggcatcgagttccttgtcgaaagttagaacttcgcagtaagaatatctaattatttccctccttctcttcccctctccttttttcttctttcttctttgtggaaggctacttaaactgcaaccacccccaaacaaacaatcagcaacccaccccggctctctggaccctagcatttatatactctctgaaaaattcccagaattccaagcattgcaccccatgggatgcagctggcagaatcacgcctctgctagagcctgaggcaaatcataatcagctgctatgaagaaaccccatatccccagacctaggattaaaacaaaaacatattcttacaatgtttctgttgtttttaaagaaccccaatttccagatttctgactatagtatgcagtttagcagttctcacctgggcgcttacaaccagtccccactaggcttgctgtgttccagctgcctctttttgccccacagtaatgcacaataactttactgactggatttagtgacacacactcctgggtgtgtctgtgagtgtgtctccagacatgggatcgggagggccctgctgtaaacagtaggtttgcaatgcaatggcattactgggcagtggtgaaaggttggagatgaggccaatttagtgcagataggttcctggagtcacgtgataggttgttctggtttcttcctgtgtgacctttctctctgcttcctgttcaccaagaagtagagagtagcttctacctcatgttcctgccgccaggctgttctgcccaagcaaacggagtgaggcagccatgaactaaaccctctaaaccatgagccaaagcaaagccctgctcccttaaccccttcacctcaggcgtgttaacagccccacggaagtgatggcgcacccacactgtctgctcatggtgctgttctcccgggatgatattctaaccacgtctgtcctctgtgatgggaaaggctctcagtggttcccctttgccttccacctgccctggttcctgctctaccataggacacctggtgccctttgtgcagctagcaggacgctcacacaactgtctaatctccattgtttcctctccaagatggagctccccaggcctgctcaaggaccaaagctccccaggggctgacaggcgtgtgccaagtcacttcatgaatggtttctagtgatgaaacagttcttactaagaatttgtacaagggcaaataaatcacagggtttttttcctccctccgtgttctttgtgatagttatctgagaaagaatttcagagtggtaattggtaagcttgctgactgtactttttggaagaatattaagaaaacctctaggcaaaaatcttaaaattctattatttgtaagaataccctgtaaatttagaacatgtttagtggagctggagagatggctcagaggttaagatcacatcactattgcagaggatccaagtgcagctcccagcacccgcactggacagccctgggacacctctgcttgttttgataaattgaagtacctgcagaaggattagctacttggaatttgccagctgacgctgtccttttcagaaatgcagatcattgtggttggctttattaaactctgataatttaattgcaagcttggccaggaagagccaacagtcaactgttcatggtgtccacttcccaggggggttgttgttgttgtttgtttgtttttgttttttgtcttacatgtgttgggttctagctcttctatttgtgtccttttggatggaatcatgagctagattttcccctaacatttgtgctttggttttgagtcagggttgtgagctagcccacaggtgtgagtcaccacacccagcccgtcttcctacttctgttttttttatccttgctggtcattttttatgttttctagtcttactctaggctgcccccatcttcagttttttatccagttaaaatgctctgtgttctgtggttggcttaaaggcaggcagggcgggttcttccatcagatgcatatttattttatgcttaagacgtaccaggtgttaagaagatatgatcctagctttggaagcatctgcagaactgcctaagagagaaattccagtgtggtaggaggcctttctctaacctcatctctagatggcgctgatccccgtgcccactagagggtgctggtatagcagctctcccagcttctagatgtagatgggatgtagggtctagggacagagtctgcttgctaaatgcttatgaaaagagataccaccaccaaaacatatttggttttgcatggcatttttgttactttaattgatataatttaatgaaatgaaatgaaaactgatgaaagcatgtgctaaagtagaagagccatcgctgcagtgagagcctttgggtaaagtagagctgtcactgcagtgagaacctttggaaggactccacaaagacagactgccatcagacaggataaggaaatgacagttaaagtgatgagagggaagccataaaaacctgggcacactctcctatggcttcacactgctgccaagtgtctgtcaaggttttactcttgaagccttggatttccagtcaccaccatgggggttgtaatggttagtgttgactgctatccagctggtatttagaatcacctctgtgtccagaaaggtacaattgaaggaggaccctccccctccccctcccttcccccagtgtgggcggtgccttggagggctagggtcccagcctgaataaaaaggggaaaggaggcagccactgagcagccacattccttcagctgccagcgccccctcatcctgccatggcttccctgcatgatgagctgcactccagactcaacaagacacttcctcgtgcatgtaccccacaatgcagaatatgaagaaccttgtgtccttgtgtcatctgaatgggcttcctggggactgctgtcttaagggttggcctttagtctctgtgaatggcagatgtttgttttgttgacaacccagagacctctcaacacttatgattagagcacactcttttttaaagtaacattttgatgacaattttttagattattttgcatttttaaggtattatggtggttaacatatttcttgccctaaaatataggcaaaggcaagcccctcactttggaagtgatatttttttattcacagtagcatggtttcagaaaatatactaaggtggggtaagaatgtaagcactgggaagctcacagcccagagtgtctgagtcctgctgtgaagcaggagagcagggtggaccctcaaggaatcatacactgtggagagcatggtggtctagctctgaggacgctcaccagtcactgcctcttctcagcctgttnnnnnnnnnnnnnnnnnnnnnnnnnnnnnnnnnnnnnnnnnnnnnnnnnnnnnnnnnnnnnnnnnnnnnnnnnnnnnnnnnnnnnnnnnnnnnnnnnnnnnnnnnnnnnnnnnnnnnnnnnnnnnnnnnctcccaccttccacagctccccaggtctgtctgcttccctttgccgaattctttggcagctccgactatggtcccagctcttggcacctgccacccatgtgttcctgcagcgctgcagagcagctggagtaaccagtgatacaggaatgctctgcagaacagcgatttcctgttcagcctctgccctcgtgcaaccagatctcatcacaaccctggctgagggtctgttctagaggagaggagacaaccattcgtccctcttcaggaggtggcggcacttcagagtgaccattgcagggctcatttttttgagttttttaccttggtttaaatgttctttcagtgtttaagatgttggttggggtctggtcaggcactgcctcagcggctcatgtttctgttacatcaccatgttggatttgctttctttgctgagcctctgtcactctgtcactctgtcactctgtcactctgtcccttcagcagatcgattgctcagtagcttcagaggggctttggcttcttttgtggaccccaaggtgccatgatgcagacaggaccagaagttagtagactggcattatgtgtaaaatgcagctgcctgtatctgtccctggctaataaacactttcccagggacgggcatacattcagagttgtaaagatgaattacagctttctaacattgttaagtgccaagaggggcaaagggtctgagtttttcgttttacatatattgggtaaaagaaaaaaaaatgaatgtttcaactgaaggtgtgtgcgcctttgtgtgagtataacatacttgcgtgtgtgtatgtgtgtgtgtgtgtgtgtgtgtgttgtaagttgggctcaagctgagcctgaaagtcaagactgcctctgacagatcgggcgcaggtggatgatgagctgcaaaagatacagacactgctgtccttaagccacgggcactcatgcctgggtgaccacacaggcttcccttgctctttccatatcaaagcctcacgcagaagctaattggtaccatctgtgctgataatgaagtctatgatgtggctaccggtgcgaggaacttgctgaaggggtttcacagtcagggtgagatgggagcagggagagtagttttgtggaggttcagtgctaaccagccatagaaagggaactgaaagaaagagcagccaggtgccaccccacgctgagtgcgtgctcagtaagatgtgtgacagagtgctcacatccccatgtgttaaagttcccctgagactgctggaatattcatcctgcccaaagtgggtgcctcctctttcagtgcttctgtcctctgcctctctgcctctctgtctctctgtctcacactcacactcacacacatacttacatacactacacacacacacacacacacacacacacagaagcactcaagcatgtgtacaaattcacaagtgagaataacaggaggtgttagttggtcattttatcctgagaggaaggacagatcctaggcattcctcctcagctctcctgtattgcacacatcttagtcaaggtttttagagaaactgtgctcctccaggggaatcggtgtgagagtgcacatgcatgtgtgtgaggcacatgcatggcatagcacatgtgtggctgtcagacagtcacaagtgacactcctcaccttccacctcatttgagacactcttgtttgctgctgtataccccacccaggtttgctgatccgatcactagctgacctgtctctgctgataggattcggggattacacgtgtgtgctcccacatctgtccttaggagtgctgtggggatttgaactcacatccccacacttgcacagtggatactttacccactgagccagctccagcctctgtattttcatgtggttaccagtaggaagctttattggtatctgtcttttgacaccatttcattttgatgttagtcaaaagcatatggaaactagagaggcatttccagggaggagtgtgctttccgttaatccacgtgtgtcatctttgaatagtaatgcagtcatatgactcagaattcagaaggctcaaggtcatgcatgcattagtgtaccagccacggagtccctgctgcacagcccgtaagcccggctccctgtcagtgcatctgtgggtaaagtgcagatagcaagcacagctaatcacagtggtcgccaagcaggctgcagcgcatttgcttcatacttgattgtctagtagagatgagagtttcactggcagtctcaggggtgttgatgtaaaggaatgcatatgtcagctgacctgatgctattaagctttagaatgtacagcctatggtgttgcacaaagcagatctgaccttttctaagaagttcttgtaccatgaatgattgacaggctgaggaaggtgattagcatagctgctgtctcaagcctgggccagtggcaccgacagtttgacaagattggaaaactgaaaactgcctgtggataacaacagacattctgccttgctttcaccagcactgggaatgggctgaggccagagccaggggaacatctacttgtggatttattaggttaaaaaataagaacaaaccctttagaactgtccgaagactagcagctttgggtggagaatcatgttgggttttgttttgttttattttttgttttttgtttttgttgttgtttctcagtacaactcagcaagtgttgcattaatgagctcttggaactttttttttttttttttgagacagggtttctctgtagccctggctgtcctggaactcactttgtagaccagactggcctctaactcagagatccgcctgcctctgcctcccaagtgctgggattaaaggcgttcgccaccacccctgcctggcctgagcttttgaaactttaagcttcaagatgaagtaactaggccgtggacctacactctgacccgcaggcagagggtggtgattctttgatctgcctgtctttccagcttttagccccacccacactccctccctgctggacttacctccccccttgcccaagctcccttctttatttccttcgataattgagatattcttttcttatatgaactagccagctgcaacgcgacagttgctgtcatagccctccatcttgctctgttcttctcaggcctttgatgataacttggcctgggaatgagcaaaggcatattgagctgctttgggctctggccctgaccttgccacaggccatgtaggcagagtgcagagagtacatatccagtggaatggaggcacgcaggacacagcacatagagtgtggagcgtggatgagctcacaggagctccactgttcccggccgtcccactggctcagagattgctcaggaatcggtctttccttccgtctactctgtctcctggtgcacagcacctgtcttctcacctatactcagtgagaatggcaaggcagtgatggttgctgagttttctaactcctgggtagaagttgaagtttaaatgctgtgttagaatgagggcaaggagaggcagctgagttttttccctctagggtctgctgatctgtgctgaaactgggtgcagctctggcactctgacctctcctgatcgtgatgccattcttgtccttgttgccaaggcacaggtgtcttggggctggcaacgaattgacagggtatggacagggccacattcatggtgactcttgggaacatttctgtttactgggtgaaacatcaccagacttggacagctgtcgactccttcattatgtttgaattaccatggaaacgacaaaattgtgagatcacacgttatatttttatttttgagacctgctatatatatttatacaaattagaaagcagagatatacagtaactttcatttcttattttaaaatattaatgtaagggctgaagagatggctcagtggttaagagcactgactgctcatccagagatcctgagttcaaatcccagcaaccacatggtggctcacaaccatccataatgaaatctgacgccttcttctggagtgtctgaaggcagttacaatgtacttacatataattaataaataaatctttttaaaaaatattaatgtaagatgaagcttttagcatgcacatcaaaagataagtgtatctaagccacgaaaggcccgtctcaccttcattatcattaagcaacattttaggctatgctaacctataaactaatattaagatgatgggtgtcttgctgtattcttggaataaaataaaccatgacttggaatttaaagaagttaagaccaggcctggcagcttgcacactactgctgatcccaggagacaggaagctgaggctgagtcttgtgagagaaaggctagctcagtctagatagctccaggtcagcctgggctgcacagtgagtacctgtctcagagaaaaagaaagtaagttgaaacagcttgttcaggctggagagatggctcagtggttaagagcactgactgctcttccaggggtcctgagttcaactcccagcaaccacatggtggctcacaaccatctgcaatgggctctgatgccctcttctggtgtgtctgaagagagcaatggtgtactcatatacattaaataaataaataaataaatcacttaaagaaacagcttgttcaatgtagggatttagtttgctgtagatgttggttcttgggaatctgtcatcttggttttttcttcaaaatactggaatatggtgggtataatcatacgttagaatgcctatattgtgactacagacatgtatgtgtgtgtgtgtgtgtgtgtgtgagagagagagagagagagagagagagagagagcgctgcgtgtacaagtctcagttccatgtggctccaagcactcagcctccaggaggctgtgttgtcacatggttgcagtggcctcactgggaatgatttcttgaggtacctttactcctacacttcaactcttgatgccagatttgagttcccattcaaatgtaggcccagggctgttcctgctgggtttgggcattgattgcctttctccatggtgccaaagttcaagaccatcgtgtctcttaattgtgtgcagggcagaggttggggccgtctcatcagccttccactgtggggctggtttttggtttttgagatttttgtttttagaggctgtactatgagtcatgaggtcggctctattattgcactacagtccagagctctgggacaatatttttatgtctagaaaaatgcacttattttggtggttttggacaattttgatttcaacataatatattcactgataaactaagaaaagtgtttcattttctgtttggtttatgatatttttaatattatatgaattactctcactctgttttataactaggtctcctcaaaatctgttctggttaatgtcatagtaatgttatagtaactcttgatatattatccacagagcacatgccagacatggcgcagtaatttaaatggataaagggaattccgaaattaaatttttataaatatacagtcattgacaaatgtaaaaactttcttgcagaattcaccacacagacttgtccataagtctgtgatttaaatcctgtgtctatgtgctctaagccactgaagagcagtattgagtgtgtgtacatacatgcatatgtgcatacgtgtgtgtattgtgcttgtgttggtgactatgtattcactgtatagggatgcatgcatttgtatgtttctcttagaaatatattattcatattgttgaagtaaaatatcagaatttattttagagccagagagaactcaagaatctctattagtacttaaaaggaggctcagaaaacaatgcagttgctgtattttgtaattctatggggtaatctaaataaatattcaaattgttttaaattgaagtacagcatgtgtagataggtaggtaggtagatacaacatacatgacaggcatccatccatatatatatatatatatgtgtgtgtgtgtgtgtatatatatatatatacatacatacatacatatgtatatatacatacatatatatatgtggatatatatatatatatatatatatacatacatacatatatatgcatgcatatatacatgcttacatgttgtggatattgagcttgatgaagtttgactggccgcatttgtctgacagacattttcccaaagcctctatgtcctttctatgttttttcagttagcacttgttggaattattcaagatgctctgagtagattttcctctggctggttaattcattatctttccctgctctgtgatgagtgctgttcatggcgggcagcaagtggcagtgctccacagaggtgttgtgtcccaaaatagtcacacatactatgactttaagtctagtgaagaagttgtcaaaagtgatggttaatgagtgagactaataaaatatagagacttaaacaggacagaacaggacaatgagtgtgtctctaattctgagcatgaatctcaaacgggagagaagattttattgtctgtatgtccatcgtctctgactgcagaaactctgttggtactcattacagtcagtcctctgtgcacagacttgactgtttaatatccctgggtggatgtgtaagtgtgtacactgcctgtctctctcaaaccagagcaataattctgtcataaaacaaatagaataataaattgttcctggtggggagatcatgctgaagtcatgtacaaccaggagacctcgatctggaagaaatagttcctagaaaagctaagtctaggccggtcagtggtggcgcacgtctttaatcccagcacttgggaggcagaggcaggtggatttctgagtttgaggccagcctggtctacagagtgagttccaggacagccagagctatacagagaaaccctgtctcaaaaagccaaaaaaaaaaaaaaaaaaaggaaaagaaaagaaaagaaaaactaagtttctttaaaagaaaaactaaggctagaacttacgctctgtgagcgtctgccctattgatcttgacagcagaccagaatggatttgggaagggcctcagctctcactgctcctaccccttcaccacaacaagactgctttgaggaatctataaagagatttctctatcaaaaacagcaaaagtgcccctacagctaaagtcacatactcagtggtgtaaggctggacactgcctaagatcaggaatgggaaaaagatggcaactcaaacttgagcaggttctggaaggctagctgaggtgttcagtcaagaacacaggacaaacacattgtttttaaagaagtgtaccactgaatgatagacagaacgcaagctcttctgtagacaagaccctaagtaatccagtgttgcaggaagtattaaaaatccaaacggcatgttctgagcatgctctgagctcgtgccggcaactctctgccccagcggcctggccagacatacactggcggacaatggctgacctgttcttgtctcgtagagactctctggcccggagctcccaaaacatctccacccagcttgctaagttcctacacgtcagccccatgcttcagatcccccacagcctttgcagtgtacctcaggcaaacccacactttaatgcaacctttctctcttgaacccagacaagccactgtgtgaaggaaaacacaacacaaacttagttcagaaaagatggtaactcaattgctgggtacaacaactaaaatcctaatcttgtaagccttattaaatctaaatcttcctgtatcaaatcctgactgatccacaattgaaatgggaaacactcgtagctacatcttgtcttcacgctatccctgtcccaaaaaacctaactctctcctgcttcctcacttcctcagtccaacctggaagtccctcctactcaccaagtgattggctcctttattaattagggtattggttcacaagaagtcacctgagtacgtgtgtctcattcttgtccacataatccctcccaggagagtggaattagcatcaaaatacaaacagcaccaggcctatccacaatacatccagtgagaagcagatggaatgaacaactgtcaggaaggttacagactctgggaacagcttgggaaagggaactagggttctttgtggcatccaacaacacaccatgagtgaaatgaagaacacagttccagggctggagagatggcccagtgttgtaaagccttggctactttcccagaggacccaggttcaattcctagcacccatatggaggcagacaaccacctgtaactccagtttcagaggagatgtctggtttcttcctgcttgttcttgagttgcagaccttcccgttacatcaggatgaccaaaaaggctttgtttgtctgaccacattagcatctaaggcagtggttctcaacctgtgggtctcggcccctgtgtgtgtggtgtgtatggttccatgtcaggtatttatattacaattcataacagtagcaaaattacaaatataaagtagtgacacaataattttatggttggggtcaccacaaaatgaggaactgtgttagtggtttgcagcattaggaaggttgagacctactgccctaagagaatctgttttatgagtttagcagatattctcaactgatggagaagtaattgcccagttgtgagtttgtaatcgaattgctgtgagccccatggctgtcgttactgagcctaatggaggggctgaagggaaacagagccacacatgccataaacaaggctgttaactctgtagccctgcgctgagtcatcttgacggattctttaatgatgggataagagcagaccctgaccgttgccccggccccacagtgtgcatcttctctcttgtgtttgaaattaatatcttaatttggagttctgtgttcgatattgaatagtactttcttctcagatgcccatggactgtgtgccatctttgccacaggtgcagcctgcagactggttcaaaagtatggcaagcgtgtgttttcagtgtgtgttttcagtgctttgagataagcattgtgaagcttctgaagtctggtgctgctgtgctgtaaacacactggctcatggtctcctgatattggccagcttgggtggcagtcagctggtgcggtgagtgacacactgctgcccagggacttaaccaacaggaagttatccacctaccattccagacactggaagtccaggatgcaggtgctggtacagcaggcaggtctcagtccacactgagtgcataagctttgtgatgcccgttcactagatgtggatccggaatcaggagcacactgctgtgaatggaatcaatcgccttagttactgtatgcccctgtcttcatacacagtcaccctgggagccgggacttcaccaaagaacccatctgagaaatgtcactgcacagtcaacctgaactagtgttgaagcaggaagctgctctgagtttcacacttgagtattaatcacactacgtgaccttaacattgagcacgattgctcctatggaatgtttgatctttagaagaaaacatttttaaaaactggattggacactagaaaaactaatcaggtagttgattccttcagaggcctggacataaacttggtgtgattatagcaggtaagtgtgcacaggtgtgtctgtgtgctctggcctgctgtcccttcacagaccccaccaccctgtaggaggggtaggcagggctttcctgcccctgcttggatgtggtttttactgctgtgcactttgaaaccacacacatgcttgacatttccctatctctttggggattgtttctttccaacctgccactgctgcttccggtttaactgctcatgggtcctgcctttgcctcacatctgcctcttgctcgctagcttccttgcagcatgcagaccttgcatggcaccactatgctttttatctcctgtctaggtgtctttggaaattctctctcacctaatttttgcttatcagaggacctcgtcgaggactcccctccctatccttcaagatctagtccaaacatagcctttcccattttccctaccttcccccaaattatgatgaggtgccacatgtgttagcagtaccccctctgctgacagtttctcagaatgggagatgtactgttctcagtgttggcatcactgtggttctgggtcatacagaagatacacagccaggctgcagccaagtcagctgcaaagagaatagagcatccctgcccatgtgctctgagaatcagctgtgtctatggccacaccacctggacctgcttcatacatgagcaggtgtgaggtatacattgagggacatagatatttggctttataaagtaaaggtgattttcaggcagatatgggtgtcagatgtcagaccaacatcagttccataagggagaattgataacactccactgtacagcttagcaggaggtgtctcctagaggcaggactccattaaagacacttggtgaggttttgcaccaccgggtgaatcagtgaatgccctatgatctctttacttttctctctagctggggagctgcagtgagaagctaggcagcaggatgtgtgagtggcttcttctggaggcaccgtggcacttgtctttgtgtgtgtgttgcactccattactatgttggactaactgtgttggtctgttttaactgtctctctcacaagacttaaagcaataatcccccaaaatgaaatcagtcaaaagttcacgaggctttgtgtgttgcttatacaaattcactaatatcacaataatcaaatagtactgtctttgtagtagtcttctaactgagctacacagggtaatagttggttctgccttaagcttgttgtgattgtgctaaccataaatataattgcttctactatgagaaagataacttttctatatttctgtctacttaccatgcagaataaacaaactctggccaattgccacattagtaaaaggactgttattggcagttttttctgtatatctgatgggttttaattaagcatttactgaaccacatacttttaaaaaaatttttactccctccctccctgtttccagcagcaatgcaaggattgggggaaagcatctactccatccgagtcagtgcacagtctcgtagactttaagctgagttctttattataataattatagactcagacatgattgtaattatttgtgcaagatttcatggactgcttatccagtttcctctaatgggggtgtttacagaaccgtggggtgtcaaacagtcatagagtcaactgatcttgtactctgtgtgtatgtatgtgtgtgtgtgtatctttgtgtgtgtgtgtgtatgtgtgtgagtctctctgtgtgtttgtacatgtgtctgtgtgttatgcatgtatgtgtattgttctcttcagtgccattgcatgtgtgggtttacatgcccctagccacagtggagctacaacagggttgtaactctgtccctagtctctttgtcaggtgacagatgtagtctccatgaccctttgggaatcagggccagttcgggttgtatatcctaaaatcaaggtgagtgttagttattttgtcaccgacatggtgaagcacccagcagcccaagtgggaaaggtttgcttggttcgtggtctgaagtgtcagcttcctctgctgctctcaacctgaggccaggcagaacatgaccagggcatgtgcctgtggtggaagaaactgtgtcccacaagtgccatagatcagggagatgggactcagggactaagataagacacactcctcagagcgcagcacacacacagacacagacactgacacagacacagacacatgacacacacacacacagacacagacacacacacagacacagacacacacacacagacacacacacacacacacacacaaacacagacacacacacacacacacacagatacagacacacacacacacacaccctccctcatccagagcgaagctgacccacgtgattgttccctctccagggcccagccctggtgactaacggttccacttcctatacagtaaatgacatgtagtggaagggtttattctgttcagttaagaggtgacatgtagtggaagggtttattctgttcatggtttaaggcatacagtggatcatggtacagaagcatggcagccaggacagccccaagccaaacggcaccaggcaatggaaacacatggatcaggaagcagggccaggctgtaccccatgccccaccctgccccaagacctatctcaggggcctccaaaggctccactgccttcccaaacagcacacaagcctgcaggggacatcccacatttggacagtcacagggatcaaaccttccccataggagcctcaggggcacttctcagatctgacacacagtagggcaccaaggtgtgatatccagaatcaagatttctgactgtcagtctgatctccatttccaaatactttgtctttttaaaactactgtgtaaatgaaaccttcaaggtgagtgtcattcatgcagacctgcccagagagtcttgtagctactacactagttcattgccaaatttaaacattcacccactgcaggatgggggctgctttgagccccgtgtagtccaggtaaagctgctgtgagcatttttgtacaggttcccatgtaaatgtaaattttcacctcttgtgcacatgaccaaaagtagtgctgccgtgtgattggtctatgtgaagctgttgagtgctaggcatggactgtgcatgcatgcagttgtcatgtccgaatgtctagccagcctctccactgctgttctaacttttgttttcccggtggcagtggatgttggggtcgtttcaggtgtttgtcattacaaagctcttcagtagaatgtctatctttcctgtcctttctaactggatttctttgcctctgtgtttgaagagctgcagctctctgggtggcaattctcagcagggtgggtagtctgtcagatatagatacaagctgcagaggttgtgggctttgctgaaatcctcttcatggcttacttgtgtttgactgtttttgaaacaccaggagaattaaagataaaattgaagcaccacccattgtagctgtttgtttgttgtttgttgttgttgtttggtttgtatttcttcatacttgcttcctttcttctcctcttactcactcttcagaaatagagatggtttcttgttgtgaaaagtattaatgattattgagattacaattaatttgcaggttcttcagtaagtgttgtttcccttccttttacaaatatgcagagcccttgctccgcttctccacatgactccagagtggcttctcattagcatttgtgtagcaatgtgaacctccatatccagaaccacacgtgggtggaattcgattttgtcccagttattggtggtaacatgtttcctagagaccatacgggatttctctgacactgtgtatttgtgttctctggttccaacaagcctgtcctcgtgtgtcaagtctatcttcgctcagtgcctcctgagcttccatgcgtgagagggtaccccttccaccctctgtgcctctgtgacaagcggggtcagccttagcagtgaagcatcctggctggtgcagcactgagccccagcaacagaagctggggagtgggcctatgagggagggaaccaggcagttcagagctctgcccgcaagttggttcccttcctctaaagatggagttgggaagaaaaagtgccagcctgcctgcctacaagagcattgtaggaacacctccatgtatcctttcctctgtgtggaggagaaggccatactcgtgatttcctgctgcacgcacatatctcacatccaccctcaggtgagaaggaaatgacaccaagtccactcacgtagggcaccctgaagcacactattctctcgtgaaaatgaagtggcccatggaatcctccaccagtgggaattagagctcactcggtaccaaggcctgtgtggtgccagactctcggcagtgatgatctgatggtaaggaggagtacttctgcactcatggtgacatgctcctggaagaaggcaccacagtgagctgcatagaaatgcacaaatcagtgacacatgtgaggggaagaaatcaagtgagcaactgaataggaagtgtcctgggaatagtgagacagtgccaggaaagccctgacaagaggcttgccggagatgagcatcccagagctaagcatccctgagatgagcattgagtgagagtcacgattagagtatacaggaagaggcagcagagccagcctccatcaggccaggcctggcatgtgcgggaaaggagaggagagagaggtgagagagaagattccagaggcattcagagtaggaaggagctcaaatagtatgttttcaggttatggcttttatctgggcgtgtgtgtgtgtgtgtatgtgtgtgtgtgtgtgtgtgtgtgtgtgtgtgtgtggctcgtttttcaaatggagtcgctctgttagcacagaagactgtggaggaagggagaatggttattgctgaggtgacatgacccatgtgtaaggcaggcaaggtctggataatgctgggagcaagctggaccagttctgaaagttgaaggctatggggcactacatacattaagttggaggttatagggcattacatacattaagctgctcactgacagctttcatgagcactgggcctcaagtacatttattaccaacatttgaacaagtttttttttttcatgtttttccttgattactgacagcttaaatctctttagcccttgtagctattctgagaaggaaggagtgtctgctatttactgaaatgtgatgttcatatgtccacaagtctctggtttgttctgagcactcactatgtcatagccggaggagggggaggannnnnnnnnnnnnnnnnnnnnnnnnnnnnnnnnnnnnnnnnnnnnnnnnnnnnnnnnnnnnnnnnnnnnnnnnnnnnnnnnnnnnnnnnnnnnnnnnnnnnnnnnnnnnagagggggaggaggaggagggaggaaggaggaagtagtctcctagagttagagaggtagtttactgttcttgtagaggccccaagtgggtttgtaacaccacatctggtggctctgaattctgagggcacttgtgctcatatacacacccacacagacacacatgtacacataattaaaaatagtaaaataagtaatctctaaagtccaacctcagctcttgggaccatattatttaattgcacattgtagtgctatgcaaggctcaagcaaaccacagtggctgatgctccctggtttcctgtctcttgtgtgtttgtcatttcctgggatacctgtcacagagtgagtgtttcagctttgtgatctgaagggggactcactgaaaagagcacagagaaaaaaggcagtgtaccgtcttgatgcggagaatgccaactgataccgtgcttgccgccaagctcaaagaatgggctctggtgcagtgtaaccttggctcacaagcacctcagcaaatctctggagacaatggcatctttatgctcagtcatgtcatgcaggaaacattgttgggggcatctggtccaaagcaattcttatgccaaacagagaagggctcaggaattcagtgaatttttcttcagatctgactttgccatggacaagtgctgtaagagaaacccccaggctgcctgggttgtagcacgtgcaggaatctccatgagcttgagtgtaaagccttgctgtgcgttacttcagagagtgcttttattatgtcttctgtcttcattttgctaaagcaaatgagaaccgtgtgtgaggcattcagaggaacttgtttaagatttctatcatcaggactgctcgttgccaagcatgagggtcagggttcaggtcaccagaacataagtaaaaactgaggtgtgtggtggctcacctgtgactgcaggacatggtagggcagagacaggagctccacacagcactctggctagttaaagagctggctctgggttcagtgggagactctgcctcagtatataagctacagggtaagatgacatctgattcctaccttaggcctctgcacacaagcgtgtgcatgcatacaaacacaaacacatgtgtacctgctcatagacatatatttacacatgcaaacatgcacatatacacatacacacatatgtgaagaaatatttttattattcctatgttagagccttgagattagtatgtgtgtttgtgcatgtacgtgtgtatgtgagcactcagttgtgcctatatatgcggaagatagtggttttgttgccgtctgtcgcttcctgccttcttgagagagggcctctcactgaccctggtagatcagctggctaaccagcccccaggattggcctgccccacttctcagccctggggtgataggtgcacatgtaagcacatggattttatgtggattctggggatttgaactctggtccctgtacttgcacagcaagtggtgcaccttagttcacattttaaagctgttgacttgacaatgattttctgtcatttctcatttttcttacaaatggagagaagtaatctggtttaaagaaaccaaacccctctgaatgacagttaaaatacatattttgccacagccatagctgaggtcagcttggggcctgtcacactgcctgtccgtcatcagtttgcagttttagtggtgctgatccaccttctcctggtgctgctgcccctgccatcttgtgttagtactgattttgttcacccactaacccccagtgcttgatctatataacaggcgccagctacggtgtgaacagcggcctagttcaggtttgtagcacagacaatccttctgagtctaccatagcatcatctgagcagacacagttttgacaggacggtgactgatgctgatgatcttaatggctcctcactggcagagcagcccaggctgctcagaatcccaggctgagcttggctaaaacagcttgaatctaattactgctgttttccgaatgcagtttcacacacgtgaggaagttaatttcttacctcgggcttgaggctcacttttcctttgccttcagtctgtccttctcctcctccagatacctgggtcactggctggcctaggtctgtctccagccctatattctgtccttgctgggtgagatttccatggctcttaaatgaaacaggtttgccgactctgcacatcgctccttctcggctgtggggatggatgttagaggagaggcaactgtagtgcttgatttcccaggaagaaacaaccagaccagcaccgaaagtcagagcaagtccctttcaggacactgagcctgagcggagatgggtagtagtatttgttggtatgttctacaccactagagggagccctgttgttctgatttccgaatcctgaacccatcatgcctatggctgtggcatggtggtcccctggtaagtgcttgttgagctccctctgctcttcatgccactggacactgcatgcagcatagcttggagtatgaagacacaacatacgaagagcaagggcaagccaggctagctcctcctcaggccagggggagtttaggggagtccgagtctatggagaatgtcagagctgggccctgctcagacctctgctccaggtcagcctctaactctagacagaggtcaggtctgggaatttttcccaacatccagactgttgcattggcatagtttaatggtgaatgaggactcactgtgtgtgcatgtgttgctgtgtatgtacagggtcttacatacatgtagcaaggattaaatagtacataggaatgagtacaagaaaaccaccgtatgttttcaaatatcatgatttgtgtgttgaccgctttccccttccctctccctggaagtggatgagagcaaggattgaaagtcaggaatggcattagcagacaccacttacatagcgtcatgtagtccgggcagccaggctggaaggtgcagaaacaggaataagctggttgcctctgtgccacaccaggggcctggaattctgcaggcatcgtgtctgttcccacctaaccttcctgtgaacccgaaggagctcctttcctcttcctcctcctcctctcctccctcatctttcttctattccttttccctctcctcctcctcctcgttttttttcttcctgggacatgcaggagcaggtctnnnnnnnnnnnnnnnnnnnncagccctcctctgcccatgcccacagttaacaaaacatgggctatgaagcttaacggggtagccagggtcctgtagcgactgggatttcctccccttccctggtggggactggagaggtctgttttggaacatcattatatgggggttctagtgaaagggcgtcttacctagctgcagcccctctacctcctgccctgggtgttctgaaagggagacgcccctccctccttctagggtgggtttctatgaccagaacaaagggcggcagcagtgtgtggactccatcagaggctggaactaaagagagggaagatgggaaccaagcacactgggaggaagggttgagcggccggaggaagcttctgtttgttctgtaaactccttttcttttcacagtgcaaacttttcctgctcactgcaatgaaagccgtgttcacgtgcatgtgcacacacactcataggcaggctcctgtttcccttttccagtgtgagggaggcaacagaaattgtcctcacacatttacccacagtaggcttattaactccacttagctcactcatgggaacactttgaggtgtaatacaattctaaacaatgaaaggaacagcttatatgcatccctgcagcccgtctgccaaagagaagcaggccacatggcacagtcttttctcccaccatatagaagccgcctcaggatgcagtctcagctcccattgagaacagaagtgcggttgttctttgactttgatgacgccacaataaagaaggacgcgggcctgcagagcccagggagacaagagaggagccctgagtcttgagtctttgaatgcagggggaggggagggcagagcctaggactgggtctggttttgccagatgctgccactgatgccagagagaagggaagctggctgaggggcttaagggaatgggggcggtcaccgacactgtgaggaagtgtgaggaaggaagggcaggattgctcgcaagctgtgctttgctttctgttctttgcttctgacgtttggcacctctcagggacagactgatggggagccatgttgtggtacagctgggccttgcatgtgaagattgcacagggcatagacacctctcctcataaatacaggatattccacagggcctacctttccttgatgcgggcattcagattattttcaggtattttgaattatcaccaatgttaacttttgctaatatttcataatattctctggtaccatagaagccagggcacaggatgaccactttcaacgatttaattggacctagagcccactcaatggggaaatcacctggtgctggaaacctagcatccttctggagctactgagttctcttagaagggaacccactaccatcacttaactgttggtggatttaacttttggtgtacgttcccaaaagcaaaattgcaggcccaaagaataagcacatgctttagtgtaatggctatagcaagataattttacacaaggccccctagccagagccctatttccctataccttataaactaacacagctatagatagatagagacagagcatatatataatagcatatatatgtataatagcatataaataaataaaatgtatgcacacacacacaaaaataggaatatatagataggtagagagacagagcatatataatagcatatatataatagcttataaataaaatatatacacacacagatgtgtgcacaaatatataaatataacttgataggcccacttttgtttgaatataactggtttcatggccaaccgctttgtattggataaccaataaggagacccatccctgggaaaggctaatgctccttctcccaggagtcatccattgtctagaggtggcgcccacactaacatgtctgtcagcattgccattgttctggttttgtttatgaagccatttttaggagacattgtttcacagcggtgtacctgctgttcttttttcagtctttcttccccctcttctgggaagttccctgagccatagattcaggagctatgatttagatgtagccattatggctgagctcccatgttgatctgttgatctctgtatggtgtctgagattgtctccatttgctgtttttttattggaggtggtaactatccttatctgtggctataagaacaagatgtagagtataattagaaattatgttggcttagcagctgggcagtggaggtaaacaccttcaatctcagcactgaggaggcagatctcagagttcaaggccagcctggtctacagagtgagttccaggacagccagagctacacagagaaaccctgtcttggaataaaaaatgtgttggtctagcaaagtgatggtagtaggttctcttctaagagccttgacctcactagctctgggaggatgctaggttcctagtaccaggtgatttctgttctattgagtgggctgtaaatccaattagatagctgttggttactaccaacatgtgagtgttaccacacctttaggcaagcaagtccctgttgctgaagacatcacacacttaggacacatgtcccagatgtttgaggtggatctgacctgaaagtggtcatcctgtgccctggcttcagtagtaccagaaaatatgccaaggcagggacacagctattggtctgtgaaccacagcagcaaccagcatggcaagacgcccattgaggttttttcctgacctgcagagagaatgaactcttacctgtcaggctgagtggccatttttccattttccttttgaatggtttgtatttttctcatttgctgctgtatccttgtggttggaaaatacttttaaaaacaggagaggaagaactttgggtagtgttggcaaatctgcctacagccagccaaccacctgaaagaagagtggcagtcagaaagagctgggccactgtgaaggtgtgcttcctctcagatgataacaacagaagacccagtcagccaagggccagtccttcacaagggaggcaattgtcactttattgtgagatttttcttctctctctctctcttctccattttgctcttcaagtccagactgctaacagagagaaaatacagactccaagttagggttagcaatctcaatgagaaggctgtcacactgtaccccagtgagccagccttttgctttgtcatcaagagaagatactgttttgtagtagactattcctctacctcaagagaaagggaaatcactttcctctggcctgtgtgtattccatccaggctaactgtgctgcgtctagaaagctgctgcagacctctctgccagactctggtctccacatcataggatgagaactctggctcctcgtgtcttccttggtggtcagcctgaagtacataccttagtggtgtagtgggtgtaaacacataaaacacaattgccaatctgctcgctgacaattttgaggggagctctggctccaacgtgttgtgagcagcagaaatattggtgtagttgcttttggtctttttttaacttttaaaaattattttattgtattatatgtatgtggtatagtttatccatgtatttctcactgaacctgaagctcagctagaagccattgagccccagaacaatctgtctctgcctgtcacagcacacatgcatatggcctgggttttacatagctgttggggggttgaactcaggtcactgtgcttgcattcttttacccattgagccgtctccccagcctgtttttagtctgccttgcctgtggcacagttaggaagcaggccaagtgttgggcagtaccctaggccacaccagcatggacagtcacaggggatgtgtttctagcagcatggcacctcccttccctgcacaaacaacagtaacaaggccatggcactgcaaaactgcggtcaccaactcactgtgagagtagaaggccaaagctggttgcactggactcatttactttgggtagagtcacctaggcaatcacatgggccacagagaagccagagaaagagactcctttgaatacagctcatcttgctggagtcttgctctgcatgtcccatgctgactgctgtcaggtcctagtgcacaggaagcagggtgcatgtagttattagtttataagagaagatgtaattaaattgctcttaaacatgaccaaagatggaatctctcaggagacaaatttaataagcagtctctgtcttcaaccctggcgtcctgttgattggattgcctccccattacccacatgttttcagaaactggttccccttttctccctcagcagatggcactgggtatgctcatggctcctgtgggaactgtgtcctgcgtcctccctgccgggtggtcagcacccaggcctccagcctgggtttaccatcccaatccttctttgaagatttggaattacctcaaaggtgtccatcttagtgggctacagtcctggctgggagagatgtaactctcggcagtggcctgctgggctacccagtctggggagcagagagaagctagcacaaagaattcagaggtggccttagggcctcacacctgtccagggattagcactgaaaactgttgtctcagtgggcgttaaaaacagtttacctgtatattccaatgtcccaaattccatgccttcctttaagcatttgacaataaacctctcctccttagtatatatagtactcatcaattcttagaaacgtgggcagcatgactttgtttccctcctgaaaaacaaccctgcaaggcagatgtgcccctctcactggacagtgagctgtggcagatgagtctctctcactcgacagaagctgtggcggctctgcctcttcccgtcactgagtcttgtgagtttgatcatctctgcagattatggaattttaagtggatgtcttaagtgatgtcatagggaaatacttatttttaatttttactctccccacattaagaaaataacaagaaaaattgaatatgagtaagataacatagtgtagatctttagatggaccttaggtaacaaggatgctgtgtccacacactggggagctgtgtgaagctggtctggtctctggcttcattctttcttttagctcagagaagaaatgtagaccatcttggttttttgttttgaactttcgttttagattttgtttatttttatgtatatttttagcatgcacgtgtgtgtgcagacagacagacagagagagaatgaatgaattcggatgcctaatgatctattaaatgttcccagtctttgccaaatgtcagatcgcattcaactcaacattgtctatccactcaatatgcagagtgtgcatgctgtgttaaaatgcattactgagcatgtgtaactgtgacttcgtgctacacgatgctattgtgacttcccgtgtgcagaggtgatgctgttatactgtgaggactgaggactttacctgatatgatgcaaaggagggaaagacgggccaacttcccgaggacactgagaaccaaaccatgttcctgtcctgagaaagtcagttccatgccccagtaattaaatggagcaaatgtgagtggaccacagactatcagcgtgggtataggagaagcaaggctgtccccaggacacagcagcacccagaggctggcaggagaatgctgtggcagggcccttatgctactggcagttgttctgtggggttttctcttgggcacctttgcttttgaattcaatttgatgaagtgcacaggaactagacaggaggtttctgagtcctctaagctggagtctgctgggtaggaggaggtggggttggtattcaacttgggactgttgcttccctttgatttgggctgtagctgaggtccacttgtttatagaccagtgggccctgttggccacagctatcttagtaataatctgtgcatcaggcaggttcttctacctacttagactcctcaggttgtatgtgcatatgtgggtaacattagctggcagatgtctctctaaggtggagaaagataacacagcacggtacagcagaccagtctctgtattttcaaaaccctgatggagagtttggctttaattcacttagcaagatgcatttgcatttctttttctttattagatattatctttatttacatttcaaatgctatcccgaaagttctctatacccttcccctgtcctgcacccctacccactcactcccactttttggccctggcattcccctgtactagggcatataaagtttgcaagaccaaggggcctctcttcccaatgcatttgcatttctgaactttaccatatgtatcaatagtttgtgtcttttggtggtggatagtagatagttcctcttgtgtttatacaattctgtagaagaggcatgcttccgttcttctcagtctttgtaattttgaatcctataagcatgggttttccatttggataaatatgtgagagtgaattgtcaagtcagatataagggaatacccgacattaaaatgagcttcccatcctggtgtgcattctgtgctccactagcaatgtgtgccctcagttgacccaagtccttgtcagcacttggtgctgtcagttactttagctttctactcggtgtgttattgaaaccgcctgcatctgcacaccgaccagtgacttgttatctttagtcttctcgggtggaatgacctgggtgttcatgtttgaagagtctggcttggttttcttataagtctttctacactgtgtctgggtgagaagatttagggaatagtgcatggcctggggaccgaaagaatgcagttgttactcatgcatggtggtggctttctcaaggatggggtaataggagaatgccaagcaagaccatgaatgaaacacaagtaggcatattaaatctcaaggtggtggaagggaaaaggagacaggtccagctgcagggaggtgggaagacattgggggtggggtggggaaagagtgcactgtgttctcctcctaaaatgtttgttctctacataaaaagatcaaggatgctgctgccaaaggagaagtagaggtgtgtgatgagagtagactgtgtggtgtcaagcataacagagtttcatggacagggaagtgtggcccaggacaggtcacagaagcctcctcagggcctgagtttcagcacagtgatgggcattgtgtttctgtcttcagctgctgcaggcaaatccttgtcaactagacgtgtaactagccgcagactttcgtggttttatcagcattgaatgtcaggaaactgagtctcagagaagactgcaccttatgtgcacttgaaggcccggggccactgtcccttgcagtgaaggaacgatgaggtttcagatcaagtgtggagaaatcgagattcggaaacaatattttctttcctacccatagaactttaatttttgaaattttatccttgcctcaaaatacaagatattttgggaaagtaagggagaaaaatatttatacctaatgtcctttttaattagatgcagttttgctggtggttaaacctgatgttgatgtttctgtaaataggtttccaactgggaaaaagctgaagggtttttttttggtttttggtttttgggtttttttgtcttgttttgttttgtttttttgactacttacaggtcatcccagtgacattatgtaagcaaaatcattaatacttccttctaaagacacttaatgaaaattgttttataatcagagtatatctattcagagatgaaaccttaaaattctccaatcttgacttacagaataatttaagttaattaaccttcatttttaagagcaaacttatttttgcaaaaataagtatagaaaaggtagagtcgccgtgtgttctcctctcacacagttgccctgttgtttgcatcttacatacgtggtgtctgcttcaacaccgatgaacccactgacaagttattatcagctaatacattagagtcctgtgtgtgtgtgtgtgtgtgtgtgtgtgtgtgtgtgtgtgtgtgtgtatgtgtatgtgtgtgtgtgtgtgtgagtgtgtgtgtgtgtgtgtgtatgtgtgtgtgtatgtgtgtgtgtgtgtgtgtatgtatgtgtgtgtgtgtgtgtgtgtgtgtatgtgtgtgtgtgtgtatgtgtgtgtgtgtgtgagtgtgtgtgtgtgtgtgtgtatgtgtgtgtgtgtgtgagtatgtgtgtgtgtgtgtgtgtatgtgtgtgtgtgtgtgagtgtgtgtgtgtgtgtgtgtatgtgtgtatgtgtgtgtgtgtgtgtatgtgtgtgtgtgtgtgtgtgtgtgtgtgtgtgtgtgtgtgtgtgtgtatgccaaatgttccctagattttggcagattcagaatgtgattcctccatgacagcagcacgggaaagcttgtacagcctcctttcacctatgtgaaaggctttctttcagtggtttttagtttttatattcataaataaagctgctataaactacagtttcatttgaaatgtgtggttacagtagatgcatcccttagaatgaaaactacccacatttgttaccccacccccaccattgactcattgctcatctgtgcaggagaatattcctgtacagcacctgttaccatcaagttcttggtttcatggagctttctagtctgatctggaaagagcctgggttatgattaagatgtgtacacacacaaaaaccccccacataaacctacatgtgaatgcttgtaaaaacttttggatactgcagttaatgaagattaatagtgcttactgtgttatgtgttaactatgaaatgatacccacaagctactgttttgaatgcctggtccacagcacatggtatgatttggagaaggttgtagaaactttagtaagtggtaccatgctggaggaagtagtctgtgtggggctccaggggtgtgtcctctggctgatgcttgcttcactctgcttctgagcttgctgtgatgtggcttgagcagccccaccatgctggcctaccatgagctgcccaccatgaaaataaacacttcctcacttaaatggtctatatcacaacaacagaaaagtaactaagagaaaactggttttaggcactcatttctgtgaacttgagatggtgtgattctgagactgtgtgggtctaagtctgtttttcgggaggaattgggagaatttggaagagctttgagaaagcctgcaatcctgagagcagctgaataggtgaatccagggggagtccagacagccagaatgaggtgagagtggggactgcagagagactgcagcaagtgctttggcagggatttctctgcaccatgcccgtgtcctgaaatgttgtggaagatgagttggaatgtaatggactaattaatttggcagaggaaatttcccatcagcacagaagtcaggctgtggcatacatattgccagctgcttttagttgtacaagtttccagaaccctaaaatcctcctcctgtctgcctgtgttcgagcgtcagtgcaggtcctccatgcagcctctgcctccccagtgtgctccgctaactgttcctgaagaagagcttcctatcttccagagctcacagcagcaggccagtatctggatcaaagatgggcccgtgggctagcactgaacccaccctgggacatgatggtgaccagagcagtagtggagttatggaccaaacttgtgcaatagatagatcattgtttgaactgttgagatcttcctgctaccagcacaacctgctctgctttaaagcaccacacagtgtctgcacgtgttgtaaaacccagtgcatactatggccaaacagagagcggttaactcttttgtaagaaaagtagcttgcaggttgggaggatgtgtagtcaaagctgagatgtgacctaagagttttgttgagcctcctttagcacaggtaagaaccaagctaccaatgccatctctggatgaacctggaagtatctctgtttctcctttgagtgtcatgatgtcatgttgatgggaaatctctaggtttcctctgcctctgaccctagtaatcccagctatttgatggttgtgtggctcagagttatgagaagagttgagtttcactgtacccttctgttttcccaagatctttactagttataacaggatgataactcacagagaatgaagagaatccactttaaatgtttggtttgatgggtatggccatggccacaggaaaatttagagcatttcatcactccaggagtttcccctgcccctgacagtctgaacacaggctatcattgttgggtagtatggtttggtttgatttttaaatgctgtagaatatgatcccctgttctaccattcttatcaatggaataacagcacttatagcctttatatctgatttttttttactcatcatgaggctttggaaatccatcagtgtgactgtgtttattctaaatagtctataacattgtgtgaacaatcacaattgtcttattcattcatcccatatggaatatctcacatgttctgtctcatgtcaccataggcgaggccgcagagaattttcctctgtacagtccatctctttacatctgcatttgagtaggcacttcacaataccattgccatcgttatggtaaatacaacttccactctgtgagcacttaccagactgcttcccacagtgcctttagcatttgccatgtccaccagcagtcaagcgagccataagctgcaaacattgcctgaatgtatttgctcatcattttcttttgctttgtttggctttcagccttgtgtaggtgtgtactggttctccttgtggctttaccttgtggctttagcttacatagtctggtgacaaatggtgttgcatgcttttctatattctcactagcattttatatgttgtgaacactgttttaaaacattattgccaccttaaactctttttccataattgaggtgtgagagttcttgtctgttccgttagcatgaccagtgtcaaagcagatactgcaggtttgtcccccagtctgtggcaggacagataccgcaggtatgacccccagtctgtggtgggacattcttactgactttgatgctatgttttcaagatgaggttttaattgttagtaaaccttaactcatcattctgtgcgtggttattgttttattatgtcttgttttagaaatttctgattaccccacagtccccaaaacgtgatcttgtagcctcacagtggtggtagtcctattatgagccatttcctgttaactttgcctgtagctgggatgggggctggggcgttttacctgactatttctctgtcatggttgaagacaccctttgtagtcactgatcccttgtcatgttttcttctaaccgcgtatgtgtgacacaatgatataaatatcttttttctctcttttaggtttttaatttattttatgtgtatggtgcgtctgtgtattgtgtgcatacatgtctgtagaggcctgaagaaggtgttggatgctctgaactgcaagctacagttgttagccgtagtgtggttgtgggaaccaaacctgagtcctcaaggcctgagcgtaggagctgtggtaccccagcctgtgctgtcctgtggtcaggggtcactgtccacttggtgagagtgaggtggctttgctagccttcgtctctgtcagttcctacacagcagactgccctgtacgctgggcagtctctccagccccaactgcagaactttctgacatattctaccatattagtcggattcttacattattattaatgtggcctttggttttcatatcaacgggtgttaaccctcacacactctgatttttttccaatggttttcctagtacagattctcataaattttagaattaatatagctacttttacttcaaatacttttaggactgcattggctcagtagttccatttggagatgattgacaaatcaaaaaaaaaaaatgtgtgcctttttccatagggctctcttacctccacggcagtattttatagatctgactttgttatagttgtgtatctgtgcgtgtgtgaggaaaagaaggggtgagtatgcacgcgaggaagggacaactttcaggagccaatgctctccttccacagtgagatatgaggctctcgctcaagtggccaggctggcatggcagtgtggcaagcacctttgcccactcagtcgtttctttggctatatagtttttctatagtatttgtactaaattcagcagtctttctcatagatgagtatgtattgattttctattttaattgtttggcagaagattttatttttgtgttgactctgtattcgcaactctgctggctctgcctgtcaacaacagtagtgtggcctctatggggtgaagcacagatatcgtatgcacacagcctcgccttctgtagatctctagagctttcctctgcttgactggctgcactggctagagcttctagtggaatgttggtgctttgttcctggttgtcaaggaaaagcagtaggtgttttaccatttgtacatggcactaagctgtaaagggcttgttattggtggtggtggtttgtgtgtattagtatatattttatgtatgtatttgtgggtacactttcctgtgtgtgcatgtgtgtctctgggtgcaccctgtgtgtgtgcatgtgtgtctgtgggtgccccctcctgtgtgtgtacatgtgtgtctgtgggtacactttcctgtgtgtgcatgtgtgtctctgggtgcaccctcctgtgtgtgtgcaagtgtgtctgtgggtgccccctcctgtgtgtgtgcatgtgtgcctgtgggtacactttccctgtgtgtgcatgtgtgtctctgggtgcaccctcctgtgtgtgtgcaagtgtgtctgtgggttccccctcctgtgtgtgtgcatgtgtgtctgtgggtgccccctccctgtgtgtgtgcaagtgtgtctgtgggtgccccctcctgtgtgtgtgcatgtgtgcctgtgggtacactttcctgtgtgtgcatgtgtgtctgtgggtgccccctcctgtgtgtgtgcatgtgtgtctgtgggtgccccctcctgtgtgtgtgcatgtgtgtctgtgggtgccccctcctgtgtgtgtgcatgtgtgtctgtgggtgccccctcctgtgtgtgtgcatgtgtgtctgtgggtccacccttctgtgtgtgagaatgtggaggccaaaagtcaacacaaagaactctttctccttcattctctatcttggtcttggaggcagggtctctcgtggaacctgtagctcactgttgtagctagacttggggtcagtcagcaagcccaggcttcatcctgcaccttaggtgttggagttaagatatgcatagccatggggtgctggagatctgcacatgtcctcacagcaatttctttctctactgagccatctccccaggtcctctagcttctcttctttcccctgacactaagctacaacctagatgtgctgtttaaactgaaaatatttccttctgtttgtagtttgctgagggtttccataatgagttgagtattcccgtgtcaaaactcttctgcatatatggatgtaatatgtcatttgtctcctgagaacagtgtgttgtgtgatatcaactttctcctgtaaaaccagctttgcattcctggaatacacgtcacttggcttacagtatatttcagttgctttcaggagacgcatctgcagagtgttagtaatagtttccattgtatgggatctctgggtgaggattgcaggtcagcatggtcagaatttaggggatttcagtctcacataaataacaaggagcacaggtggcaggcatcggttatgttatttctctcgtacaggtagcaggctcggaacaatggatgcattccatccttctcccatgtgctccttctcctaactttccactgtggctgccagggtttcagatttagacctctgaatccataaggctgtttgcttaatttatggcactgagctccttgaagtgtgtgatgatcttgtggctcacagaaaatatacatctatttatggtgaaacacacactctgctggacatgtgatgaacatggaaaaacatacatctgtcctacagttagacatgtgcacactcctgcagtgagagggctcatctgaactaactcagacatgtgctattaatctttgtgttgagttccgttctttaagctacctttatgtcctttcctctctgaattatttcagtgtgatcaaagccacatccatcattagattttacactagctagtttctcttttggcagcctaccttagttcctagttaaatttaccctagttaaatgtcatccacaaatcaagttaatgatggtgcaacacgtgtcaagtttacaaaatggtgatactctgttttgtgcttcatcatggtatgttatagacagctctgagcaagacttacaagtaacatatactagaaagccttggctcttctgtttcattcacaagaatgctgtatttactccccggtagacagacaccacctcaggtatgctgatcccactggccctgctcctctatccatggtgcgggcatctttgcctggttctcattcattctctcttcctttgtgggcacccatgttagtgcatgcagtgtgcatcctttctctctagggaaggttgggtatctactgtcaaggcttgaggctctggatggctcgttcttcttcactcagtatcaagtttatcatggtacagtgtcctctgtaggtcggatttgttgattctttgggttgtgcatttccatcttagtgcagcacggtttccactattttgcatctgggcacaggcttgtgcacttccttgtggctgtgagcagagatgctcacagtgagcagacgtctagcatcttcaaggtaaacctctgtgtgctttaaagcttttggagccttaaaatacccatgctttatctaaaagatcacattcagaagtgtggtagaaattgccattaattataaagcccagcacctgtgagtctatttttatactgtccttttccttttctactaatgactctgcaggtgtgggtggctttcttgcacctgctgagcgccaggctgccagggagagagccagctaaggtatctgaagagcaagcaaagtgatgcacatccatttctatttaaagaaattcgttacttcagcatatagcaggcatttaagtggttttaaaaagttaacccaacccctttgctttccctcgtccatgtgccacgagttagcaccctgtgctccaagctatcatgagaacagcagtgcccgaaagacagtggagagcgcacagtccctgtgtgctgccaggcattgtaattcctgaatctttttcacttttgtgtcaggacctaagatcagtatgggatacaaaaaagtgaataaataaacatctgtgaggcagatacccactgttagcctgagactgtcacagggtgggcttaggaaatggctcagtcggtaaagtgggtaaagtgcttgccttatgtactgcctagttttgtgtcaacttgacacaggctggagttatcacagaaaaaggagcttcagttgaggaagtgcctccatgagatccaactgtaaggcattttctcaattagtgatcaagggggaaaggcctcttgtgggcgggaccatctctggactggtagtcttggttctataagaaagcaggctgaggaagccagggaaagcaagccagtaaagaacatccctccatggcctctgcatcagctcctgctccctgacctgcttgagttccagtcctgacttcctttggtgatgaacagcagtatggaagtgtaagccgaataaaacctttcctctccaacttgcttcttggtcatgatgtttgtgcagggatagaaaccctgactaagacaccttataagcttaaggatctgaaagcaaaccctgtagcacatgtggaaaagccaggtgtgcacatttcatgccagcagtggagaggtagagatggggagagccttggggctcccttgtcagccagtgtcacctacttggcaagctccaggccagtgagctatacagctcagaaaagaaaggtagacagagtctgaggaagacactgaggttatctttcacatgtacacacacagaagcacacacatgtgcacacacacacacacataagcaagttcacacattcacttccttacacagaaattcataaggaggtttttcatctcattttcttggagtacttggggtcaaatccagggtttcaagcatgttgagcaagcatcctgagctgtgtccctggcccactatctttgattatctgtaaacacacatggcctgatgattaggttgcaattgaaggacacaagcattcatcccaatactattttacttcagaaagatagatgacaggcaaactgctgtcactaacattccgaggcccaaactgagctgaaggtaggcaggggttggatttgacaagacagctaacacagtgatctcacagatgactacatgtgtatcttaccatacaccatgcagaaatgacagacacatgaggaaaagaagattcatagatttgcagtgtcttatgggaatgtctgagtgtaggtgctgtggtaccccagtctgtgctttcctgtggtcagtggtcactgtccacttggtgagagtgagaagcctttggaagccttcatctctggaagcagacatgcagatgtgctgtatgtgacaggttgccacctctgcatctccctgcatgctcccctgagcttccaggctttgggtcatgtcctgagagtgaagggggacaatatcacaagaaagggagcctggtaaagagggggacgcaggagtcatgggccacacacggccttgttagtgtatgttggcccaaactacccagaaataaggaaggagaagaaatgccatgtgttgccccatctgtgcactggagatttggtgcgataagttatcctcaacagatttgctggaccaataggctttgtggctacagcttgtaaatgagaaagaaaaaaaaaaaaaaactagagagaaatcaaagtaggaggtaggtggtcacagaaccatcctgggatacaggggtgccaccacctatgaacagagcctgccagtagggctcagactgcagccctgctgaccccacagaagggaatcctaccattgcactgtcaagacctccttagcatccagagccttctggtgctcactgtccctgtgcatcttttaatggaagcagtataggtttaaaggaagagacgggccagctagcttgggctatcctacactgcatcctgcaaaattcatcaagtatgctacttggctttttgtcaatgtaacaaaacactggagatcaaagatttattctggatcagagtttcggagatctctggccatggtcaaatggccctgctgctacgggacaggggtgcccattatggtggcaggtgtgtggagatttgctcacccatcttcctattacctcgcagtcatgccagactggaaagagccttcagcccatgggccttccgggatgcacagagtccaggctttaacagcattctgagtcaggcaaagagccagcctttgggtcctttccttgctgtggagctgctcattcgtggggcccagcagcaccccagcgccctgtgactgacatcttgggggttcatttaaaagtaaatgacgtctgtccagtgagcagaaagcatggtcttcatgtttgctttgcatccagcccttgcagagcatctcagcacagttacttgattccttttaacttgtcaaatgaccagacgactgttgataacacaaagcgtgtgccaagtaaaacaatcttcctacccatcccccagcggctggcctggaagctgctttgagcctgaggtgtgggtctggacagacaccagctttaccctgcttaggaagagctctgaattagcacagctctgccaaagcctgaacgactttctcatcccagggatgggtgggatgctctaggttccagggcctttaaactagcctcttctcacctttattctgattgatatctcccacctaagcagttgttgaatgagctgtgggggcagagagagcaggagagggttctgatgtttgatggtgtccactcagtagctcactgttggctctcctaaccatttctgcacgctcgtctcctgggatgtctttatttcttcattctgctaaccttttatgcccagatcctcactcaagacctgcttcttgtcagaaatagtacaaacagctgtgcagaggcccagggcacttgagatggcagggagtccctgtctctgtctgtgtgcctgtttggtgtgtcaagagcagagagcttgaagagcgctgtgtgttgggtcaccggagctgccctgccctctgtctcttatcccctctgtccactccctcccacctcttaccccctctctcctgtgttcccctggcccctgccctgcccttgccctctgccctctggtccctgccctgcccccgggcccttatgccctgtcctttgcccctaccctgctttctttggggaggtgtgaacaaatgccttttcactcacaggagatgggacaccagctagaggaacagttccacccatgtctttagatgagcctgagagtttatgggacttaacttacaggagcataagcagggaatgacgacaggagtttggatggggggtacagaggagtaaaatttcaaagataaaagccagggctagagagacagcccagcagttaagagcactggctgctcttgcagggaatctgggttcattcagttctcagcacccacgtggggcctcatgactatctgaaaattctagtttcagggtatttggcgccctctactgacctctgagggcaggccctttatggtgtacatacacttatgcaggcaaaaacatttatacatataaaataaatctaaagaatttaaaatataaaaagaactacaaaatattaccaatgggtaaagagagagtgacgagtggaaactcgctgttgctgctggtgttgtgttcgagcccttcccgtgagttgttgttataaatgagcatttgtgcagcacattttctactgatcagagggttcttatttttctgagaagtttcttgtgttggattgaggctgctgcacacatagctagccctgtaggagtcaacttcccttctcaggatcccaggaattcagttctgattttcactttgtttcagaagccaaggggctgggcataggctgctgggaaacacaccaggatgttctagttttcacagaataaaatggctcctctccctgtgcaccgaactggaggctcccaaggctccccatccctgcagtgacagcacgacctgctagccagtggtccggtccgcagagatgactgcctcagaggtgttgaactcagagctgatttcctatggtcactgtctttctgcccctgccaccttaaccactgcgtaaagcagaccattgtgttgaacacatgtcctgtgtgttagttttagatttttccacctgaaccccacgcacaccttttcttctctatttcctttctttattatataattttatcagttttacttttaagaaaatgtttctggagtctggtgtggtgcagtcaccacagcccttgagacttggcagcaggaggttcatgaatttgaggccagtctggctgtataataaaacttcgtctctaaaaacaaagcaccaaacttaagaacaggggattctgctgatgaaaaatggcagtcatggcgcacaaagtgcttccttcccacgggcaggttccttccacccttctcctcaaatgtgtgccctgctccttagcagctttccttgtcagtagacaagacagcatctgtggtgctggtgttgggaatgaagtggggctggaggctgttagccaagcggcagtccagccaggttaccacagtccagggctcttccttctggagtccagcttctctgagctgtaagttgttttctgggcaaatggagagtcttgatcaggtaaggcaaggtgcttggcagagaataatccttttttttatttgtttgtttgtttgtttgttttttgagacagggtttctctgtgcagccctggctttgtcccttataaaaggtgtgtgtgctgacaaggctaaagatatgggcaggctgatgtcccttccagatgctctgcacctgagggaagccaggcctgaggaactttgttttgttttgttttgttttgttacttaaacccattcctaccaagactccagggggcacaaacaagggtgcaggtttgttaggtgagaatgggtgggggtaggggtggtggctccagcagcaaaccgcagaaggttccttttcatacactaggttgtttctcaggtaacactaggatgaggtttttttctccttatcactaacaggataagggtacagcccagctcctcctcactgttgttttatcctttgtaggtgatagccagggtcttaactcacatacagcacatgaaaacatctgaccagggctgttttagcttctgtttgcctaagcatctgccagtgttcccaaggtcaaggccattacatactccaaaatctggtcactccatatcactgttaatgtgagtctggctgggagctgctaatttctaggtcttctggttacagcatgctcaaatctagcacaatgctgacttctgtgcctacccccttctcccaggagacattgtttatttctcctctaaagaattcattttattttcctccagctatctttattcctgccaacagtagtgtaacttaagctgtttgtttctctttagcttccttactacctctaatttttcttaacctttaaagatttccaccttttgatgtcctctgtcactcacactctcccctgccccatgtttgttctttggtggttcagatatctgaggatgttgaacctcttcgtaagaccccagacaatcatgggtttggagaaagtcttttaggttggggctgtgcctctatgggattcagtagaggcaatgctctctgcctgatcgtaaatctcatgtcatattatgcggcattgaagatgctagagaagaagggcagttgttaagcgtagtctgaaagggtacaaggagtttgtgtccttaactgctgtgtgtggagagagcagtgtcaggttcaggcaagcaaattttaacaatggtcatgtcatgaaagaagccacaccagacacctcatgggtgtagagactctgagcattcatgctggctatgactccagctgtggtacagttgggtggtggtgggcagagaatggagatggtaaagaatgctggagcaccaggcatattgctcaccaatgcacaggtcaaacattttgtggaagaccttggagcaagctttacttttctacaaagcaccaagagtgcacatggtatcagtttatgacaagaacttattttcaaatagtaaaacaaaatcggccagtaatggttttgatggaccataacaactcctggcctgattagtctatgatatgtcagaggccactaactcagtagtccctaaagttaacagaaagagtccagcatcctttaggatctaacttctctgctggcaacaggtgggtaaaactctcaacatgaggtctttctctttgcagcatgcactcttggctctgaagttcatactcgcatttgccatccctgataaaccacggcacatccaacagaaactggccagattggaattcgaatctttggaggcactcaagcaacaggtaagagcagtgtgcctggagacactgctggactatattcctctagcacaggcgccaagtcactgcgtctcctttagcatggacttgtcagttaaatgaacacaaaggagatgggatagcccaacccagatcagtaatgtcaccaagggtgaggctaagcaagtagaatagctaagcaatgggaaatgataaatacaggtttctaagaatcactgcagagccacccccaccatgttctaaccatgccttatatagaagcactggggaggagaggccagtgagcaggattccaaatagtctcttacagagagactggagacctgtgggcagagccttaaagagtgctgtgaagattgtttccttgttctaccagatgaaaggggggagagagagagagagagagagagagagagagagagagagagagagagaatgagaatgaatgaggatgaataggggggagagtttaccctcagtaggattcaccactggtgattttctgcctgtgaggagaacaactagaagtcagtgagtttctagatgctcagagtggttacctccatgtgtcaatttaagcaacaacacaatggaggcagtggattgggcagtgtcttcttggggaccaacttcaggtccaacaccccctgcactacacagtacttagggaactagaggggaatcatgaaaagaatccaccctagctgaccctctaagaagtaagggttctcagggcagtgttacagatggagacctcccccatgttaggagagaactgtggttggatgtgggggttcaacccaaaagaggagacaagagaacctggtctccagtcagctggtctcactgtaccatggtagatggcaagactcagttttgggatttgctagagaaataggtcctgagccttggtcaagctcctagtgctccacagtgaaacagccctgtggtggagaatgtagctcagagaactaaaacagtcacatactaaaagaggcagacataccacgtctgcagacagagggggttacacacgtaaagtccatacggtagttactgtcatggcaggtgggtttctgtgagctttaggccattctggactatgtatgaagttctaaggcagccaggactatagcataatgaacccctcccccccaaaaaggtaaggaggtggcatataagttctatataaaataatgttttcttccatgcaaaaataagcagtttaaatgttattggaaaattttcatatacagaaaaattataacataaagtctttagatggtaacttattaatatagcatggataatctgtatgcaaagtatttttaaggtatcttagaattagaaaattctctcttaggctagggagatgctcagtagttaaagcatgaggaccagagttccgactccagcacccacaggcaactggcctgcaattccagcttcagaaagcagagataggcatccatctgcagagcaagctgggcctgtaagctggatggactgtagcaagggagcatggggttgactgggaggtcctgcctgcctctccatctgcagagcaagctggccatagatggatggactgtagcaagggagcgtggggttgactgggaggtcctgcctgcctctccatctacagagcaagctggccatagatggatggactgtagcaagggagcgtggggttgactgggagattctgcctgcctcagtgaataggagagagggtgattcccaacattagctttgggcctctgcacattcccacaatcccacaaacacacccacacagccagacccacacacgcacatatacacatgtgcccccccacctcacctgaaaatagaaaaagaaacggtatttagtcttggggaaactctgtcagtcaaatatgcaggaacaaacgtggggaaagctcagctcctcctcaccctcccactgagcctcactgctggagaaggagatatcctggaaggtcagaccaccctgcttgtgcctctccacacctccactggcaagtgcctttcccagggcttgtgttttctgccttctttagcttggtgttccaccctgacttgtaactaactgtggcctcaactccctgctccgccctttgccatagagagagaggcttctggtcacatgttaaagcctcttgttgccctgcctcctcctctgttcccatcccagagccaggcacagttgagcttaggcagtctctgccactaagcctgtcaggagatggcttgcactctgaatggggttggccttttaaccagcataccataaatcctgacttggaggcctgggtctggccagcgggaggcgctcagcaccctctgttgaacctcccagggacaaactgttctgcagtgaacttggaaggaagtgctagaagcagagcgcagcccctcacagtgggaaacgggcattcctaagcacaccggcaagctagatgtgtatggaagagcaggcaggtagactcatttgctttgcaaagggcgtttgaaattactcagctcaattgagacctttaggaagaacttgggcggatgcctgtgtttctttataaattggcttacttggtatccggtcatttttaaaagatccaattaaacagaagggactatccaagaaccatttggtaactggagtctagtacccatcccagagaagtcagtagccacttagctagctactccaggcagcctagctgctaagtccagagcatatatgtgagccagggagcaaggacagaagcctagagcctcccagaaagatagtagccactgaaatcagctcaaagaacaagacaagggcccaaatcagtacaggattgttacccagagggttggtgctcagcactcaccagcactgcctgtctagctgggatagcactctggggagagagcctggcctctgagtcatcctatccctcttctcctgggtcacacagcttgtctaccacacaggccgtaaggtcatgatgaggatgtactgggacagtgtgcggaggggagacagggatgctaagtgggaacaaggacctcctttcacctgagcaccttgtatgacaactgcttctgggtggggtctcagagttccgattgccacaatcaaccactctgactgtaaacaacttggggaagaagtttatttcagtttacaactctcaggtcaagctccattgctgacaaaagtcaaggcaggggccgtggatgattgttgcccactggcttgttgctaagggcgacccagcctgctttctgtagcactcaggaccaatagcccggaggtggcaccatccatattgagctgggcccgccgtaagtaatcatcggccataaagtgcaccacagctctgcccacagggcaacctggtggggcattttctcatttgaggttccctcttctcaggtcactgcaggttttatcagcctgacataaaactagccaacagaggcaagaagaattgtgccttggaagcaacatcccctgtccccttggaagcaacaccccctgtctccatggtcctccacagttggaaattctaggtgttgactgtggcagctgatgtatcctgaggagagtatgagctgcacatgagtaaaagccccacccccaccccccatgggtgactcccagaggcctctgcgtgggatctgttagccattcctaggccatttctcccacagtagctttgtctcagctaaggagttaaccttctagatttttctgccttagcttcttcagtacatcttttgggagcctgcgcagccagcatgataaacgtcctcacaggtggctggagagacagctcagtgggtgagagggcttgctatgctagtgacctgaattcatatccaagtacccacagaagcaaaagaccctatgtggccatgtcaggcttgtattcccagcgctgtgtggacatactggagactcactgaggctccctggctgccaccctagctccaggttcaatgggaagcattgcctgaaggaggtaaggcagagagaagtgatgatggagcaggacgcttgatgtcccctcccgcagcccctaacttctgtgtaaagagagtgggggatgggggagaggaagggaggaggagatgtctgctctggtagatgttggctcctggcacctcatccattcctctgctgcccttttctcacttggggtctcctgccactgtgtaatggggccactgtccttggtcaggcttttgtctcctctgtgagctgttacgttcctaggtccaggtagtgtcctacacggtacaaagcctagcataaagtagtctctggataaatacctcagactttgttgactcgcacatagctcagaagccagtgtattaaataaatgacaaatgatgtccttggacaaagtgagagtcttaaaatagacacacaggcaaaaatggagacaagtcatgtgccttcctgggattgctgggggaaggaatgtgctggggagcccttcagacggaccccagtcctggcttggtaaaactcagattttcttcccccatcagtaataaggaaagcttactaagtctgtagtgtaaccgcaaagtaagccagatagagtgcttagcccttgtgctaaaacctggcaaatcctgccaggccaccgttcgctctgtattttccattctctccagagaagtctttaaagcatgtgagtccttcaaatgtagctgctttccccagggagcagtctgttggttgccactgacctcatctgttttctaacaaactttaaagtctgtacatcttgtttccccaccagatgtaagaagcgtggcagaggtggaaagctttgatacatgtgttttatgatggtaaaaaagaaattattcaaggaaaagatgtaccattggcatcatcagttgagagatggtttcctgtagctgttgagcttggagcttcctggggaagaattactccagacataggctgtgttatagtcggaggaggggcactgagtgacgagcagccgggtcaaagcccagcctgcatatgtttttaaagcatcaactgctagtccttgacttgtgaattccctctattcattgtatctgcatattggatgtaagtagccactactgaatgctcatcatgcataggacacacctcattgttgttgcagacaaggctctcagtgtgctgtcaccagttcaccattcggctgcctcagcagccaaggccggctggggttatagacgggctctgttgagacacaccctgtgaaaaacacattcttaaacttttaattgctaagattggggatcctttaaaacagaataagctatgctgtttttcctactgacttacattgcctgggggtctcagagatatgacatgtgctaccatagacaagggattgtaacaaatgaagtggttgcaagactagggaacatggggttctagagaaatctctaggaactgcacgtttgctcatctctttctctcaagattagaaagcagaacacagggaatgtttgaattcaacaattattttaaataccacctaattaataggaaataataatactaataatggttctgaaacataaatagcaatattgtaatgcaaaatgaaaacgcaggtagttaaaacttctccccaaagatattcagttaggcccctgtgtccatgggttgactctgcccccgggcattgctccctaagctgtactgttcacacagcagtaggtactggcagttgactaagggagggtgtgtgggtcagatgctgggttatttgtgcaaggactctgggtccctggagccaatccttcactgaccctgagttgcttggaccatatatgatggttgaagtttaagcatgaagtaggtcaaacattatctacattgcaggagtggcaagtgttaagagcagaatagccctgctgcatgatcctgctcagcccctgcgtttactgtgtaagaacacgtgtgcctgtgcttgtcagttgcaagagggactccagtggtctgtgcctgccagcatttatacctttgtagaatctctgtgtccctgtggttctgtgtacccagaacaatactgcagccatgatggcatgtctcttctaggctaggttataaagacaaagcctctggcttcctggctcctgaatcactggctcttgggaagagatagctgccaggtcataaggacactcaggtagcagcagagagccccacatgacaaggaacatggcctgctgccaacaccactgagcggctcagattctctgcaccaggacttggcaactttttctctgtaaagaacagatagtaaacagtcccaattgtgtactctgccacaggtactgtgtacaagtacggccgtgtactccctgtcacaagtactgagttctgtagacagtttgtcaacagaaaagaacggctctgttccaaaaaacttcacttagaaagcagattgcaagagggtgtattgagctgcagttcccccctcagcctcaggccagcttggaggctgcagtctgactccactctgaggcttctcagaagctctgctccaaccaaagctgcccagccacttccaaattcctgacccaccttaagtgtgagatagtgatttggtaagccactgaattttgaagtgacgtgttatgcaccagcaatccagaaaaagaggctagttgggtgatccaaggcccaagttttgcccaagttagctgttgacgaagctggacagtaggtagactgaggttctttctctttgtaattaacacagaaaggtttgtctaaaatcaaacacccaccccaggcctctggctctgagggcctctgttctcttagctcccttcataattttcataaagattacataaagacatgccatcattgctgcattatctgaatacacagaaccagagactcacagtgggcagggacgccacagaagcataaataaagagtcactgatcacagggccagcggacatcctaccagaggctgggcctcctccctggagtcaagaggcgacgggatccctgatgttttctccaccactctgggccacctgagtccctggcctccatccagtacagttcttgggacttagacgacactgtcactgttgacccacccctggagcccgcctctacctctttgtgctatacactagtcagaaccaagaattgttcgctgctgaaatatgataacacctgggatttacagtccagtcagtgtctctataggttatgctccagcagttcatctcaggcagtcctcacagggcctgcacatacagacctgccaagtctcattccaacctttatttcattctacgatattttatttgtttaaagacagggtcttaattctgtagcccaggctggccttgtctttacatctcctgtttcagcccctgagcactgggattacaggagcaataactagctttataggcaaataaagttctgcctataaagtatacgaagtggatgtttgaagtaacctgtctgttgtatgaatccacatattcccctccctagactgggttgcgagtggctgatgagttgttctggtgaggctagggtcctggagctgggtgattctgatcctgtggtttctggaatgatcatgaggtaagattcaggctgtttcactgtgacaaggttcctggacaggtgaccaggtgctctgggaaataacactgacagagaacaggaagtgagtgagaccatgggagagcaaacatcagaaacccggaccatttcctgtgtgtaggctgcagcagcccatcctcctcccccccgcaccccaaaaatcctcctcaatgttgttcccggtttcaaaggcgatggagagaaagccattgcctcctggtcacctgggaggtggtttggtcctactttcttgctggctctccacttagagccctcagggaagttctgccaggaaacagtcactctctaaggtagatcttgaccccaggcctgtgttggggaaaggcatggcctcctgtgtgtgttttgaaaagtgggtggctgtctagaggctgtccacccccactcaggtgcctgagcctccctcctgcaggaacattcacttgtctgtctttgttgtcttggcaaaaactgataggcatattgctaatttgcaagtctgggtttcctgacaacgacagaaagcaaactggcacatgcctgagaggcagctcccgccctgtctgctctcacacggggtagagattgttttgattcgagacagagtaaaactagattacttttggaagggatgggggtacggaactaatgtgttgacttttttcaagtgtgaactgtacaaaactttttttgcacttatttacttatgtgtctgttaatgtatgtatgtaggcctttttcctggtaacagcaggcaaagtgaagacagagccaaccagccctgctcttcctcatggttcagcccactctggatcttaatgactgttctcaagagaaagcactcttcttcatatgtgtgtgcatgtgtgtgcgtgtacatgtatatacatgtatgtgcatggtcctgtggtgccagggatggaactgctaccacagagattcacagagccttatcacttcatcttgagataggatcttgctaaattgcctatgctggcttctgacttgagatctttgagctgcagcccataagtagctgaaaagtagctgggtctgtgtgtgcacagcctctcctggcctaattcacttctaagtgttgctgtgctataggatcccaaatgtaaatggaccctaggaagttaagagacgcagcaggaagtagaaagaggagcagtggcttcttccttcaaagaatcctccagttatgaatgaaaagtgaggcacaagggcatatctgggatgacctccttccccttgacctggtgaggtgagcctcccccaaaatgatgagataaccccgtcctgttctccagggagattccaggtctgtgctaagagtcagcatctgggcagctggcgaagaacacctgcatttaatttggcagcatccctaggtcaaggggttctgggagcatttctaagcttgtgactctgaggactgggtcagctctgcactatggtgtgtgtgtaagagacataaaaacttaacaagtcatattaccttggaattggccagatgatctctgaagaaccctcatggctatatgaattgtgggttgggatgacccagaggtggtcacaggagtggcatccagcaccattctgtaggcaccctgtttccaaagcaggggatgggatttggaatgttgtggaattagcatcttgactttgcagtaaggaaggataaagaaaaggtttccagactgtgtaagcccatcagtgccgtgcatcgctcatcctcgcccgccacaggctgtgcgcaggacacagttctcctgtgctgttgactccgtgtagcagcatgacattgtttcaaactcatatccgtggattggggtccccagcattttaaacactgcctccaaaaacatggccacagttagttctggctcaagtgttttgcaaataaatgtgttgggtatgggaagtgaaggcacctgcatgctctggctctcagaatgcagtagctgtgtctgtgcactgagtcagcaagaaccacaacacttttgaagactcagcctgggaacaaagccccatgccacccagggccacccagggccgttggaaggaagctggagcagcttccgtgaaaataggattcttcctggggctcaagagccactgtctgtaattccgtgttcgtgttcttcagagaagcatgaactgcttaggggcctttttaaatggcagagctcaaagacaggtactccagaggcagaggcaggaggatggctacaagttccaggctagcttgaattacatagtgagttccatgccaatctaggctgaagagtgagtacttgtgtaaagaaagaagagaaaatggagggggacagagaattgagggtacagaggaaggggaaagcccctcattccagaattcagctgggaacctggatctttaacacacacaagaaaaggagaattgactgtggggcatttcttcttaaagacgtgaagagcacaactgctcacttaggcccagagtgtccgcagccttgggtttgtgtcacagctctcttttatccctggactcaaacagtgcatgtcattagaggaagtctttaagacgaaacaaaaattagtccacccacttgaatattatgatttttatttaacatttttcttcgtcttgaaacctttcatgagcaaagtgacgtagaagccacagaatcacaggttcagtcaccatgcagacacctccgtgtatgtgccccaccccttctcttcctctctccctccctccctctagtcccacctccgctcttccctctgtcccaccattctttgtcacaccctggttcctcctcacactctttgtagccacacagtcaaggctcttgtttcatagtcccccagagatcctgtctcctcaggctactgaggcagagctgagctgagctctcagtcttgctagctgacaatggagcagttggtttatgagttgattgtatttttccttctttttttttacatcacattatgttcaagaatgcttcaattcgatatttcaccttaactactatgctacttgaaagaagtaaaagaaatttgtttttgtttttccagtcccaaaggaggaggcaattacctctagcaagctggctattgagaatgaccagtgtcataggaatttgtcagtaattaggcagtgacaaccatatatgttgggctacaattctagctttgaacaaaagcttaaagattaaaatgtgctgaggaataatttgccagtttcttgtgagctgagggaaagcgaggagtccataagccaccacacaatcagctcctagaaggtcagtgggacacaacctctgtgcattcagcatttggcaaatgccttactctgagtaacttatatgcagtaggcatttacagttctacaaaccaggaaccccgcgattaatgcagtgttggactctgaatctggtgaggacttgcagcctcaaagacaccctcattcaaacacagagccctgtcagggcaagctcacggagtagaggtcagaggggcttgcttaggtcccagtctctgtgtgtgtgtgtgtgtgtgtgtgtgtgtgtgtgtgtgtgagagagagagagagagagagagagatagagagagagacagagagacagagagacagagagacagagacagagaaacagagagacagacagggagacaggcagagaaagagaaagagaaagagaagacagagggggacctctcccttttgtgtgtgcattgctgtgaattcagggccctcgggcctcactagtgcttaggaagcaagcactgtgcccctggcacttagcagtgtcctcaaccatcaagtctgtcttatgagaatactaaccctgttcgtgaaggtccaacgcctgatggctcactcacttctccaaagccccacccgttcatgtaccacagtggtgtgtgagttctaacttgagctgagacacccatgttcgcctttcgtagacttcctggtggaggtggccacccttacattacctctctgcccatctgtggactgtggcaacttaccgattctcccaagatgtcagtctgtttccctaggatcccgccacacctgtgagaacttgtgcctcagagtgcagagtttgccaacggacgagagcactggggacctagaaacacctgccagaggatccaagcaacacataggagcttgggtttgtttcaggttagaacaacatcttgggtcagtttgcagctaaaaactatggcacagatcttaaccattttttcaagtctatttattcaataccgtgagaaattttggagctacattttgcttcacaggagtgtaagcctgcaatctcagctcttggaaacctaaggcaggggagccacaagtatgaggccagcttgggctgtatactgagaccttgcttgaaaaaacaaaaccaagaaagaagacaaaagggagggggtgaggtgtgagccatggaaataatcctgatacttttaaaagcaagccagtctctcagtctggcttttaaactcttgttctactagcaatgagcttgatactaaaatacacacccaggttcacttcccttccaagaggctggcaggcaggctgaggcatcctgaaagatggctaagaagagtagagcctctgggcaagacagactgtggctcaactccttaagcagcactgcactttgactctggcctaacactgcccctgcttccccctccagtaccagtgtccctcggttagaagaaacctttagcttaaagcaacttggggacctcgcaactgctgggctccttccagaagctctaatctagcttttcctgggtaagggaaggggccctgttctaaaagctgtcctgttttaaaagggaacatgtatgaaaacataaatccataaggatattgaaaacaaaagtactgtcagttaacaacctatgtcatctagaaggatgcacatagggctggtaggaaccagagctgagtagtcttggccctgagctactaggagggggcagtgccttctgcagaacactcccaggaacaggtaaatgccaggttcacctcatatgcaaataagggtttgtgtttacacagttacagcatacctcatatgcaaataagggtttatgtctacaccaattacagtctctggcctttagcacccctcacagcagtgcctctctaggccaccaggggaagtgccccactttgtccccaggaagaaatggttacagtgtcttagatctcactggagattgtggtctagtgcaaacagaggcctcccggctgagccagagctgctgtgctcagcatagccatcatgtggttttcttgagggactgtgtaatgttcaagatggctggtgtcaaaacaagggaagcccagcttttgactgacagtcctttttttcaaggcagctagggcagcaaggaaaaggctgatagttatccattagcgtcagcatagcctgacctctgacacttacttacaggaaggtgactatcaggaggactaaagtcatgtcaagatcttgtcattaactttaaaatgatgcttgccaccagcccaatgccccacagacaggtggatccattaatctacctggacacagattggcaccttgaaaagcggggtcagagagtccaaggctgcttgaggataggcagaaccacggaagaatggggtgcagagaaagcaccagaggtccaccaaggacctgtttcgtgtccagcagggtatgtgcatgtgaggaaactgaccagggaatgaaccatcagaacgggggcccacgcctggcatgcaggactagccagtatcattcctgtagcagatagaaaactcagaatttatggggagctgggaggacactcaggaaagcctgcccagccacttagtaggaagtaactcctagctgagcccctcttttgacccacctggcaaaccacaaagacaccacccaaaagcatcaatgtttcagaccttgcaaccgaatgcccttgtaacagatacccaccaactggggctttctcagcctgatgcaggacatcgatggtggatctgtaggtgctctcattagcagaaggtgactgttggccctttgctgtgaggaccaacaggagagtcaagctaagaagggaagaagagagacacataaggcatgtacacagaagcatggggccttgttcccagataactaaccatgtatgtggaaagtaaacctgcaggggagaccaggagcctggactgtgacctgcgcgtcatcgctggccatgcgcctgccccttcatacaacagcagagtcttcctgtaatggaaattggaaaagtgttaactgtccagctttatcatgggaaatttggcagcctctgatctgtgtttttgtagaagctgataagcctgtttctaaaattgacatggaaaataaaggacctaaaaatagccaaactctaaaaaagaagaacaaactggagacgagtggtaatgttttcagagtgtgtagtgaagtcatagtgaagactacttggggagtggggaggcaagtcagagcagcaagtgacctgcctgtgaccacaaagactgcaggtgagtgagcaggggatgattcggcagatgtctctggaaggactggatgtcagtacgcaggaaatcaacacaaaatcacacttgatccccaggggggtcatgccctgaatgcaagttctagaggaaataaggtcagatcttgagaccttgtagcagaaagattcacagatagaatttccaaacttgggtgcacatagaatcagttatgtcaatgtccaaatcttatcagtgttctgagaagccacaagcaaaggaagagatcctgacactggggaggtggagacaggaggatcagggtttagagccagcctggattgcatagtaagatccggttggaaggaaggagagagggcaaaggaaggaaagagtggaggaagacagaaggatctacaggaatctgcctgggtcaagagaggctcccctggagctcaccacctccacccccactgacctgggcctcatctcaggctactgccctgcctctgcccttctgcactggtgggaacagaaggaagcccagcagagactattcccacagacttcagttccctgaaatccacagaggaaagactgaaaacatgggagctgaggaacagccctccccacacatctgtcctgtgacccatcctccaacatttgttgcatgggaagcatattgaagcctcttgagaaaaagagaggcttggtctgccctatgcagggcctgtgtttatttacagcaagggaacattttgtattcatattctctctctctctctctctctctctctctctctctctctctctctctctctgtatgtgtgtgtgtgtgtgtgtgtgtgtgatgggatgtgaccccttagaggagtgggaacagcttctgtagtccacaagaaaagctgagaaatgtagacttttagcaggaaattaacaacatgggaacacagggacttggttggttaattatttcccataagttttagccaatcttgacagaagggggtacatagtctcttaactgttctgagtgtatcatgtatctccctgtaagatggaaaaagttcagagagaaagccaggaacagaaacataaagaaaaggctgaagatcaagaggccaagggagaattctatacagggaagagagaactctagagcagctggctttgtaagggtagtttgagcacaagaggggaggactacaccctgctggaggaagcctggggatgaccaccagaggctgcctgtctgcaggcagagaccagaggaagattccaagaaaggcccagtgggaagtgagttgcctcctagacagggatttccaaacttgagagccagtgtgctagagtaatgaccatagcagcctcccttcctgtgcagatggagtgtggtgggaagtttgctcctgtctatagctcttggaggctgctttgcctgctggtgaggctgtgagtgtgaggagggagctgagctgagctgagcgtcatctccttgccactgaaataaagaccggaaagagctccagcctgtgaccctgacgagggaccaggaaaggcgtacaaaaccccccgaggcccagcgcagcttagctcactatggagaacccaaaacacttagcactgcaggaactggggggacctggagacctcttgtgtcaaaggtcaagactttggccaaggaagaaaaacagccacatggaatggacaacaaagagcacagtttaggatcctaaaccaagcttaatagcagtgagtggacaggtgctgagagaacccagaatgggcttgttagaaaccagcagcatgactgctggctttcaagtcctgatgtgggcatggacagcacagtgcccagacaggcctgcccactcaatggaattgtgcctacagctcagtggagagaatgcctagtcatttccagaagaatgagagggtttagggcttcaacagcctggaatagctctgggtggtttccatagaaagagtcaagatcatgacgtgaacttgactggaaacagattcacactgacctcccggggctggggagtagctgagcaacatcacttaagaactacgaaggcattttctgttttcacatcctgccatccttggcatggttgttcatcatggtcacaagatagctgccactgctccaggcaccacatacctatctccaaaggcagagaggaaaggaaaccttaaacactattatccaggatctagtgactagttcattcatgtcctaactgtgaggcaattgagaaggcatctgccagtgtgaatcctgggctctcaccaccagggggcaaactatggatacaggtggcctaggcatctagagctgctttcccggagcaccactatctgcagctgttgacatagaaacgagttcaggtggaaccatactagacatccaggcccccagttgcattgtgcaagttgcaggtgtttgctagaacattctgtcatcagagctctgtggagacaagagaaacctggatttggcttttgagagatggccatcttctgagggcctgctggaggagtgtgagcctgcaagacatgcctcacagcccagggcagaaagagtctccagcagatagttaggcctgttggcacatacctgtaaccccagcactcaggaggtggaggcaggaggatcttgtgtttgaggccagcttggactgcaaagtaagtctcaaagtgggagggtgtaagaatgtcagagctgttgtaacataggtgaatgtcaagagagacccttgtttatatagtgtggccatgataggggagttaccttatacggagccatttcattggattaataaggcggagttagagataagaaagcaacccctgtggacagaaatatcttttcattttccttggaagaaaggggataggctaaagactggtggggcccaggacatggcccagtgtctccaaacccaccatgcacccgtgtctcactttctgttagttaaaagtaaatggctaagtctaactcactggaggataggagactccacaaaagcttgaaccccagggatggggacagggtcatgatggtcatgagaatcatgagaaatgcctgacccacattctacaacctagctggggagaatagccttcttgtcgtaatgctctggctgtttcctgagagaattttgtttaggggttcacagttttcctgtcttttttcagagggactttaaggtctggaatttattttgtgtttggtttgtttttgcttgtttgttttttggttttgtttgttttgtttttgaggcagggtcacactagtccagggtggcattgaactctccacccttgtgcctcggtttccctggtgctgggtatatgggagtatgccacctcccttagcttcgcttttgtcttattttgttgtacgttctggattctgtcactttgatgcagtttggaaagcgtgagaccacaggaaaacaatcattatttcacagttgaaaatcactaagctagcagtttctttgggtgtataaggaaaaggcttgtttttatgattcttcactgacctgcgtaggggtggaaggttgtgatccacttagctgcttcaggaaacgggggtgaggcatgagcagctagcacatctgtgtgatttgggctcctttaatgttgtcggcagtttttaaatttgaaataataccaaaatttaagttgtgaaaacattcttaggcattctggaagacctacttaaaagtgaattataaatgggatgcccgtttacagttcatgagaggctcactgtctgtggagcatcctcaggtggtccttgcacttttgctttttagcgtagaacattgccctgagagcatgtgcaatccccgccaccatggctctcctccattgaagcttctgccctaggaagtgggacgtggacaaatcggagaagtgaactttctcagccacctgtggaaggaagggaggtgctgagcaaaggcagctgaaactgatgagacgtcctcttcagtccccactgactctcttctgactctggatgacagttcaggagtgaggtcatcagcttggtggcaggcaccctgtcaccttatacaccaggagaaggacacagagtgtgacctgggagagcgcagcatgcctggcctgggctcacgcactgttctcagcgagcagttggggtcagtggcttctgtgtagacaaagaactcagggagccctggagctgggctgcagctgctggtccaggagaaaatccagaggcccaaagtgttctgcatatggccctgccctgagtttccccagctggaggacagaggggaaggcacagagtactgggagaggagatgcaggagggagctggggtacattccagctgtgtttgtggtgggtggactcagaattctcagggactgtaagtttctcacagctcctgttaaaatatcacgatgtgtctgtggaatcctacttctctgaggatgagacccatccctgaaaactgagattccagggacttcggcagaagtccctgctcctgtgtattgtatatgtgtcttttgtaccctgtgagggctgtttagaaggaggtcctctcaaggtgctgaggcttggggtctgagtcacactggtgagattttgtcccctttctttcttctgggtcatgttttgctgtgagatcagccactacttcctgcctgactggaccactgggctgtgtgagccaaggacgcaggtactgatgcccattcctttagaagagaagtatgtttccttgagtcgctcaccagtcacggctctcttcccttctgtcacacctttgaattgaggctctgtaagaaggtacacacgtccatgtgttctgccacatactagtctgggatacttagttcaaaaggaaaaaaaaaagacacccagaatttggttgtgtggcctgcgactgtctgaccccaaaggactctaagaaatagtttcatttcatttcctaaggacatgtaagttgagtcttccatgggctttgctcagtgacagaatcattccacaaaacctggctgtgtgttcctgaagcacttcatccatgtcctcatttcagatggctttcaggtcattgcaggcaacagctgcatctttaccaggagagtcccatgctgggtaacaaccagcctgcctcctgttctgtctgctggtttgggctccacagcagaacatagaaataatgttaggagaaggacaggttatttgaaggtgcatttagtccagtagctattagacggatcagttcatctatctgaaaagcgacctggatgctgtggcttctgcctggaaacttttccatgcagtccggtgaatcttgaccacactggccttgatgacaacattggcttaatccaaagtatgaaagtaatctctttgtcaaagagaagatcttcacatgagatagcacatgagatcgtcacacaagatagcagtcttcacatgagtgaggtgccgtcctggaatgttccagctttacaaagcatggggttggaacagagaagccgctgctgtcagacttcagttcagaggcatctctatccttaaaaccagtgagaagaggccagtgaacttggcatcaggaccatttttggaaatggtcagacagactccatctcaccccactcccagcacttgggaggcagaggcaggcggatttctgagttcgaggccagcctggtctacagagtgagttccaggatagccaggactgtacagagaaaccctgtctcaaaaactaacaaacaaacaaaaccctcatattaaccaatcagacacagaaagaaaggtgcacatttttcttgaaagtagaatccagcttctaaaaacaattaggaaaataggagaggtactgagggcttctgtcttgaccagacagtttagagtcttgggagcatcttcaagacctgaagacagactgactgcatccagaggaacagtagcaatgcagctccgatagctgcaggagagccgtgggctctgtgagcaacacagtctagttagtgttcggggcttgtgggggtttgaataggtttggccctcgtagactcatgtgtgtgaatgcttggccatagggagtgcactatgaggaggtgtggccttgttagaggaaatgtgtcactgtgaggctggctttgaggtcttatatgctcaagcttcgcccagtgtgacagtcccctccttggtgcctgtggatcaagatgtagaactctcagcttctcttccagcaccaagtctgcctgaacgctgccatgcttcccacaacaatgataatggactgaacctctgaaactgtgagtcagccccaattacatgttttccttctaagagttgccgaggtcatggtgtctcttcacagcaatgaaaccctaactaaaaaagggcttctttttatgggtccaggagaggaggaggagttggttgctaaggggtgtatatgggtgnnnnnnnnnnnnnnnnnnnntgacaggcttgtattatgcaagcttttgctcagtaagcatgtccttccccatgatgcatctgattttagtcatatgagcatccaatcttatgcacaggcataaaatattaaatggggagcaggctttcccaaaaagtgcactcagaggacacagtttgtcttattgcaaagacaccccaaatcaatctaccccccgcccccccccccacacacacacacttgcctctcttatgaccaggtagaatcctctgaacacatttgaatggaagttgaccacaaaagggcacttactaagggttgctagggaggggagagtatgtgctgttggagccgtccaaggaggtaaaatggcagggacgaatgtggtcaaagcaccgtgtgtgaaaagctaagatgaaaccattacttaattaaatgacaaagatcgggaaggatggctggcttctcactgtggtgactgcagagatcatcagaatttggtgatcctggtgtcacctaagctcactgtgcgtttgtggcataagaaacatcaggacactcctgtttccctcaggtggacaaagtggtctgtgaaatctcatgtagaatagtaaaccagcctcctctttcagagggaatcatgggagccactgggacatggttaggagggataagcccagacagctgccccgccacctctcagagccacacttgaggcctgtaggcatcaaggtaacaggcctggtggctggcataatgagcccgtgactcactgcaagcaagctgtggttttgattccaagtggcctcttgggaggaacttgctgccgtctgaccagcctgcaagtcaggtgccaggcacagagctccaccccttcactccaacctcatgtctgttttgggggtgcagagcctgtaaagaggtcactttctcctcaaggtcctctgccttcatgtacaagctcatcttattgcaccccactcctctaagaaaggggagcctccaaggcagggttgtgtttagaagctggaagccaaagcctacccagtggtagctgtcccagtgcatcctgggccttgacttggcccaccatgtctgggtggttccaaaatgtggtgaccagcttcagcaatcggttaaatatgctctccttgtctttcacatctggataatccactccacctctgctctctgacatgctctggaggtcgtatctgttgtgaggttctgcttcccagagtcttggcctctggcatcagagcccctccgtccagcagcgtctaggcaccttctttgtgagagttcaggtggctaagcaactgctaacttactttcccatccttttgcatctgactttagaagcctgggttggggctatagcttagcagaagagcatttgtctgttagaggcaaagccctggatctggtcacagcacatcaatagatctgaaactcagtaggccaccccatatgtcatcaagtcctcatgggaccgacagtgtccaaggagctctgagtctcctagcacatgtttttaagagagaaatgcactgcactgtggtccttgtaagggatggttgatcagggtgcatatttaagaacagctctgactgaatcctgagagccaggcagcactggacacatctctcattgtcttcatgtctagctgcattccctcaaaccagtggcttaaccagccactcccccatctctgagaaagtaacattcatggggatgctgtagtggcagggcaggcagaggaggcagggcagacagagcaggtcccctggcttttcctgttacctcctccatcagaggctttgctttctacctcagtgcaggctagaaccacctagggagcttgcaaaagtccactgtctgggctacaccccagaccagttaaaccaggactgaggtgagtggtgagtgagtatgaactgggatcactctatcccagtccagctcccctgctcctgggaagcctcagggagccagatgcagttcaactaaacaaaccaccttgagacatccttcagggtccccggacaccagataaccagctccacttagcacaggactctgctccaaaggaacagaggccacgaggctatcagcgtgcttctctcataaggacactgagctggccacctggggttgctcagtcaaattccttcagaatgtgattgttgggggtcaaggtgttggcatggatgctgagagatttaaagctgggcaacagctgcgtctaggaagcaagtttccaatgctcctgacagaaggtcctgatgctctgagggtaggcttagggagagtctgctatgagtgacggaggccgaaggagctgaggccacaggattcaccagaaccatcccaggtctggggaagcgtgaacagtctcggctccttctgtgttccccacagggaaagaggggcccagctacaggaagccaactgcacttttaaaggactatttggagcatgagtcacaagtttaaaaacaaattccattctctcttcactctgctgctattttatagggaaaggtcagctctattatcttttcctgcctgatgtttatgcaggttttaatttcagagtctccagagcccagttgatgtttaaaggggtggctatgctcctcctctccccagactctaggtcagagttgctgaagagaaactggagagccggtaaccctgggatacccttcagctaggaccacccaactcaattaggaatctccagtgagggagaacgtcctgaaggaccatccatagagcgaggcaaaagtcacaatggagtgaccttggctcagctggctaggccacttagctccgttgctcacggacctgctctagggcaggcaaaggttagccagccatggtacatgacatccccctatcctgccgcagcagagcaacatggccccaagacctcagacaccactagtaccttagggctatcctgagccaggcaggcttcaggagagcctgagctgaccttgaaaaaaacagtgacattgagggatagccccatgggtacagcaattacaaggtcaaatagggacaatggtcacttagggcacggtcattctgggaagaaatcccattcaccttggactccatcccagaggaagcttcttctagaagagctgtggactcctgcatgtcccgtgactgtttgtctggtcggtcatctgcaccatgaagctcccagtgtagatgcatagacacaaggagcagcttgcacctcacaagactcttggaagctacccagttctctccctgcctgaaacgccagggtctgcctagattcaacatatctctcctctaaatcaagtcttatttcctgtgttacttgtcagtcaggagatagatgcttatacccgaccattcatgcttttagtcataaagagagtctaaaagtttcatagttgttcagggatgtcagctgtcaaggtcgtggtgaatctgggctgcaatgtttgagtttccttgactggggcagtttcacagcagtagccaacaggccttatgggctgtgacagacaagggtcttacctcagggaaggtgtaaccaatgctggggcttgtttctgcaggtttgtggactaagtcaaaccaactgcaccattctgctggggcacatcatagctgtggggccctgggcagggatggccctgagccagcctcaactctggtgtctacctagtgtcccaggcccttgcacaaaaatatttcctgatctggccaactggtcaccccattctaccttcccctgcatagatgtagaatggggctagactccacagccacccctgagtcacatggaggaaaacagagctggctctgaggaacagtaggctgagatgccttacacctcatagattgtcaaagcagagacaagttcctgttcatggccttggaaggggcctttctacctgtgtgacacatgggtcctgagggggacaacctggtacatgcaggctagcactgtttgttttcataggtgaatggtcattattggaaacccctgctttaagctacatcccagattatgtattcagaagaagccatgctctccagtgcctctgggagacatgtctgggatctgtaggacggggggagggagggacactgggagctttctccagctcttcccaggtaggtcccaaggtgttccccagggaggatatgggctatgtgggtggcagcactgtctgtggggcagcaactgaggaaggtggtagacacatctctgcacagatggactgcctaggttcacaaggccaaattttctagtcactcacctcatagggacatagtaaagacttggtcttactttggcgtcctgtcttttctggggtcctgccagaggcttgtcaggcccctgtattctgggctcacagcagcatttctacctataaaaatcattcttcctaagcaggtaaggaacccaggaagtaagctttgggcagtggcctaggggcaatctccttcctgaggttcccgacctctgcctggtgtctgcagaacggagcctctgctgtgccagtaccacccatagactctcagggttcacctgatattctgtattccctcaacagcaaatgaagctggtggcagaaaacctgaaggaggagtaccaggaagatgggaaggaagctacctgagctgcaccatgctggccgtcctgtcccctgtgctgaaggacacctgcatcacacctgcacagggaggggacagcagcctgaacttagccctgatgctgggctgtgtgaagtggctaatatgcagcaggcacaccaaggtctagctctgtgggaaaagtggctgaggctctctctcagtacctctttccctggtgcctctcactcggaccctcccagggccgcacacaccctccagctgtttcatcactttgctcaggagcctcagctgcctttgaacgttatccctaaagagtcaccagctttccacatgacattcacagtaggtgccagtcacttctaaccccagggaccctattatggggtggtggcttagtgtctgtgcccattatacccatggtgggaaccatgctgaggcagcggtggtcggggagtaggggcacacctgaatctcctccttgcttctgtatggtgttatgttgacactttgcaactgagctattaaaggcagcccttggctccgactcctgcttctccaagacttggcaaatgtttcaagctgccccacccccaccccccaggtgaggttgtgacatacgcagcaatgagatggggatcaggactgaagcgaaccccaaagcttacagccaggttctgtggggacactgatgctctgacacctcaaggggcccagtatgggctgtaacctgcagcagaatggtgtatggccagtggtgctgtctgcctccccagctgaacgtacagtgtccactgatttgcgggtttgacagctcacccaggaagccagctctataaagatgggagctcatgcccttgctggaccctgtaagccatcctgacagctatttagatggcaggctctaggttcatcctccttagcaggaggttgggtagcctgctccatgcagctcagtggtccactcctgattgcccactttacccagagaagaggccatagctggctcagtatcacttgtttttagaagctctgaccctgaactttgtcctcacccttacttgggaggacatactacaaggcatgattatgtagtagttgttggtttcctgatggaactttctagatcaggcttatgttttaaagagcatatgggcagccaccaaagccctgagaccccagtctccttagcccaggaattaagtaagacccttggccctgcctcctgggttcccacagagtctaagctagggcagcagtcacaggaacatagctgattgtgaatcagagactcctgggttaccccgtctaaatctatcggctcatctgcccacaagtggtcccagctgcggcctgtgcaagttcagcaggcttccctgaactggcgactgctgtttccacatgccccacttctgccaccagagagaacaggaccctcccctgggcctgtggccacaggagaagatgggtatgggatagaatgcaccaggtgacggccgagaggctctgagagggctggctctgtgcctatgtgttcgtgttcccaggactcagagcaggtggagtatggtacacagcagccattccagactctgtggtgtgggtgaaagcagaagtttgtagccccattagctgctctgcattcctgttgtcccttgtcactggactgaggagggcacctgggaaggtgccatcccaccaggtcctttccttccttcctttcctgcttgctcacattaccttatttccctgtaatgtcctggtcactgacagcttccgtatcgctggcccttacataccagccatgacattgccctatgagccttgggtctttactaaggtctccaacaccaccctcagtccttgtgatgactgacacccaagaggtccaggaggcagggtcaagggtcccatttgaattcctgggctaaggagaccatagagtctcagggcttctgccattctccctgggcccagaggatcacctgtgtgaaaccctctgcttttggttcttgcccattccaaataccaagagttggtccccaagttctattaacaggctcagtcaacatgtcagtccccacctgactgggaaaaaatgtactaggagtcagttcccaggacagtggtaccatggtcaggcagggggaagcctgtgaaggcccgaagtgcagcccattgctcagagcaagagcccaaggaggaaggggacagatgcaccctgggaaattacaggggactccacatctactgctctcctagccatgcagatgctttcacagaagtccttgcgaggcgcaccatgtaggccagtcgtgggacaagagccccaggcatgagggactcacacataagcctgtcccacaggctttacctggaaggcttcccagcaagatgtgatatgaagcagctgagtctggatgcagccaggagataagtatgcctagggacagctacctcagtgtccaagtcctcacaccagcaggttttagcagatggcagggctgtacgcagggtcccaggctctggatcctagatacaggcagaccaaactcattgacccagagactgtggagcctgggcctcactttgcctaactaaggactagtttcccccaccacatgcaattcaaacttgcttccctgccaatacaactgccaatgagtctcacaggttgttggtagaaatggatggcactggggttggctccaggccaagtcacttggcagtcaaacttctgtggcctgacacgcatggccagacatcccccacccccaccccgagcaccttccaccacacctctcactggaggtctttctgtctcatgtttcagaccagagagcccatggtgggcctgagacaggctagacctgtgctggtggccctgggtctcagacgggacgtctcccccacaccattcttgtttgtaatcatctgtggcactgttaactccctcatagcagctcaaaaatctcagaacttggatacgataagaccagtgttgaaagaagcccagccaggctttgaggcagaaagccatggtccccccacccctcccttctctatctcactgggtccattggatagacaaggaagcaggtattcagaacttgagtgacctgccctttgctggctatctggactgtgtccactgccctatactccatctcacaggttcccttcccagcatctggcatcctgttcccagccttaatccccacacctcttgccttcttctagtgggaaacaagcatccaggggaaaggggaaacgtgaaaggggaaaggagaaaggccacaaggtgagggccaacacagtccctacaggaaccctgtggcccgtccccatggggtcatgcctgatacagtgctcccatcaatggtcagatgatgcggcccctaaggaactccatgcctgccttcatgctccatccaagggtggcctgaggagaaggggacctgacaatctggatcctttgccagggtagccgtgctcttgggcttcctgtcttcagtttgggaacacacttcttttccaaccacaaaacggaaggaagatactttccttaaccccaggagagtcttgtccatgtttgttcaagtgggcaccagggctgagaatggaggccactgtccccaattctctaagcatctcaaggactggtaaggaggcaaagggggcaggcgagctgacaggggacagaggacaaagtggggccggcgagccgatagagggcagagaagagctgcgtggagaaccaactggtgtaggacacccagcggtcacacaaaataagttaccaaaccaggctacacatcatttcagaaaacaagttttgtatttttaaaaagactggagtaatcgtattctgatgagaagacagaatccagctagaaaactcagcagggactgagatgggaaatccccatacttggaaattaagcaccttgtaaaacaacacaatgtaatgatttatttatttgtacgtgtatggggtatttgcctgcaggatgtctgtacactatgtgtgtcttgcccaaggaggccacaagagggtattggatcattcaggcctggagtcactgatggttgtgagctgccatgtgggtgctgggaattgaacccaggttgtctgtaagagcaggcagtgctcttggcctttgagccacttctctggtttagtttaaatggacctcttacatttctgggtagagaacagacaacagaagtagaaaaccctggggaactttcagtgagtgaaggtggagtcacataccagggtgccggcaggagaggttcaggcaggaccaacacagaggctaagaaagactcactcagtcacagaaggatgctgggatcttggcttcatggccagggtggcagaaaaacagagccaaaatgagacttcctctcaaactgtcttttatcagatattttatctcagcaacaaaattagtgcagaacagtaggctcactgccatgatcaatctgtgtgggtctgaggcctttgggactattttccaggagaaatgtgagagttttggaactttgggccagaaaaactctcaaatcctgttaagtggggatcgatgggtcattctggaaggaacctggaagacaggtatactgagagaaatgaaggcagtggaggtcccctcatgaagttccagagacatgacttccttaggagctgggctagacgctattcaaagtatattctagcaaagatcacccatctcccaagatcttgagatgaacttaagtggactgatttgtttgatggaagaaatttcaagacattagaccattcaagctatgacatagctattccacgctgctgttttacatatccatggtgaaaaatgagcaaaaatctgggcaagatctttaaaattcagtttgatgggggaaaagatttcaagcaaattaaaaagtcccagacaaagagcatgcatacaccagcactgctgttgctgtggagattagcaccaaggagaccagtgctcctgctaagaagccctagggaaagacccaacctcatggagggcctgtcctatgaaaacagtgtgctgtgctcaggatggcaatgcacctgctttctctctgagttcagagatgtttactctgaaccattgtgtgctggaagcttgttcattttacaggtgctcatggctgatacggctttgcatttcggatgagactcgggctcaggaccttttagatatgctggaactgttaaagactatggggcttctgaagttagactgaatgcagtttgcattgagacagccacaaacctgtctgtctcagggaaggaaggggtagacgtgctgtgtttggataccaagctggcaagggacagagtaggatccaggatcacctaggagacaatcctgtccttacctgagaggattatctagatttagccttggggagaaggaggaggtctgtgaggaattaaagattagctgaggtagacaaacctatcctaattgccagacaaatgagagctgagcagcagcacacacactctggttcctgactctagatgcatatgacaatctatggctatcccgagctcccacctccatgccttccccactatggtggactttattctcgagccaaaacataccatgcctcctttaaactgtcagccaaggtaaacaagcaaccagtacaggccgctactaagaattcctgttcgtagaacttctgccgttgccatttgaggagcgagtaccaccaggacaggaagaattccaaaggcttgggagagtgacatgctggctagatgtatctatgtattgagtcagaggtggtgggtatgtgttcctgggggagatataggtatgtctggaaggcttgctggcctatggtcttgagtttgcaccagttagttaaagtcaacgttgactcatctctttgaggcagagaggaagaggagtctagaaagatggcatatctctagctggaagaacccaacttagcaaattctctcacacaactgatgttggaccctgggctgtgactgccgaagaccagtgggaaagcagaggaaaaagcaagctgatcttgccacaagaccttgttttggatgtgtgaaaatggattatggaaatagttacacaaaccattgaatgctctaaaactgactgaattgtgttacagtcaaatagtgtaccacgtgagatgtctctcaagtcattccaagatctgtcttctggattttgcaaatgaaggttatgctgaccagcaaagtcaccgagccaggatgcagcagtaagaggacctagtgtgccagcaatgtgaggaagtggactgcaggtggggcagcttttggctagagtggctgccaatgactacgacaggcctcatggctgccagggagagggcagaccttggtaccacagtaaaggaagggcagaacacgtgcggacatacaaagcagactgtgggggcgtgtggcagttctaatggctttgtttgctaaagtaggaaccagccaaatgaggacaagcagatgaaacagaattaagttctggattccttctgtccagacggtttaaaggaaatgctgccctttggatagtaaactaggcctctctggtgccacctgacaccggtggatagaactgtttttttcagccccaccaagtgagcagggcccacagaaagcaaaccgcatctcctagtgctggactgggcatgtctcataaaaggaacacagactcggcttctattgctgaacatcagtatgtcactttattattggattatttcccatctgtcacatacctgtcaatgttcacacaaggaaaaagactggtcagaactagaggcatctgaccaattagctgacaagtttgtgttctcagcacataccaactctggctctaggacatctttgttcaggctcatgactattaaaattggtgtcaagattgtcacatctttaaatacagatagaattccagaagtacataattatatatatatacacacagaaaaatacaagactaactttcccacaatatttaattatacactactgtaactcggctaggggacgagtccctggctacagcaaggacgtagtttggtccactatgggtgtggtggttctgctccttccctctgtgacgacacccgtgacactgtgacgacaccccgtgacacacaacacatgcacagacatccacttgtcaacaaatgggtaagacagcactcaacagacattgtgtacccagagggtcaccaaccacacacaactaataaggctatgacacagctctgcagcataaatggccgacactgctgatctaaagtgagcaccgtatatacacctgaatagaaaaccactggagaccaaacgcagacgggtgagtgcagaggcgccgctcagaggctggccgtgaccacagaagagtatgtacattacttgggaaacagctgcgacagtttattgcaatgcccctatagacatctctcctggctcacacagacgtggctccgtctctgagaaccacgctggtttctggcccttggaagatccctgcttaagaatttcaagcaaatgtgctctatggcttcacccacgtctcccctcacagctctcaactatgtgaatgtcacactgaatgggactgcagcttaaagcacaagcagttagctagctctaggaagtagcttaagtatcattttacttagtaaagtcaggttacactgtgaagttctgagtaatatacactaacctaaagcagcagtcactgagcactgaaggaagtggtggcctgtgccctgcccgctctgagacacatgctcagctgcactgttgtccctcagaacagggcagcagctgaagagtgaggaaaggaccctgggccagccgcacctaccccacaggccgcttaaacactgctttcaatcccttgggcaccgtgtgaaaacccagcatctgggcttcccaagatcagggaggaggcctgcctcaggagatagctatcagtccggagtcgtcggtgcgggagagggcaagctagcgctccgcgctcagcacgtggcaggaaggcagcagtgtgccactgacggctccaagcactaccctttcctgagcagtttcttaccagccgctcttcacagctgagccaaatgctgccatgaaatgggagaaacctgaggccacctcaccaccaagctcctgaaccaccacctcaggatgtcctgcctcctcgtcagagtgctgactttgctgcctgcccctgtgtgcactgtggctactgcagcaggccctccgcttctcctctccacacaggtttgaaggaaaccctgccttgtgtcctgcaggggaaacttacacagagcctctttttttttttttttttttttttttttaatttttgttctgtcagacagacatacacactctaagtagagttaagacttgagttcacctcattgcctcacagaagattgtctcctgggtaattctatgggtaagctgcctctcaaagctaaggagctgacctcacctaacacaaacaagacaatctctgtcagtgaaaagataagagccccaactgctttcacactattggttaagacaaacaggtgtgggcgctcaaaccgtggctctaaggttctcggtgcacaggccctgggtggctggcagcgggggttgctcctcccaggcctgtgggcatcaccacgttattgctttggttctgtctcgggcaccagtgtgcctcagagcatggagtttccctatcaccggaggtcaagacaggaatttgggcttttcacaaggaaacgaaagcattttccctccaggttaagtgcagaacatggatttctaagcgctccatttacgttgggttccagataacacaatttcatcctggtcatccacactgaaaatcatgaatgtaaaatcacacagtagacttttcggctggaaaagaaaagtagcgtgtagcagcatgcacaaagaccatgcattgtcacgtcagaacagatgaagtgagcgcgctttacaggtcagatgacatggcagcagctggcggggctggaggcgcagagcagcccttccttgcggctgcgctggatgttcacggagatggtcttttcgcacagaggtagctggagcgcgttgttcctcagcttcttggtcctcaccgggtcaaggtcagcagaggggctggggcctggggcgctgatgcacatcttccacgtggacttctcctgcaccttcacgctggagaacaaggccttctgcgggtccagaatgtacttggcgccatgcagctgtgagcctaggcacaggctcacgagtttgaggctctgcacaagctctgcaccacgtggagcggcagaggctgaggcgggggagggtgaggatgagtcagggcctgcacagcgccttgaggaccctgctgtacccgacggggtcccaccagagcctccctggctgccaccacccgtgccctgctcacccgggctggccttgtccacaccgccaccgctgctaggcttgctctggccgccaccatcgccctcgctgcctggtggcccctcactgctgtcacgccggtgccacgagtaagcaaagccgctgtccttgtccagcctccgccggctctcggagtcgtcatcgctggtctcagagctgctgcagctagagccccggccctggcttttcctgcggtggtagcgcttgtgcactgtgcctggtgaggcaatgttcatcttcagccggctcagcttgggcggcaggttctcgtccatgtcaaactcgtcgtctgactcgccctcctcgaagatctggttgagcactggggcactcttgcgagacgtcaggcgattggtgaccgatggcttccggcgcagcaccacctgcgtggacagggacacaggcttcttgtcctcctcatcctcctcctcatcttcttccaccctgaagagacacttgcgcccactggctgcgggcttcatgcttgcaggtggaacagtggacagtgccggcccagccagctccgggagctcatctttcttggctgggtcacacaggcctttgctcctgtggccattgaggacattgtcaccagccctagcaggagactgcgggactgtggcatgtgacagaggggtggcagtgagatcatcttcaaggtcttggggtacatcaattttggttggccatgactgcctgtgtgatagaggaaaaagaaactgtcatgaagttgctggcctgtccaagtgttaagagcctgctttctttcatatgctaaccacccatgggaagtcagatgtggcaggcaaagcacaggttatccggcactagccagcaccaccacagttggtggatggagactggagaggttccagagtcactggccagcaatacctgcacagatggcagagaagaccctgtttcaaagaaggtaggtgaggaccaaaacccaaggtgtccttgaacctctacaagcaagccatggaaaacaggccttcataatgttgcatgcacacagagttaggacagaattcacacat

SEQ ID NO: 1749 - DNA, 2588 bp, Mus musculus
cagtccgccttagcgccgcgggcctggttctccccgctcccgcggtccccgaggacgccgcgtgggcggccggaggtttgccaaagatgagagtgactttatcaacgctggatacttgtgagagctccttcacacctctagtggtcatagaactcgcccaggatgtcaaagatgaaaccaaagaatggctcaaaaacagaatcattgccaagaagaaagatggaggtgcccagctattgtttagaccactgctaaataagtatgagaaagaaaccctagaaaaccagaatttataccttgttggtgcctccaatgtccgactgttactgggggcagaagcagtcggtctggtgaaggaatgtacggacgctgccatgcgggccttcacctatggaacacgccacaactttaaaggtttccatgataacaataatgacttcctcaccatggctgagtgtcagttcattatcaaacacgaacttgagaatcttagagctagagacgagaagatgatccctggctacccacaggccaaactgtaccctgggaagtcgctgatgaggagactgctcacgtctggcatcgtgacccaagtgttcccgctgcatgacactgaagccctgaagaagctggaggacacgtggtacactcggtttgctctcaagtaccagcccatagacagcattcgtagctactttggggagacaattgctctgtacttcgggttcctggagtacttcacctttgccttaatccccatggccatcattggactgccctactacctgtttgtgtgggaagactacgacaagtatgtcatctttgcctcgttcaacctcatatggtccacagtgatcctggaggtgtggaagcgtggctgtgccaacatgacctatcgctgggggactctggtcatgaagaggcagtttgaggagccccggccagggtttcatggagtccttggcatcaattcagtcacgggccgggaggagcccctctactcgagctacaagagacaactgcgcatctacctagtctctctgccatttgtgtgcctctgcctttatttctccctttatgtcatgatgatctactttgacatggaggactgggccttgagtctccacgaggacagtgggtctgagtggaccagccttctgctgtatgtacccagcattgtttatgccgttgtgattgagatcatgaaccgcctctatcgatatgctgccgagttcctaacatcttgggagaatcacagattggaatctgcctaccagaatcatctcgttctgaaagtgttggtgttcaacttcctgaattgcttcgcctcactcttctacattgcctttgtcctgaaggacatgaagcttttgcgccagagcttggccacactcctgatcacctcccagattctgaaccaagtcgtagaatctcttcttccttactggctgcagcggaagtactgtgcgagggtaaagcggaaggttcaggcattaaagtctgaggtcgacacaaccttgtatgagcaagtcctcctggagaaggaaatgggaacgtacctgggaacctttgatgattacctggagttgttcctgcagtttggctatgtgagccttttctcttgtgtttacccgctagcagctgcctttgctgtgttaaataacttcactgaagtcaactcagatgccttgaaaatgtgcagggtcttcaaacggccatttgcagaaccttcggccagtattggcgtatggcagttggcttttgaaacgatgagcgttatatccgtggtcactaactgtgctctgattggaatgtcaccacaagtgaatgcagtctttccagaatccaaaacagaccttgttctgattgtggtggccgtagagcatgcactcttggctctgaagttcatactcgcatttgccatccctgataaaccacggcacatccaacagaaactggccagattggaattcgaatctttggaggcactcaagcaacagcaaatgaagctggtggcagaaaacctgaaggaggagtaccaggaagatgggaaggaagctacctgagctgcaccatgctggccgtcctgtcccctgtgctgaaggacacctgcatcacacctgcacagggaggggacagcagcctgaacttagccctgatgctgggctgtgtgaagtggctaatatgcagcaggcacaccaaggtctagctctgtgggaaaagtggctgaggctctctctcagtacctctttccctggtgcctctcactcggaccctcccagggccgcacacaccctccagctgtttcatcactttgctcaggagcctcagctgcctttgaacgttatccctaaagagtcaccagctttccacatgacattcacagtaggtgccagtcacttctaaccccagggaccctattatggggtggtggcttagtgtctgtgcccattatacccatggtgggaaccatgctgaggcagcggtggtcggggagtaggggcacacctgaatctcctccttgcttctgtatggtgttatgttgacactttgcaactgagctattaaaggcagcccttggctccgac

SEQ ID NO: 1750 - protein, 651 aa, Mus musculus
MRVTLSTLDTCESSFTPLVVIELAQDVKDETKEWLKNRIIAKKKDGGAQLLFRPLLNKYEKETLENQNLYLVGNVRLLLGAEAVGLVKECTDAAMRAFTYGTRHNFKGFHDNNNDFLTMAECQFIIKHELENLRARDEKMIPGYPQAKLYPGKSLMRRLLTSGIVTQVFPLHDTEALKKLEDTWYTRFALKYQPIDSIRSYFGETIALYFGFLEYFTFALIPMAIIGLPYYLFVWEDYDKYVIFASFNLIWSTVIVWKRGCANMYWGTLVMKRQFEEPRPGFHGVLGINSVTGREEPKSYKRQLRIYLVSLPFVCLCLYFSLYVMMIYFDMEDWALSLHEDSGSEWTSLLLYVPSIVYAVVIEIMNRLYRYAAEFLTSWENHRLESAYQNHLVLKVLVFNFLNCFASLFYIAFVLKDMKLLRQSLATLLITSQILNQVVESLLPYWLQRKYCARVKRKVQALKSEVDTTLYEQVLLEKEMGTYLGTFDDYLELFLQFGYVSLFSCVYPLAAAFAVLNNFTEVNSDALKMCRVFKRPFAEPSASIGVWQLAFETMSVISVVTNCALIGMSPQVNAVFPESKTDLVLIVVAVEHALLALKFILAFAIPDKPRHIQQKLARLEFESLEALKQQQMKLVAENLKEEYQEDGKEAT

SEQ ID NO: 1751 - DNA, 275915 bp, Homo sapiens
gagtctcactctgtcaccgaggctgcactgcagtggcatcgtgttggctcactgcaacctctgtctcctgggttcaagcaattctcctgcctcagcctcccaagtagctgggattataggcgcccaccaccacgctctatatttttagtagagacggggtttcaccatgttggccagtctggtcttgaactcctgacctcaggtgatccacccgccttggcctcccaaagtgctgggattacaggtgtgagccactgtacccagcctgtaactttctttttttttcttttctttcttctttttttttttttataagcactttcttttgccatagaaaataatgggttctctacattcattgaggtaagttgggtgtgttatgtagaatcatggaatttccaagctgaaggggacccagaggttatctagtgggtccctctcatacaatgagaatatttttaaacaaatctcagaaagaaaaaaaaagcactatgtttatgccaagtctgaagaccttttagtagctggaacacctaacttggcttttgctaatagtaaaaccctaatttatagaaaatcagttggcaactctggtttgagaagggtggatactataagcattcctcctttctcttagaaaccactcagcagtaataaggccaactgaggaacagaaatgaaaaccccacctttgcaaaacaaggagatatctcaaactcaaaaccatacaaaatgtgggagtggtatcaaggcagtgagggttagtagaaaagctggagaaggggttgcagatctcaaatgaggctggtgcacactacaaattaaagggcttgtgggagaaggtcacaaagccagatcctaaccagaagagcaacatgtggaggacagaactgaatgaagatgcagacaattcatttatttgcaggaagcagtctgccagtaaacatggagagaagaccgcactgacagcagccttccagctgcctagtttttggcttgggagaagtaaagactaaaacaattcactcactcagtcttgaaccatcagtcaaactccttccagccaggaaactgggctctactaacatatacctcttgcaggtagctcacgtgagggaaagtgagacaaccgatcaaacacgagctggtagcacttcaaaaagaagtgaaaggggaaaaaaaaggcatcaaagaaataaagaaaaaactggaagcagtccatgaaagaacagacactaaagaacactcagcaagagatgtgaagagcaggaacaaaaacaatgtgcaaaatagagtttaaaagaattagacagaataagttacaattttaaatatggaggtcacaataggattcattgagaaaataacgttttgagcagtcttagggaaatgaatgagttacttgtgctctgggggacagtattccaggcagaggtaacaaccactgccaaggctccaaagcaggggcatctgggtgcatttgaggggcagcaatgttacttggggcatatatactcataggaggttatgtcattgtgaagtctgcaccttaacattctaaactccccttctctcttttgtttaataggcttttttttccctctgaatttaactttatcagaatcttggctttattggtgtttatatttgcctggtgtgtctttgcccatcttttattttaaaactttttgaatcaatttgttttaggtgtgtctctcatgtagagtacagagctgagttttaattcatccagtttcaatatctttattcacaaatgattttagtatttagattttagttttagtatttagatttagtatttagattttagatttataataattgataggacaaatatgttcatcctagtgctgtcattttattttttcagttcttatcttacttgatctagcatcaacatatggcagaactcctctttaattcagattgtttgtttgcttctgagacactgcccttccccattctctgggtttaccttgcatctcattggccagtctttcccaagttcctttgctattttctcttctctcaacttcttactattggagttaatgattgaggctctgtccttggtcctcttcccttctataactgcactcacaactctggtgagttcatccagtctcatagcatcaaatatcattttctgttgataacttgcaaattcttatctctagctttggcatctctcctgaatgtcagaggcctatttactgactcagatttccaaaaggcatctcaaacccaagaatatccatcgcagggctcctgaatttctcccaaatctgattttcctatagttttccctacctcagttatcaattgactcctctttctctcatactttacatctcatatgtcatcaattcctgaaacttctaccttcaaaatatttctaaaatccaactacttctcatcagttccactgctaccaccctggtacaatcaatccatctcttgtctcaaagattgcaacagccagcttccatccttgtgtctctgctgtgtatctcaacacagaagcctgagtgattctgttaatatttaattctgaataatgtctctcatctgctcagaattccccagtgactcatttctcttagaataaaggctaaataaggaaacctattaacaaaactcacaattactaagaaaaacaaatcacatgactatcttcatagatgatgaaaaggcatgtaataaaatccagcattcatcctaataggtaaagaatttcaacaaaataagaattgatcaattcttacttaattataaaatatgtttatctcaaatccaaagtcaatctcctccttatcggggaacctgccccgatagtcacataggttcttttctattttccctaagcattggctggtttgagaaataaagggacagagtacaaaagagagaaattttaaagctgggtgtccgggggagacatcacatgttggtaggttccgtgatgccccacaagccgcaaaaccagcaagtttttattagggactttcaaaaggggagggagtgtgcgaataggtgtgggtcacagagatcacgtacttcacaaggtaatagaatatgacaaggcaaaatggaggcagggcgagatcacaggaccacaggactggggcgaaattaaaattgctaatgaagtttcgggcaccattgtcattgataacatcttatcaggagacagggttttgagagcaaccggtctgaccaaaatttattaggtgggaatttcctcttccaaatgagcctgggagcgctatgggagactggggtctatttcacccctacagccttgaccatagaagacggccacacccgggggggccatctatagacctacccctaagtgcatattctctttcccagggatgtttcttgctgagaaaaagaattcagggatatttcttccatttgcttttgaaagaagagaaatatgtctctgttccgcccggctcaccagcagtcagagtttaaggttatctctcttgtttcctaaacattgctgttatcctgttcttttttcaaggtgcccagatttcatattgtttaaacacatatgctctacaatttgtgcagttaaggcaattatcacagggtcctgaggcgacatacatcctcctcggctgacaggattaagaaattaaagtaaagacaggcataggaaatcacaagggtattgactggggaagtgataagtgtccatgaaatcttcacaatttatgtttacagattgcagtaaagacaggcataagaaattataaaagtattaatttggggaactaataaatgtccatgaaatcttcacaatccatgttcttctgccatggcttcagtcggtccctccgtttggggtccctgacttcccgcaacacctccttgctgagtaaacaccaaaaacatattcttaataccagaaacaagacaagaaaggaggaaaaataattattatctttatattatatgactgtaaacttggaaatcctaaaagaaccaactactatgcacacctgtagtcccagctactcaggaggctgaggcaggagaatcgcctgtatctgggagacggagattgtggtaagcctagatagcgccactgcactccagcctggtgacagagcaacactctgtcacataaacaaacaaacaaacaaaaaacccaactactataaactatgagattttattctgagtataatattaatataccaaaattaatgatatatatatatatgtgcagcaactaatcagaagatataatggaagaaacaacagtttctttagcaattagaaagataaattgcctagaaataaactctataagaaacgagcaagatttatgtaaagaggtattagaggtcggagtcctaaaaacaacttcaggctctccagttagatgcactatcttggtatcaggcaggtggaggttaggaaaccatcctcctgtggctttggacacctcccctgaataggaaggttgtggcttctttgtcacaagtttcagtccttattcttcagcttcctgggtgttaagaagcagtagtgactgtggcagcttcttgatcaaactcagaaatccctagatcacagattaaggtgtccacattcaggccatggccttggtgccaggcctagcctggctccagtggcctcagacccagcagcttccttggtagactggcccagtagagttgttcactccaagatgtccagcccagagctgtttctccaggccttccaccgatttggtaagaacttagttctctttattaaatatcttcctgtgtaaaatacacacagtgatttctgttttctgtactgaaatttgactgacaagtttggtattggaagtggttgcagaaatcaaaccctgaaactgggaatctggtactggctgggtttgaagacaatggtggatggtggccttgtcacttagtggaaaatgggatgctatgaatctaagcatacagaagaaaaattatgtaaattatcaccttggatgaacagtgaaagtacatggtcaccttggatgaacaatttactgacagtgagtcttcaatggctgctattgtaggtggttatgaagggaatgagaaatacaggaactgctgggtgggtgggtgggttgacttttctgattgtattgtagagtttaaagagagagaatgaagtattatgaagattcaaaaattaaaatcttatgattctggtacagagataaaccaacagattaataagacagaatagaaagttcataaatagggaaggaaatttagtatatgataatggtggcatttaaaatcagtaggggaaatacggattattaatgaaatggggttggaaaaatgtgtagctatcaagatataaagttggatccactccatttacctcaaatcaaaataaattcctgattggtcaaattttaaaagtaaagaacatggctgggcatggtggctcatgcctgtaatcccagcactttgggaggccaaggtgggcagatcacttgaggtcaggagttcaaaagcagcctggccaacatggtgaaacacagtctctactaaaaaaatacaaaaattagccgggtgtggtggcacatgcctgtaatcccagctactcgggaggctgaggcatgcatgagaattgcttgaacctgggaggcagaggttgcagtgagccaggagtacaccactgtactccagcctgggcgatacagcgagactcagtctcaaaaaaaaaaaaaaaaagtgaagaacataacatcatgagatgtaaacaagaaaccatggaagaatttaaaaagtaattgggccaggcatggtggctcatgcctgtaatcccagccctttgagaggccgaggtgggtgggtcacttgaggtcaagagttcgagaccagcctgaccaacatggtgaaaccctgtctctaataaagatacaaaaattagttgggtgtggtggcttatgcctgtagtcccagcttcttgggaggctgaggcaggagaagcatttgaacccgtgaggcggaagttgcagtgagcctagatcatgccactgcactctagcctggggaacagagctagacccgttaaaaaaaaaaaaaagtaattgaagagagagagaggtggaggtctttctaagtacgatgcaacccagaagtagtacgtagtaaaagaaaagcctggtaaaattgaccagttagaaatagaagttttcacggccaataaacaaaaacaaaaacaaagtagcataagataaatcaaaggacgtgacaaactgaggaaaagttttgacattcatatctaagaaaaaggactgttctattatataaagagtttctatacatagtagaaaattagacaatacaaataaatagataattcacagaaaatgaaagacaaatgtctctttaacctgagaagatgctctcgaactcactcttcataagaaaaatacgacttaaaatgttttttcatctactagattgatgagttccatttctgaccaaaatagagtaagtccactgctgcccatgtctgctactgattgatcactactaaaacctctagataaaatgtaaagaacaactacccaaggactctgaaaagtaaataatagcaggtggatcatgatggcagggaactcaaagcctgaagaaagacagatagagtagtagtgagagtcttgtttttatttttttctcctttacctcttggctttgatctgaggacagatgaatagggaattgtcaaccagacactatcagcaaaatgtccgagagaagccggaccatgtagccacaggaccaggaaaaaagtctgctgcaagctagagaaagtggtggaaactgctgattcctttttttctctccctccgtttccctgaagccattccctgtctgggagctgccctgcagtggtatggtgacacagtcacctgagagaaaacctgtccttctggacagaggagttgggaaaagggactcttggaagccagagagaacatggaggaaatacccaaagagagacaagtggagaaaggaatccctaattctgtgtaattgtttgacatgcagtcataggtaattgatacagtagttctccttagccacagtttctctttccatggtttcaattaccttcagtcaactgaggtcagaaaacattgcatggaaaattccagaaataaacattgcataagttttaaattgtgtgccattctgagtatcgtgatgaaatctccgcctgtcctactccatccctcctgcgatgtgaatcatctctttgtccggtgtgtccatactgtaggtccttgtattagtccattctcatattgctataaagaaataactgagactgggtaatttataaagcaaagaggtttaattggctctggtttttcaggctgtacaggaagcatgatgctggcatctgcttggcttctgggaaggcctcaggaaacttaaaatcatggcagacagcaaagggggagcaggcatatcacatggcgagagcaggagcaacagagagagagcaagatgccacacacttttaaacagccagatcttgtgaaaagtctctcactatttcgaggacagcaccaaggggatggtgctaaaccattcatgagaaatctacccccatgatccaatcaccttgcaccaggccccacccccaatactggagattacaattcagcatgagatttaagtgaggacacagatccaaactatatcaatgctacataccttttggtcacttagcagccatctaggctatcaggtcgaaaaaacataatatatacagggttcagtactatctgtggtttcaggcatccagtgggggtattgaaatgtggctaagggggactactatatagggatctatgtcattaactcaggtttgccatttatgctgtccaacaatttgctatacttaacagaaagttttaatttgttaattgtggagatgaaataagattatacaagagaaaatgacttttatatttccattcatttttcttcctaattcctccagccacataaatataagaaaatgaaattatatggaggatggccgtgcgttctaggatgagaagataagaagagtacaatttaaaaacaaaagtctaaggagtaattcatgtctaaacttattgaagttcataaataatttgtcctgattttcagaagaaagagagaacttctgaacataaccacacaggacctacaaaaagatagctgcacaaaaactggttaataatgttgtgagctgccatgatagcatcggaggactagaaagaatgacaaactgctcctaccaagtaacgagtcttctgctcctttcttttagtttccctgcctcctgcctggaacctggaagacccagagaagggtggggagtaaagaacagaccagccttctccgcactgcagtttgttgaggcattgatctggccaaagctggatgtatggaggcagaaagtgttcattcattttttaaatttttcatttcagaattattgcttgtctgctatggacctaacactgttctaaacattggggctggtaatcctccattatctgtgggagatacattccaagatccacagtggatgcttgaaactgaggatagtataaaactctatgtatactatgttttttcctacacatacatacatactatgataaagtttcatttataaattaggtacagtaagggattaacaacaatgaataataataaaatagaacaattataaaaatagactgtaataaaaggtgaatatggtctctctctctctctccaaatatcttattgttctggcctcacctattttcagactgtggtagaccctgggtaactaaaaacacttaaagccggcagggcgcggtggctcacgcctgtaatcccagcactttgggaaaccgaggcaggcggatcacctgaggtcaggagttctagaccagcctggccaacatagtgaaaccctgtctctacaaaaaatacaaaaattagctgggcatgatggtgcgcgcctgtaatcccagctactcaggaggctgaggcaggagaatcgcttgaacccgggaggcggaggttgcagtgagccgagactgcgccactgcactccagcctgggtgacattgcgaggctctatctcaaaacaacaacaacaaaaagtcaaaaagtgtggtggacagaagaaataggagagcaggtaaggaaatggtggggtgaggagcagatgagaacaggtattaagtaggatggtcagaaagggcctcagggagaaagtgagagcccagcaaacactgagggaggtgaggaagtgagccaagcagccaaccgagggaagagctttctgggcagaaggaatggctggggcagactctgagcctggaggtggaaaggtgtctggcgatttctaggaggagcaagggttttgggatttggctgtggttggatgttaggttttaattataaaaggatctgcgtttttcacaacttgaaagtgagctacagttaaaatgagacttgttcttatacctgaaagtgaccagaaaattaggttctggtctttaagagatggaagagggaaatgtgaaggggcgtattcctttcccctgccccgaccgctcgcggttggagagcccagccacatgccgccccggctcggagtgacagcccaaccaggcctctgccttctcggccgcgcctctcccgctgccgtccggatttcgatgggtggtacagtacgttaggcacgcccctccctttctcccggcctggtctcctgttccaggcgacagcccaatgagggctgcctttttttcttcggaccggttccagtctaggttctcgtccactacgatcgcccagtgaggccccgcccctcccaccgcagttccgcccctcccggagctaccgcccagtgaggccccgcctctcccgccgcggccccgcccccctgcgtgtgaccgcatctaggccccgccgcgtccgccacgcccagcgctcggcggcgcccgccccactggcctggcccgccccccgcaccgagcactctttcgcccggcctccggttctcgccggctctcggacccgcctccgaagacgtggagcgctgcggcggctggtgagtcggggagggcacctcggaccccccagctgtccgcagcagagcccggccccttgcagccacagagccccggccgctgcaggctccaggagctccgcctggtcgccgccctgcgttcccgggccgcctcccggtgccagcacccctggggatgggaagtgggaccaggatgggcgcgggggctgtgggggcagggacgagtgaaggtgttgcggggagcggcggtcgcaggggaggggagaggtttgtggaggggattatgggtctggggcgagggtttgagtcctgagagaaaggcggtgaggcggaaatttggggctggtgaagtcaggatggaggatgttgggggcctcagcgctttggggaaggaggcagtgagtggggtggtcggcggagcggagtgaagggtggtttttagaagggtcagctcgcgggtcccggggttcttgcttcccgggcagtccggggatcagggcggactaggctgtctccaagcaggtttggccggagcgggcttgcaggataatgctcacatcgaggtgactgagtttccaggcttttgactgggacatactgtacagtttaaataatagatacctgtctggctagtgcctgggacacctgagaaacgtggatggaatggggttctcccctataggcagcgtctgattttgtgggtgccttcacagcaccagcattggtgtgcgctgccttctgtaaaaccttatattccagcaggacggtgtatggagatcccagacttaaaaagtgcagctgaggtttattcagactcaagacacagttgtatcatattgccttaaatcctgcggagtttaaatctaatcctgtggggtttaaagcggttaaatccactttgtagtgtctacttttaatttaaagtcatacaaatctagaggactagatgttttctaagggcccattctgcatgataaacagtttaaaattcgctatggaaagtaaatcatctgttctgaacagctgttgctgaaagaatcgtagagttgcagatgaatgaaatttgaaagatctaaaataatggaagggcatagaaaagtcttgataaattgaagtgtgtaaatgcacttaaacccactgaaacttttttctttttgttttttttgagacggagtcttgctctgtcgctcaggctggagtgcagtggcacaatgtctgctcactgcaacctccgcctctcgggttcaagcgattctcccgagtagctgggattataggcgcctgccaccatgcccggctaatttttgtgtttttagtagagatggggttccaccatgttggccaggctggtcttgaactcctgacctcaggtaatcctcccacctcggcctcccaaagtgctgggattacagacgtgagccactgtgctggccaacttttttcattgtagacaacttggaagacagagaaaattataaggatgaaaattaaaatctgtagttttgccacatgtaataacattttgatgcatttcttcctaatttttgtatttttgtgtatatgaatgtacacaaaattagggtagtattgttacctaattggggtaatattgttatattacttcatacttttgctttttctttccaccttacattttctcacttagcatttttgtggatcaaattcttcttaaacatctttgaaaatgcttgtataatcattcatcatgtggattcattctttttttaaatattagagttttagttatgtgcctagtactgtgcttggaggtgaaaaatcagtgttcctcaaatggatatatttgtcatggcttgcatgagagctgtactaagcctttttctcatctgtcagttaaattgtctctagccttctgtttttataagcagtaaacctttgttttaatggttaaaagctcacaataaatctcatgtcatgtgtgaatccaaaactgttatttttaatgtgtatgagtttttgtgtgtatgtgttaggaaattacggaattttgggtggaagaggattttttttttttttttttttggacaaggtctcactctgttgcccaaactgcagtgcgtgcagtggtgcagtcacagctcactgcagccttgacctctggggtcaggtgatcctcccatctcagcctcctgggtagctgggactacaggcgagagcttcaccgtatccagctaattttttttttctttttttttgtatttattgtagagacagggtttcgccatgttgcccaggctggtcttgaactcctgagctcaatagatccaccccccatggactcccaaagtgctgggattacaagcctcagctactgtgcccagcccctggaagaggctctttttaaaaagtttcttgttttgaaataattttagatttacaaaaagttgcaaaaatagtacaaatttccttatgcccttcacctagcttccccagatgtgaacatcttagatgacgatggtgcaattgttgaaaccagaaaattgacattgatacaattctattagtgtaatctacagaccttattcaaatttcactaattgtcccactaatatttaggatccagtctgagatcctacactgtatttagtcgtcatatgtccttagcctcttttaacctgagcatcctcctaaacaggatgacctggtgcagacctgtaaagtgaagcaggcctgctagaaagcacacacctcccctgaattcatatccaaaacctatcccttagaaggggatatttatcttccttttctatatgaatagactactgtttgattaagatgtataaccatagctgggcacggtggctcacgcctgtaatcccagcactttgggaggccgaggcaggcggatcacgaggtcaggagatcaagaccatcttggctaacacggtgaaaccccgtctccactaaaaatacaaaaaaaaattagccgagcatggtggcggatgcctgtagttccagctactcgggaggctgaggcaggagaatggcgtgaacccgggaggcggagcttgcagtgagcagagattgctccactgcactccagcctgggcgacagagcgagactctgcctcaaagaaaaaaaaaaagacgtataactaataaggtgccttttaattacttttatatgccatttctaaatcttctgggagttacagactagaaagcatgatctgagtaatccatgcttattatctcttttattagtctatgaattggcagtgggaatctttcaaaaacagagtgccagatgctgactccagtccctgggtcttttggaggaaagagtaatggcctttactctttaccaagtgtgatcaacttgtcccagttttaaaggtctgtgtcttgggaacttcttcagcccagggccacctcacagcctctagagcatttctactgagatgccacagtatatttctgacattattctagccaaaacaagcaaactcttggcagtatctggggtaatgagagtagatggaggcatgagtgagaggaggaaatattcttgttttcctcactggtgcttccatggctagactcagttgagtgattgtgtgcagaggttagtgcagcatctaatccggcctgggctgttgtggcaggactgtcttcagtatcctgtgtctcacctctcctgtaccttcctgtggaatcttaagggcatggagttccctcagggagtggtcctcaccagcttccctaagttatctgtgttactgagaaactgttatagtaaggatgggtgtatgcggggctgattctccattctcacgtctgtctacatctgtgtaactccccaaggcagctgccctaggtacaaggagggaggctcccacaattgctctcaccattaactgcctgcctgtaggtaagtagtgtctctgcatctcgggtcctctggagttggcctggccctcttttagcctggccattaaaattgcaacttttgtcctatggagattcctctcatcttccagcttgagcagtgcggtccttcatttttctcttactgaagtgtttcctaatctgcttcataactgagaatacttttcgttcctgtttctctttgaatctggaataaggtgattcctgaagacagtgttatgcatttccttcttaacctttgagtttgtgataattccattgactttttttttctttacccaaattcaggaaaagaataatccccagaataaagaatccattattcttttcctgatccttgttaaaataactccccactctccacacactcccctgacctctccatggtgaactcacagtgtgtttctctacatcttgaccacaatggtcagactttacctcttgtgggccagtgatccagttgttaatgtaaaagccacatgaatttaacttatttgtaggtctctctttgaccctgtgtgcaattcgacacatgataaagaacacaatttgggatcgctgtctcataatcccacgccccagggtctgtgtggaacctggctgctctgtgccttataatcagcctggctgctgtcctggctgagagtcccgatcaaaggaggatattggctgcaatacagaaatcattctaccctctggtgcccaggaagtctgtatggtcaaatcattgtttttagattggccccaactggaaccataaggtttgtgctacacctgcaggaagacttaaagccttcatgtccctgtctggtattttgtttccattttttcatctcgtatgcttggtaatggtagagcaagttcccattaagaccctctggtaaaagtagattccagaactcagtttaggccaaggctgccatgaggcttcttgtttccaccgctttacaccttacacttgatatttacgtcattgagccagctaattagagaagagagactggagcaagcctggccagggaactgcaagatgaaagtctgtcacatccataaccctgctgcatgaaaaaacacagagaggggcaggaataacccaaagagaggggatccccagaggttttactatacaggcaattccctgaggagtggacctacccaggtgggattaccatatggggacagacatttcctgagcagagagcacccctggatggaacttcagggacagaaagaagagacagcttaagtaagctggcctgtatgtgcactgtggcataacggctggcacaagtgtagagtgactgaaaatgggcacaagaggagcagagctggttcttactgtggactgtgtcactgcagtgttcaaagctccaagagcatcttatgtcctggagccttaaaggggctaggcttaccagcttgcactaaaaaagcccagcagcctgtcttccctctacctacatgattctcattgcttaaagcagaatccaggcaatgccagcacttgtattggtcttgaggttattattgagctgcagcatgcacctgcatgattgtagcaaggctagtgttattttttgatgatgagggcataatatgggctttgactttattggctggtaagttcacaaaaagaaaaaaacaaaaggttgtcttctgatggcatggtgttgttcaaagagcattggattccagttctgcttctgccacaccggtggtgtgactttgggtctgagtaacatgatagcgagggctttctgagtaacatgatagcgagggcttaactgatctctaagattccttcccctcttaaagagtctatcattgtccagctctctgaagctttgcagtctcctggataggtgcgggatggaagatgatatgcttatgtacggatccttttatttcacatactgttgagtatgtgacctttcctcagaacaaaccacattttaaatctaggtagcttttatataaggttggcatgcttttaatctggtgaagaaaagcaaaatatcttgtatcatatagttaaaaaatgccatttggtagccgggcgcggtggctcacacctgtaatcccagcacttttggaggccgaggcgggcggatcacaaggtcaggagatcgagaccatcctggctaacacggtgaaaccctgtctctactaaaaatacaaaaacttagctgggcgtggtggcatgcccctgtagtcccagctactcgggaggctgaggcaggagaatcgcttgaacccaggaggcggaggttgcagtgagccgagattgcgccactgcactccagcctgggcagcagaatgagactccgtctcaagaaaaaaaaaacaaaaaacaaaaaatatatacacatatatatatgaaatttggctttaactgaagtgtgtattttacatttgctgttgaaaatgtgaggcttctatactattttacaaatatagagccactttttttctgattataaaaaatacccactcattaaaaatcaaattaaaaaaagtaaataataaaataaaaattatcccaaatgctactacctaggaagaacaacttggagaaatatatctgagtagccattgatgcagcttttattcacgtaaacagacacacacacacacaatagcttgatgtgtgcatatacacatgcttcaggatgtggactttggtgtcaggctgtctggttgtgagtcccagctcccctgtttgctactgcaagatattggacagtctatttaatctctttcacctaagttttctctttggtaaaatggtagcattaaagtttcttcttcaaggggtgaggattaattcacataaaaatgtacactgggctacagtgtacatttgcatgtggtaaatcattagcaaatgatagctggtgttattttgatattactgtttatttattatgtatatttatatgatcatactttacattttttaccttacaatgtgtcaggaaatctctccatgttaataaatatagttgggtctgtatctcagtattaatggttctattgtattcttgtaccagactttagccaatttcttgttgatggacattgaaatattaagttgttttttgccataaatgcataaataaaaatctgtaatgaacttttacatgcatatttggcttaattatctttttgagataaattccataaaaaactgtaatgaacctatatatatatatatatatatatatatatatagtttagttttcttctaagaatttgggataaattcttagaaatagcattgttatgttgaagagtatgaacgtttaatattatttttcttgctgcctctctgctttctggaaatgtgatatcaaattatgacatctgtcagcaatgcgtgaaaatggtagattttctacacctatccccaaactgggttctttccattttttagcttcagctgatttgaaaagggaaaagtatcttattgttactttgcatttttaaaattggtgactctggacatcttttcaaatgtgtcttggcatatttcttttatgagttgtatttttatgtttttttattttctgttgttgatttgtaaggactctttgtatatcagggatagtgaaatttgtctgtcatattgcaaatactgttaaggttgtgccttgcataatgaaaggcataaagtatctcaaatgagaataatcagtgagcaaataatatatgagtttgtagatagtgctcatatacatgtttagaatggaaacctgcttttagtgtctcagcaaaattgttttatgatctggttattatgaataaggttgtccttttattactcacattgaacaatgcataaatgttcaaaaacgttgacctttgatgcgtgtccccagatactctgcggaacactttattgttcccttaaactagacattctttccaactttgctatttttttcacgcatagttattcttcccatatccaagattggaaaccttggggttttctgtgtatctagtctaagttgaacgctgtgtggctcccatcatcccttcccagacagtgccctctcctgaggctacacctactttttgggttcctgctactgtacttagcccatgtgttagaataatttgatgcatgcttgcttctgctactagactaagggctcctcaaaagcaaggtgtagactttatttacctttgtaccttttgactctcatggcctggctcatagtaagcacatgataagtgtttattgtatttgatatttccattttgaaggtgatgaactcagcctctgtattctactagtaggttaatattcgcccccaccagctttttattatgaaaaatttcagtcaggagagttaaaagaataccacaaagtatacccatattctcgcccaatagatttacttactgagatttgtattactctgacacaaaatcctctgctcagaaacctacaagaacgtactggccattggatcagatgtaaactatagcatttgttatccttaaatggctgcatctaataaaatgtagcccctctgctctggtcaggccagtcttcttattgttcttttcccatgctgtctttattcttgcttcactgattttacacattgttccttttgtagaacatgtgtcccccattgcctggtccaaaatttttatgcattaagtgttctgactgcattattagctatttggaggtgaccactagattttgtcttgatctgatttccttcattgaacctagcatgttgaatattgatttggctggtatctttcaatagcattcctgatacatttggagtataacttgattttttttttttttgagacagagtcttgctttgtctgtcacccaggctggagtgcagtggtgtgaccttggctcactgcaacctccacctcccaggttcaagcaattctcttgcttcagcctcccgagtagctgggattacaggcgtgtgccaccacgcctggctaatttttgtatttttagtagagacaaggttccaccatgttggccaggctggtctcgaactcctgacctcaggtgatctacccacctctgcctcccaaagtgttgggattataggcgtgagccaccgtgcccagccgggagtataattttaatccaacattcacttagaaggccttttttgcccctgacaaaacctaagctctgttagaggaaaaaaaaagttgaatggttcaagccagatatcctgaatctgtttaatcagattgctgcaagattatgatttctactgaagaaaagaaagatgttatgcagtgttggccactcctttgtgattgttcccttgagtttgatttacctttatactttggagtcattaaagcttgtatgaagtgcacagttagaataagtaagtccaaagtctgaaaattgccctggttgagaatcactgggttagacagggtcacctgaaaaacactttagagcaaggcctttaagccttaagtgactgactccatttgtatgtctccagcttggctccactattttgcaagcttggtaacagagctgaaggtggtatccctgagaaaggcagggaaactgggaaggaagctgaggctggggagaagtgtatgtttagttttggttttattgagacaagttttagtgagataacagtgttggaaactcctgagggagctcagcttagaagacaaaactagagacagattgcaaagacagcaacacaggttagagtttgaatttaagagaaagaaagagggtttagagggagaaataatacagaaagaaggcaaaagtcttgagattgtttcttgggcatatatatatatatatatatatatatatatatatatatatatataaaatatttaattttctttattccactgcacttaaaggaggaatgatttgggcatatttttgcagatagtggtggggaagccagaaggaaaaggagattctagaggtagggagagaatcaaggtaagaaagcattctggaaaccaaggaaagagtctatgataactttgaatttaaatggaagtgttttgttttttgtgcatctaaaagtgttattaatattttttaacagcaagtttgggctattccaacaagaatatctttgacacactaggtagactacctctaccctatggctacttattttactatcagccttatcatatttgttcttgctggttagagctggaaacttgatcagagttgactagaatttctctgaagagagtttaattccagagttttaatattctatttatactagtagccagtaataaaaaggttaccatttgttgcatgcctgctatgtggcaagcactgtgctgtacatgtctctcatttcctttcacaccattcactgtggcatgtacttttattaatcccactttacagaagaggataaataaattgcataaggtcacataactgagaggtcatgaattgaatttgaatttatgtctgtctgtctccagagatcaagctcttaatcaattctaatagttagacataattaaccaaagtccaaatcactagaacaaaacaagacagagggattgtatactattaatcagagtaagctagactgctgtattgtttaaatcctgacatatgtaataggctcaaacataatagatttctcactcatgtaactgttcaaggcaggtattctggattggtaggtggctcaactcccttctgatttaggaagccatacttccctgtcttgtatctccccagtatctcagtggcccatggaaagggaaataaaacattgaggagagatagaagcactcccttaaaagccttgatctggagttgtgagtacttctgctcacatactattgtctcgaatttagtctcatgctcacctaactccaactgtgtggaaaatgtagcctagccgtgtacttagacaaagaaagggagagtggatttcagaggatagctcaaatttctgccacaggaaccaaggaaaaaggattgggtagagaactagacaagaaaccttagacaaggtcttgaagattctcttgatactctcctgaagttatcctaaaaatgcaggttcttttggggttcatttcagtcaataggatacaatttcataggctttcatttttacagattggaaaggactacttattaattgcccattaaataaattattgaggattactgatatttagtattcataaaataaaactggtatacttctagagttcattgaagtctaattcagcaatctactaaaatatctagctgtttttctgtgcctgacagtgtgataaagattaatttgcagacacatgcatgtacagtcatgtattggataatgacattttggtcaacaacagactgcatatatgttggttccataaaattataacagagctgagaaattcgtgtcacctgctgacatcgtagtgtaacacagtattcatgtgtttgtggtgatgccggtgtaaacaaacctactgcgctgccagttgcataaaagtagcacatataattatgtatagtacataatacctgacaatggtaatgaacccacttttactggtttatgtatttactatactatactcttaatcattattttagagtgtactcctccttatattgaaaaaaaagttaaccataaaacagcctcaggcaggtccttcaggaggtattccagaagaaggcattgttataggagatgacagctccatgtgtgttactgcctctgaagacctttctgtgagacaagacgtggaggtggaagacagtgatattgatgatcctgaccctgtgtagatctaggttaatgtatttgtgtcttagtttttaaaaaaaagtttaaaaaatttaaatagaaaatggcttctagaataaatatataaataaaatatttttgtacagctgtacaatgtgtttgtatcttactgtgttattacagaagtcaaaaaaatcaaaaagtttataaagtgaagaaaactttttaaaatatatttagtatagcctaaatgtacagtgttttataaagtctacagtagtatacaataatgtcttaggccttcacattcactaaccactcactcactgactcacccagagcaacttccagtcctgcaagctccattcatggtaaataccctatacaggtgtattcatttttaaatattttatactgtattttcactgtactttttctatgtttagatatacaaatacatattattgtgttacaattgcctacaggattcagtgcagtaacatgctgtataggtttgtggccttggagtaataaggctacaaacctatacatacctatactgtatagcctaggtatgtaataggttatgccatctaggtttgtatgagtacactctatgatgtttccacaacagtgaaactgcccatttctcagaactgtctttgtcattaagtgatgtatgaccgtaaatggttggaattctccaaattgttagaaggatcctttgttatcagttcattgttggtgttgtcttcacttggtcatgattttggcttgaggtttactttttggctgctattttttgttattaatatttgggcactgttttacttgttttatacatttaattttgctttaggtcagaagattctgtaatatggtttcactttgtcattttatcttgaactgtttagctcatcttcaacagagttgtatggtagataattcaaaatgaagatttcatttagtaggaaaaaacatacagaatttggatatctctaatgactctattttctctagttttaagctgtgtatcatgggaaacgaacttcttgcttactatgagcttaacaaagtaacttcttcattcaattttcctcttggtttttaaagtataaattataggactttaggaagattacatagaattgtgtatttaggtaccaatacagtgtcttatatgtagtgagaaattcaacaaaagagaaatttagtaaagaggaaattaaatttaaaaggcggtaggggagttcctatattacaaaagctgtctgttcactaaatataagattgctatgttccagatgccagatcatttgcaatcatttccttctgtcttaacactcttggccaggcacatggctcacacctgcaatcccagcactttgggaagctgaggagggagaactgcttgagctcagtagtttgagaccagcctggacaacatagggagaccccatctctacaaaaatgaaaaaattagctgggtgtcatggcacgcacctgtggtcccagctacttggaaggttgaagtgggaggattgcttgggccccagagtttgaggctgcagtgagccacgatcacaccgctgtactccagactagcctgggtgacagagcaagaccctgtctaaaaacaaaacaaaacaaaacaaaggccatgtgcagtggcttatacctgaagctgaagtcccagcaatttggggaggccaaggctaaaggatcactcgagcccaagagttcgagatgagcctgggcaacatggcaaaaccctgtctctacaaaaaatacaaaaattagctgggaatggtggcacatgctactactgtactccagcctgggcaaaagagtgagaccctgtctcagggtcaatttttgtatgtttgaaaatggctttatttgtcttttattcttgaggcatattttgaccaggtacataattttggagtagccataatattctcttgggacactgaagatactctttcagtctaattattgcccttcaaggtactttgtctttatttttctgctttaagaattttctctctcttggcttttctgatgttttactgtgctttttctttttatttatcttgatggaggtatatagagattcttaaatctgtgccttggtatattttgtcagctttgggaaattcttggtcagtctcttcagatattgtttgtactctaatacctcccccttttagttccttgtagttccttgtcttttactctttttacgtgttttcttcattttttgtcctcagggctcaattgtagatattttctttgtgcctgtgttatcattcaatggtttttatctttagctttgtctgattttctataaagccttccttgggttcttaattttgactcatatttttaaattctagaatttccattaaaaataattttcagttctttgccaaaattatcaatcttgtcttttagttctttgaatatatgatcattattttaaagtcctttcacttacattatttggatctattatgtgtttgtttctattgcttgttactatttttcattttcatacgtagtaacttttctcctgattgagatgatgcaaacctagaatttagttcctatcggggtgatctaattctccttcactattatgtttagaatgtagccttttcagatcccagttcaaagtggggattttatctgactgtcttccttggtgggttctctactaattacatgttttgtcccctagcctcccatggccaacagaagccctgcttagtgtctcaccctctcagcagaggccccagagaaactggttgcaagtgcttagctttctggactccattatttcccattgccttggttttttttttgtttgtttgttttgttttttttttttagacagggtcttgctatgttgcccaggctggtcttgaactcctgggctcaagtgatcctccaggctcagtctccaaaatagctgggattacaggtgtaagccaccatgtccagcttagttggctttttgttattcacaaatttttaaaaatacaggtcacatattctttatccaaaatgctgggaccaatagtgtttcacattttggattttttcacattttggaatatttgcatttatataatgagatctcttgggaatgggacccaaggctaaacatgaaatttatgtttcaaatgcactttgtacacatagcctaaaagtaattttatataatattttaaataattttgtgcgtgagatcaactttgtgctaagtacttacgtgtggaattttccacttctgatgtcacatatatatgcacatatatatgtatgtgagtgtgggtgtatattgtctagttgtcttcagcagaagagtttgaaccctttaatctgctgtcctggaagtggaagtcttggcttgtgttcatagttaatgtgtcactttgaggatgtgtagttttggaggaaatgtatagtagtggttctgcctagctgagatgggtactgtagagagttccatataattacaccttgactacccattacccactaacagttttctttttctgtcttttttttttttagtagttatattcagtccagttgtctgcttctatagatttaaccccgagctatcctttcctcttcattgtcattgttcagaccagtatcagctttttctagactcctttaatggccccctaactggcctcccacactctaggctgactctttgtgatctgtaatagctccctaccgactacatcagttctctgctcataatgaattggtgactcccattgtatgttagacaaagcccatttcctttgtaatctgggaccctagttggataccagctcattcccacccttctttcctcctacacaaagttaatgttcccaccatacctaaacatttgtatttctctaagcctcttggctgttttttcatcattattttctagggaaatataattttgtctacttaggatacctctcattgtgtatctggcaaactgctactcattcctctgaatcctgttcagatgtcacattctttgaaaatactttcttattccgcttgtgtgagagcacattttacatcgttatccttcatttacacaaatgtctattctgctgcattctgagctgcttatagaaaaggatggcgttctttccaaagcttggctcacacatgtactttgaaccattggttgagtctgtcatataacccatctgaatcacgagaaatttgcttttatcttggaagccagaattaggtataattgggagaaaatgaagtctatagcatatttctctttgccataataacaacccattttcactctttattttaattttccgcagatttgtcaaagatgaaagtgaccttatcagctttggatacttctgagagttctttcacacctttggtggtcatagaacttgctcaggatgtcaaagaagaaaccaaagaatggctgaaaaacagaattatagctaaaaaaaaagatggaggtgagtaaaatagtcactgctcagacttagtctggcctcccacactgtatgctcagcctcccacactgtatgctcagtcactaaaaatgtatttgcaaatgtgttttataattttcgttgatatattttatttactaatgttaaattttttgccttttattatctatctgggacttgaaaggaggtcctaaatcaacaggaggctttaagttcccattaaactgaaagcagcatgagtggttttcttcacagctctaaatagtatgcctaccacactgtttggtgcatagtaggtgcttaaaaaatatttgtcaaatgaatggacaagtatctattgtatgctctttatgtgccagttatggtgctaagggagagataaatatggtctcttcctgcaaagttgttaccatcagggtagaaagaaattcaaaataaagaaaagtacatggaagagctgtcacaaagcagtgcatggcatgaacaaatgaatcgtgtatacttactgtaaaaggaaaggaaagggttagatgacactatggcagtactttcttcagtggcaaggaatgacttaagatgccaaggtttagctttctcttgacaggtgacatgggttcccagtctgggtgagaaagcagcgggtgttttagtgttttacatgagcaagtattttgtaaactatacaaaacaacaccttagtctgcacagtctctgaacactgaactagacttagactctttaaaaaaaaaactgttactataaactgaagttatttcttaagaataaaattggaatcaaagtggaattaaaatttttttcaaacagttgaaccagaaggaaacttaaaagcaggagtatttgcttgctgaaatgtgagcatttcactgaacttaagtctgttctttaaaatttttgtgatttaggaactatgtagtgtttcagtgtgaaagattccagtgtattcccagccatctttttgctgattgtgtgccttcagagacacacagggaagggatgggcatctttccacactttttgggcgatcataaaaaatctttccaaaaaagtgttctgcatcttccaggtgaagggagtagatttatactcatgtttactttgattatcttccaacctcctgttaaattgacaataataataaaatggttaaaaaatatataaaagaccgaagtcacatggaccaaaaaaaaaaaagaagatacaagagcagcaaaaattggaagctaggaaacaggcggctgaatagttattgacttgtcagatttgagaaagccaaaagttaagctgacagggaaggaagttgagatgcaatttggtttactctgcacaatacccacaatgactcaggaattagggacactggatctatggaggtggggataaaagtaggaccaagaagaaaagataagtgtttgagatccatataagaaatgatacagagtttcaaatagctagaaggaggatattgaatgttcccaacacaaagaaatgataaatgtttgagatgatgggtatgctaactaccctgatctgagcacgctacattataggtattgaagcactactatgtacttcatgaatatatactattattatatgccaattaaaataaaaataaatagatccttgaatctcttccatattctacaaccccagcagaagacttgaggtttattctctggagatggtcagatgcatggtttttggcatagaaatctatgcacagttgaaggcacagattctgtactgaaaataagatactgaataccattcccctttcccctactccaccactcacatacctaattcagtttccaaaatattaacaacaagattcacaccttgtaggaagcagattggacaatctttctttggagaacctgaccagcttaagacaaaataacgaaaggtgcagaaatcagggggttgctaacggaagattatttgacaagactgccttgcattaaaggccatccttgatgagctccatctaagccctcagaacttctgtttagactcatacagcccctttcttaaacgtgaacatgtaataaaagatcaccaaacatctgagaacaattcctaacatgaaagagaaatctaaaactaaacagataaaagcaacagactattcagaagaagaaaaccaaaagataataaacatcgcagcactcagagttacgaaaagatataacatctataaatcaagaataggatattataaaaatcctttaggaaaaaagcactcagtaaaattattagaagataatattgagacaagcctccaagaaagaagagcaaaaaggtaaagaattggaaaatatgagaacaaataataagaaaattaaaggactagttcatgaggtacacatctgaataaaaggagttctagaaagagaacaaagaaaagtgaggtgtgagggcagagtgaagaaagagttctccaagaagatgatgttgataggttatcttttatgtcagtggatcaaggagagagacagttggcagagaacttgggggtttgtattatagataggtacataataaactatgcaaatgataagacagcaacttttgggaaaatggaaagtatgacaaaggaaaatcatagcatactgtaaggcttagctctaaataacatgtagtcataatcacctactgacttgaaaccaaaggatgacttaaccatactgtgagaataggtgatgggaatgatgaatggaaatggtgaagaaagaaagggagctaaaaatcctcatcttcaatgcttaaaactgaaaaatcaagaaatagctctataagcatgttatttgatgacatgaaaacaaataacaaaggagtcatctgaacaatttgaaagggaaaggttaatggaggggaggaagaccttacattaaaggccatccttgatgagctccatataagccctcagaagttccatttagcctcacagagcctctttcgtaaacatgaacatgtaatgaaagatcaccaaacatctgagaaaaatgctctttttcaaaacaaaatgttgacaaatagttcttcataaaggttataccaggccaggcatagtggcttatgcctgtaatcccagcactttgggaggccaaggcgggcggatcacttgaggtcaggagtttgagaccagcctggctaacacagtgaaaccccatctctactaaaaatataaaaattagctggatgtggttgtgtgtgcctgtatctcagttatttgggagacggaagcaggagaatcacttgaacccagaggtggaggttgcagtgagccaatattgcaccattgcactctagcctgggcgacagagtgagacactgtctcaaaataaataaattaattaattaataaaaaaaggttatgccagtttctattccactaaaaatggctgggatgcctttccccacacactcactgtgcctatttgggtcttccaaacaagagatgggatttgatgaacaagaagtttattgagagaaatatttgtggaaagaaggaggagggggcaagagtgggtctagagagccttcagactttgtcaatttgacacttgggaaaggagagaggaaaggaaggagaattgagtaggaagagcctcagaccacagcccagttcggagaaactaacagccaggcttaaagttgccctttaaaggaaacttaacgttgtgcaggaatggccttgtttcaggtgtcccctccgtgcccagctgatggctggaagcagctgggggaaggatcttaaggtgtggcaccaggagcctggcggtcaaccctgttcttcaaagcagattgtcttgaagggagagctggtggagtggggtaccttcacggctaccacgctcaccaacctattaccaaactttccatctttgcagtgtgagaagtgagaaacagcatattggtatagtttttacatttgtcttaatatgagtgaggttaaggatcttatatttaagagccattggtattttctgtaaattgaatataccttttactaaagtctttaatagctttactataaattacctagatgatagtgtcttaatatattaatccatttgataaaagaaatataaattctgctcatgatcctgttatcatctgattaatattttcgtaattcctgtcaaccatctctagagggtaaatagtaaagaaataaatgtacctttaaaagtttgaggccgggcgctgtggctcatgcctgtaatcccagcacttgggaggccaaagcgggtgaatctcttgagctcaggagttcaagaccagcctgggcaacatggtgaaaccctgcctctacaaaaaatagcttggtgtagtggcacacacctgtagtcccagctactcgagaggcaaaggtgggaggatctcctgaacctggcaggtggaggttgcagtgagccaagatcgtgccaccgtactccaacctgggcaatagagtgagaccctgtctcaaaaacaaacaaaaattgatgtaggtagaaataatcttttttctttataatcttttaagtaataattatatgtacattatcaaatcatgatatctctttatgtttggtaacttatttcagaaaattattaaaccaaatagaacatagaaatttatgggaaaaatcactgaaaagttatattgctttttgttatttagtatttaacattcacaaaatctgttatagtccagtgtaattgtattacatttttggtttttctttttactgaaacattttgttccaaattaattttcttaaattttcgtctatttatattaaactgcaatctttgttctatatttttatttggtgcacttttatacctagagctcggaaatattgaattctcgtctcatctacttctcatttgaataagtggcaggctacttagtggtacatttttcagtttttccatttattgaaaaactataaagaactgccatccctaatgtacttatgttatttacttggaagatggatttaaattgctaatataatttctttttcttctaccagactagaaacattatatttatttagaaagtttttagttttgaaacttttatgtttgtctaagattgtgcttatcttttgtttttgaaggtgcccagttgttgtttagaccattgttaaataaatatgaacaagaaacactagaaaatcagaacttatatcttgttggtgcctccaagattagaatgttactaggggcagaagcagtgggattggtaaaagagtgcaatgataacaccatgagagccttcacatacagaaccagacagaacttcaaaggttttgatggtaagccctaagttctttgtctctgttagaatccatttatcaaaaagaagtttatgatgaatagatcagggatcagcaaacttttttcagtaaagggtcaaatagtaaatattttaggttttgcagtccgtgtggtctctgctgcaattactcaacactgccattgtgaagcaaaaaagcagccatagaccataagtaaatgaatgggcgaggctgtgttcaataaaactgtatttataaaaccatgtggcaggctggatttggcctgttgccatcctttgcctcccctggatgaacacaaattagaggaacacatgtaacttacttatattattctattctaattcttataatttgagtattcagtagcttgatacagaaaaatccttttttttgaaagcagaatgattgtcaccaatcaattctaagtcaacaaaatacaccaaaaaaagtattatattttcttttttttttttttgagacggagtctcgctctgtcgcccaggctggagtgcagtggtgctatctcggctcactgcaagctccgcctctcgggttcacgccattctcctgcctcagcctcccaaggagctgggactacaggcgcccgccaccacacctggctaatttttttgtatttttaatagagacggggtttcaccgtgttagccaggatgatttcgatctcctgacctcgtgttctgcctgcctcggcctcccaaagtgctgagattacaggcatgagccaccgcgcctggccaagtattatattttctaactctacaagaaaacaatcatgtaaaaagaaattaactataaaaagttgcatctcataagtagagattattttctacaaataatcacatgtgaatatttattagaaaaattttataataataagaaatacagtagtagttcagtaccttagaaacctcatttcctgaattttctggctcctgctgaatgtgatagggtcgttggttctatactggccccaaagcaggttctagtagagaatattttcaggaaagaactgggaaagccagggtggatatgataacaggatgggagcttggcttcagaatcaaactgatccctgccagggctttcagagttagaagatgtgattagacttctttggattcacttactctagatttttatacctgagtgaataaatgttcaagaggaaatttaccttatttaagaggtttcacctgtcaaatagcaacaacattttcttaaaagactttcttctctctcattagtagaagggatgtttgactgcagaagggaatggaatgggcttgagagtttgaaggaggataatttgccatataggcaaacttcttcaattccatccctggtttaacataataatacgttaataagtttaatgcattattagaataaaagaacatactgctttctgctcattggtactaaatgagatcaattatatgcttcttgaatgtttctaatataagtattaaaatgattattgtagaattgtattacgtgaaggcataacagaatttttttattcttataaaatatctaaggagctttatgttctatttaatttaccagcttcatactttgattacttcttatgttaattgcttattgtttataccattatttctgtaatctcaggtaattggaatatttttattttgattattactaaaatctggtaatttctgttttattttagataacaatgatgatttcctgacaatggcagaatgtcaattcattatcaaacatgaacttgaaaatcttagagctaaagatgaaaaaatgatccctggttaccctcaggcaaagttgtatccaggaaaatcattgtgtaagtcattatgtcaaccagtctttttcttaatagacataaatagcaaattatagatgccttttttccctcttacagaagaacttacacaaacttacaataacttgtatttttatgaacatatcttttccctttggaacctcagtatattgcatctttaaatcaatatgtttgttttatattgttgactacttatttatcaaggtctcataccatacagttagcttaaaatccagtgtgtatacatatacatattactcaattaaaatgagcaaagtttactttatgccctaacattgtacatgaaaatctgtggaggaatataaaagggaagacatggtgttttcctggagcactctttccatttcctctgatctcactgggtatgcaaattagaattttgcaacattttggttttgtgtgatttcattttaatgaagatactagtttgcagaatgaaagtttactacaatgcataattccaagtttgcttcaaacccagatagtggcaaagcttcagaacatttttgctgcctaaaagacactttaaacatgtaagcttctgtgtcccctagtctgttttttttgttgttgttgttgttttgtttgtttttttgagacagtcttgctctgtcactcagaatggagtgcagtggtgtgaacatggctcactgtggcctccatctcctgggctcaaataatctcctgccttagcctccccagtagctgggaccacatgtttactttttaaaaattttttatttattattattatactttaagttctagggtacatgtgcacaatgtgccagtttgttacatatgtatacatgtgccacgttggtgtgctgcacccattaactcatcatttacattaggtatatctcctaatgctatccctcccccatgcccccaccctacaacaggccccggtgtgtgatgttcctcttcctgtgtccatgtgttctcattgttcacctcccatctatgagtgagaacatgcggtgtttggttttctgtccttgcgatagtttgctgagaatgatggtttccagcttcatccatgtccctacaaaggacatgaactcatcattttttatggctgcatagtattccatggtgtatatgtgccacattttcttaatccagtctatcactgatagacatttgggatggttccaagtctttgctattgtgaatagtgccacaataaacatacgtgtgcatgtgtctttatagcagcatgatttataatccttcgggtatatacctagtaatgggatggctgggtcaaatggtatttctagttctagatccttgaggaatcgccactgtcttccacaatggttgaactagtttaccgtcccaccaacagtgtaaaagtgttcctatttctccacatcctctccagcacctgttgtttcctgactttttaatgatcaccattttaactggtgtgagatggtatctcattgtggttttgatttgcatttctctgatggccagtgatgatgagcattttttcatgtgtctgttggctgcataaatgtcttcttttgagaaatgtctgttcatatcctttgcccacttttcgatggggttgtttgattttttcttgtaaatttgtttaagttctttgtagattctggatattagccctttgtcagatggatagattgcaaaaattttctcccattctgtgggttgcctgttcactctgatggtaatttcttttgctgtgcagaagctctttggtttaattagatcccatttgtcaattttggcttttgttgccattgcttttggtgttttagacaggaagtccttgcccatgcctatgtcctgaatggtattgcctaggttttcttctagggtttttaatggttttcggtctgacattaagtctttaatccatcttgaattaatttttgtataaggtgtaaggaaggggtacagtttcagctttctatatatggctggccagttttcccagcaccatttattaaatagggaatcctttccctatttcttgtttttgtcaggtttgtcaaaggtcagatggttgtaggtgtgtggcattatttctgagggctctgttctgttccattggtctatatttctgttttggtaccagtaccatgctgttttggttactgtagctttgtagtatagtttgaagtcaggtagcgtgatgcctccagctttgttcttttggcttaggattgtcttggcaatgcgggttcttttttggttccatatgaactttaaagtagttttttccaattctgtgaagaaagtcattggtagcttgatggggatggcattgaatctataaattacctcgggcagtatggctattttcacgatattgattcttcctatccatgagcatggaatgttcttccatttgtttgtgtccccttttatttcattgagcagtggtttgtaattctccttgaagaggtccttcacatcccttgtaagttgtattcctaggttttttattttctttgaagcaactgtgaatgggagttcactcatgatttggctctctgtttctctgttattgctgtataggaatgcttgtgatttttgcacattgatattgtatcctgagactttgctgaagttgcttatcagcttaaggagatttttggctgagacgatggggttttctaaatatacagtcatgttatctacaaacagggacaatttgacttcctcttttcctaattgaataccctttatttctttctcctgcctgattgccctggccagaacttccaacactatgttgaataggagcagtgagagagggcattcctctcttgggccagttttcaaagggaatacttacagtttttgcccattcagtatgatattggctgtgggtttgtcataaatagctcttattattttgagatacatcccatcagtacctaatttattgagagtttttagcatgaagcgctgttgaattttctcgaaggccttttctgcatctactgagataatcatgtggtttttgtctttggttctgtttatacgatggattatgtttattgattggcatgttgaaccatccttgcatcccagggatgaagcccacttgatcatggtggataagctttttgatgtgctgctggattcactttgccattattttgttgaggatttttgcatttatgttcatcagggatattgatctaaaattctctttttttgttgtgtctctgccaggctttggtatcaggatgatgctggcctcataaaatgagttagggaggattccctctttttctattgattggaatagtttcagaaggaatggtgccagctcctctttgtacctctggtagaattcggctgtgaatctgtctggtcctggactttttttggttggtagtctcttaattgttgcctcaatttcagagtctgttattggtctattcagggattcaccttcttcctggtttagtcttgggagggtgtatgtgtccaggaatttatccatttcttctagattttctagtttatttgcgtagagttgttcatagtattctctgatggtaatttgtatttctgtgggatcggtggtgatatcccctttatcattttttattgtgtctatttgattcttctctcttttcttctttattagtcttgctagcggtctatcaattttgttgatcttttcaaaaaaccagctcctggattcattgattttttgaagggttttttgtgtctctatctccttcagttctgctctgatcttagttatttcttgccttctgctagcttttgcatgtgtttgctcttgcttctctagttcttttaattgtgatgttagggtgtcaattttagatcttttcctgctttctcttgtgggcatttagtgctataaatttccttctacacactgctttaaatgtgtcccagagattctggtatgttgtgtctttattctcattggtttcagagaacacctttgtttctgccttcatttcattttgtacccagtagtcattcaggagcaggttgttcagtttctatgtagctgagcagttctgagtgagtttcttaatcctgagttctagtttgattgcactgtggtctgagagacagttttttataatttctgttctttttcatttgctgaggagtactttacttccgactatgtggtcaattttggaataagtgtgatgtggtgctgagaagaatgtatattctgttgatttggggtggagagttctgtagatgtctattaggtccgcttggtggagagctgagttcaattgctggatatccttgttaactttctgtctcgtggatctgtctaatgttgacagtggggtattaaagtctcccattattattgtgtgggagtctaagtctctttgtaggtctctaaggatttgctttatgaatctgggtgctcctgtattgggtgcatatatatttaggatagttagctcttcttgttgaattgatccctttaccattatgtaatggccttctttgtctcttctgatctttgttggtttaaagtctgttttatcagagactaggattgcaacccctgcttgtttttgttttccatttgcttggtagatcctcctccatccctttattttgagcctatgtgtgtctctgcatgtgagatgggtctcctgaatacagcatactgatgggtctcgactctttatccaatttgccagtctgtgtcttttaattggagcatttagcccatttacatttaaggttaatattgttatgtgtgaatttgatcctgtcattatgatgttagctggttagtttgctcgttagttgatgcagtttcttcctagcctcgatggtctttacagttgggcatgttttttgcagtggctggtaccggttgttccaatccatgtttagtgcttccttcaggagcccttttagggcaggcctggtggtgacaaaatctttcagcatttgctcgtctgtaaagtattttatttgtccttcacttatgaagcttagtttgtctggatatgaaattctgggttgaaaattcttttctttaagaatgttgaatattggcccccactctcttctggcttgtagagtttctgctgagagatctgctgttagtctgatggacttccctttgtgggtaacccgacctttctctctgtctacccttaacattttttccttcatttcaactttggtgaatctaacaattatgtgtcttggagttgctcttcttgaggagtatctttgtggcgttctctgtatttcctgtatttgaatgttggcctgccttgctaggttggggaagttctcttggataatatcctgaagagtgtttccaacttgtttccattctctccgtcactttcaggtacagcaatcagatgtagatttggtcttttcacatagtcccatatgttttggaggatttgttcttttctttttactcttttttctctaaacttctcttcttgcttcatttcattcatttgatcttcaatcactgataccctttcttccagttgatcaaatcagctactgaagcttgtgcatgcatcacgtaattcttgtgccatggttttcagctctatcaggtcatttaaggtcttctcttctctatgctatttattctagttagacattcgtcctatcttttttgaaagtttttagcttgtttgcgatgggttccaacatcctcctttagctcggagaagttcgttattacccatcttctgaagccttcttctctcaactcgtcaaagtcattctctgtgcagctttgttctgttgctggcgaggagctgcatttctttggaggagaagaggtgctctgatttttagaattttcagcttttctgctctggtttctctccatctttatgattttatctatctttggtctttgatcatggtgatgtacagatggggttttggtgtgaatgtctttctgtttgttagttttccttctaacagtgaggaccctcagctgcaggtctgctggagtttgctggaggtccactccagaccctgtttgcctgggtaccaccagcggaggctgcagaactgcaaatattgcagaatggcaaatgttgcagcctgatcgttcctctggaagctttgtctcagaggggcacccagccatacgaggtgtcagttggccccgactgggagttgcctcccagttaggctactcggtggtcagggacccacttgaggaggcagtctgtccgttctcagatctccagctgcgtgctgggagaaccactactctcttcaaagctgtcagacagggacgtttaagtctgcagaagtttctgctgccttttgttcagctatgccctgcccccagaggtggagtctacagaggctggcaggcctccttgagctgtggtcggctccacccagttcgagcttccaggctgctttgtttacctactcaagcttcagcaatggcgggcgcccctcccccagccttgctgctgccttgcagttcgatctcagactgctgtgctagcagtgagcaaggctccgtgggcgtgggaccctctgagccaggcacaggatataatctcctggtgtgccgtttgctaagaccattggaaaagtgcagtgttagggtcagggtgacccaattttccaggtgccatctgtcacggcttcccttggctaggaaagggaattccccgaccccttgtgcttcctgggtgaggtgattcctcgccctgcttcggctctgtccgtgcgctgcacccactgtcctgcacccaccgtccaacgagccccagtgagatgaacctggtacctcagttggaaatgcagaagtcacctctcttctgtgccgctcatgctgggagctgtagactggagcttttcctattcggccatcttggaacctctcatggtttacttttaatagtgtaataccaccttccaatcttcatccaggtgctactggtggatctttgttcttagagctcccaggatgggggcaggctgctcccaaggtgggggcaagtcttttgttctctgacctggggagcctcacggattccaaggaatggatccttgggccatgcagtgagtgttatagctctattataagccgtgagtcatggaagagaaccgtggaacccagcaactagtgttcagctccattaggatgaacctgggcacttagctgcacaggaacaatggcgagcttctagcccaattgggagtggcaatgggtgcctcactggaccagaagcgcagcggacaccctgcctgatctggagggatggaagtcaatggtgggtctgcaactgcggcgaacagcagtggtggatggtgagcaaaagctcagcttgagccggagcaaacacggaccagaagaatgtgcagttgcaagatttaatagagtgaaaacagagctaccatatgatggcaggggacccaaagggggttgccgctccctgctcaaatgcctgggtttatatcccgatcattgtccctccccctgtgctctcaggcgacagatgatttgactatttctttacctcctgcttttagcctaattggtattttagtgagccctctttactaactgatgggttgggtgtgagttgagttacaagccccatgtttaaaggtgggtgtggtcaccttcatagctaggcttaggaattcttagtcggcctaggaaatccagctagtcctatctgtcacaggcagacagatgcccaagaaccagttcatattcacattttcccagttgtcaccaaatatattttagagcttgtttgctcaaactgagatccagtctaggttaacccatgttgtttggttatgtctgtctcttttaatatagaatagtttctcttttccattttttccctcatggcatcaacttgctgaagagaccatgccatttgtctcttagatcgttttctcattgttcccctatcctctgtttttcctgaaaactggaaaaatttttggcaagaattcttcttaggtgatgctgtatcttctctggtcttcctgatttccttagacatgatggggaatagaaggccttctgagattttcttttatttgcctctctagcttcctaactctctaacttccttcctaacttactcttttgtgttcagaattgtgccttacttttgacagagctttttcaaattctaatctttctcgaccttcttgcattttagagtattttcttaggataaattattatttttactttatttgtaagtaagatgtagtatttattctagcctactgtgaactgtattcagagttccaatgaaaacagggtttatcatctgtactgtggacatctaaatgattcttttcaatttgtataacatatggcaggaaaatacttctcccaagcatcttacaatttttgtgtttattttccattagtttctgtcaatttaaaaaataatacatgtatatgatgaaaattcaaatagtacaaaaatttagacaatgataagttgtctctttcctgtcccatgttccaaatccctttgttccctccctattatataaccttagagaaattctgttcaagagaagacatgttcagacaaatggggagtatattgtgcataccattttggaccttgcttttttatttaacaatatattttgatcattattgtagaataccaaattaagcctaactcattccttttctaggccatgtagtattccatcatatagatgtcttcatattgatgaacatctaattgttttccttcaatgttttcattaaaaataaagtaggaaaattcccagaagtgaaattgttagatcaaaggtatatgcatcttttagagtagatactgccaaattgctctctatagtgattgcttcaattaatttatgtatttatttatttatttgagacagagtcttgctctgttgcccaggctggagtgcagtgacatgatcttggctcactgcaacctccgcctcccaggttcaagcaattctactgtcttaggtttcaccatgttgcccagggtggtcttgaactcctgacctcagatgatccacccgcctcagcctcccaaagtgctgggattacaggtgtgagccactgcgcccagccgattgcttcagttcataaaggaatgcatgttatattgagcattcagcatgatgttggcatttgactaggtaatttttatcgtgtttagaaaacattcatttcttctactttattaagaagtttttgtgtataatgacatctttattaagatgtcattatattaatgacatctgtgaagactatttttttataacccctgacattataaatatggcaaccgatgttaatagaattcctaatattaactcattcatttattcccatggtgaaccatacttgcttatattatctattttcctgctgacttccatttaatatttcattatttttgcatcagtattcatatgacatgagtacttagatttcttttttgtagtatttgacagttaatttatattacgtatacattgttaattttgtcatgtagttcttgtgtcccttgtactttgttttcttgatccatcatagctctagatctctgtaacaaccatgagaatttcattatgttcctgccaatttgttcttcgtattttcttttacctttgttttatgaattttgtagctatgttttggctgcataaagatcttggatagatttttattgtctattgcaccttttatcattatgaaatattattcctcatcttgcttaatgttttgttgttgctgaattcagccttgtcttgtggttcttgccttattttagtttgcatctgttagaatgtttttgcccagccttttactttcagcccctttcagtatcattttatgtgggtctcttatatcaggatatagtcggattttgctttgcactctaatctgaggatttttttttttttttactaagtaaatttatactaagtaaaatatttactaagtaaacttaaataaatgacatattttgtgctatgttatcatagttgatgttacattttatgttgaaattgcttttttgtgtgcttaaaatatcttttatataggctatgccatcttttttcccatttcaatggaaaaggctaggatatatatttttgaaaatcatgaatttatattgatatagtcaattcaaatttaacagtataggctattacttaatttctttggtttatatttgtatctttttactcatattgaaaatattgattcttaataacattaccgtaattactaatttgctttattttacaatttacataaaatagcttgtaaggcatgctaattttaatattaacaatacaagttctggatgaagtttaagattttctgttttcttttttgttctattactatgtgtagtcaaaatctaatctgttttaaaagtatgttagaatttctatatgaaaccatctggttctgatgtttgtttgtggattaggtttttggacagttttctctaagtgttctatggaaattggtttgtttagactttctatcactactggggtcagtttgggtaaattatattttcctagaaaagtttccattttatcacataggttttcaaatttatgtgagttgatttgtacaaatttctctcagcatcttttaaactcctgttttaatggtatttttcccttgtcttatttgtgcttgctttttttttcttgattaaaaaaatttttctcattaacgtttaaatattgaggatattactgtgtcacccattagcaggagatcttatgggatgtcggatcttgattcagtaggactcttaatcatgttttaacttcctttccttccccataagctgctacccccaaagtctattacttttctagacacttccctttgcatttcccagaagcagtgctttacggtcagcttgcctcttgttctgtgtactttccaacccttcccttcagcccttgctgctgtcagagctatgatccgtcaggtcccagacttgttcttggaagttcccacttggtgtggggccttctcctgaaggagggtgatgagtcctcattggtgttatctgggttcctacaccatatggactcccctggcctccccgtttctctgtgcagctcctgctgggacttcctgcaccattctagactgtggcccagatctcttccaggtcttggttctttattgcctggcttacatgttgcagtctcccctgtctctgggttgtgctgtaggcatatgttataggtacttttacttgctctccttgttgatctgtatggcttttaggaggtatcaggaagtttgaatgtaggcactcttgttcttatttgtctgcatttccagttatctgcatatgtcttgacgttattttttatcaaatttttttttggttggacataatgttctttcagtatacagggtaaggattaccatgatttcaggaaaaatttcttcagttatctttgaagagttatttggttgtgtttgctctgttctcatcttgaggggtgccaattttatatatgtgggctcttacatattctttgtagtattttcaagtctttgttcttacatacttttcttaggcttgtctgccagtttcccgattgtattttcagtctttcctttttttgttgcttttatcatgactttgaatctgtaacagatttatttttctcttgcattgcttctctgagctctctccttcagctctcagaggtcctctttgagttttaatttcaaagatggaatgtttgcatgaatttcttaaatttcatgaagaatttcatggttttttgttgctggatgctataattttctgctgtttgttctttgacttttgtttatatattttttcttgtagtatttttggtttttcccttttttccaggcagtatttttgcatagctcgatgccagttttctttgtgattattacttattttttattacttatgttttaatgaacccttatttttcctggactggccatttttagaagaaagtgtgtgtgggagagagaagggtcctaggggcttccagcagggaactgtggtagtgagaagctcagattttacctggcagtgcgttctccttgagccattttagtccctgaaaagaacctccatggagccctgttcttgcagggattttgtgtttggcatttaggcctgtctttggcccaccaagacccacagctccacagctagttaccttccatcctttggtcccagcaggtcactcttccaacatggcagacttgctcttcttcctccaacctggcctcttatctggctatggtgccaggcagggagcagacgtactccaggtgtctgtcacgcaccctcattgcctgcattctgagcaaggggactgtggtttaccatccccagttccaggagagccttgccctttgtgtgcttggcccaggtttgcagaagcatgggtgctcttagtttacccagggctgattttccaggcctctttttatagtttgtgatttggaattttagtttgttttttcatacttgcatcaaagttagggatttctttttatgtttcttgtttccttttgtttttaatttggcatcatgaacaagaacagggcagaggtatctttctgccactatttgtaaccaggatttccacattctgtagttaagcagttgtttgatactgtcccaaaatttttgaatctttcttaatctcctagtgggaaggcatgttttcagacacagctgggtactgcatccaataaaatacaaagcagactggggcacagtcctgattgctaacgtaagcattctgtttctcccttttcatccacattgataatgtggaaatcacggcttccacctgtgagtttctgcacaggtacattctcttggatgtggttgggactgagaaaagagtgtgtgtgctctttgatcagatgggataatggagcagcagtttttcaaatgcttccagttgcttcaaagagagaaattttaagatgaatgaaaaccttcaaggaaatatgtaaatggatttctctaactgtgtaggtagccagtctggtatcctgaagcaataatagaaataactttcttgctggcaggatgaggcttttgtaaacaaaggttgttttttttcctttcttcctctcttctcccttccctttccttccgttttggtactaaatatgaatacaataaaatcattttgatcatggtcattggaaagatttttatactatttgagataagaattaagttgtcaaccctgggattttaaatgctgcattattctgttcttttatgcctttgagagtgtgatccttaaactgctgtgttttttgcatcattttaattttataatacttggttgaagaaaagtggtatatgcataattaaaactatgacctattttcagagtgcaaattttagaactaataaaacttagagtaacttaaatactagattttcattaagttaaaccatagaaataagaggaaaagctattttcatcttacttgaaggcagctgctcccctgggcagtctctttgaggctaattgagaggagaggctttagtctgcccaatgtgatacccctcaagactgaaaggtggccagggctttcatgagaaacactccccagatcttacgtttaatttgattttcattttacacacgcgtgtaaagttgcttgctgcttgctgtaatgttgtgttttgatagaacgctttcattaagtagataccaagttttgtcacgtaaacatgatttcgaagcagttagatggcgctgtgagatgtgcattgtaggtccatgactatgccaaatgttatgcttggggtcaggttccagctcatgctgaggtccaaagggagtgggtggatgagccgatagctgaagggggtccgtaggcaggtgaaaggtagttttattcagcagctctctcatcagcagcttacttacactagctctctcacactgttcgccctgtctcagctgcttagtccggtggctcccatacacagctgcgtggtcggctctcccttcagggtcagcagcctaactctctctctgggtatgagtgagccgagccgtgtcctggcttcccactgtccatctattaaagccacattatggctacatggctatgataacaagtggagttatatgcctgtgctctaaacttgctgagtcactctggatgtttaccttgggctatcctcaaccaaagcacagccatgttccttacatgcatattggggttccccctcattccaccacatgacaagcaacatggagaattagtaattggctacatgtgtcttagtcctcaagcattcatcttgacagccattcatttcctgttttcatgtggtctaagatcttttcatgccctcagactctgccttctcctagtgcttaacagtcaatcatcatgcaaataacctaatgaaagagttttagaaagaggagtttttaagggatccaaggtttcttaacattttaaccatatcctaagggatattacttgatttagatcaaagctgtgtctcaaaatgtctattggatgattatcatgttttgattgatgggaccacctggcacatatattatgtctttaatattatatagatattcttttagaaccttatgatagcattttctttaagaaagatactgttttctttattaagacaaaagtgatctgttcacacctgagtgctagagttagagtactaggtgcagcagcagctgtggggacagggactgtcttcatcgtgcaaaggctgctggccaccacttcctgcgggcatctgtgcttatcaccccctgctggatcggaggtagcatgacctgctcctctctgtcccacagaaatgctgtaaggcgttatgagagggattttgcttttacttttgaagtaaacacatcacataaaccaaagacagaagcagtactgtgttagtattgttattgcattagttaatttggagggtcctactgtaaactacattactgatagtctctcttaaactagattttgatttgtttggctcacggttcaatggctattacagccatatccccagtacttgataagagatcattcagcactcttgaaggaaggaatctggcttaagtttttgctttctttaaataggcccacatggcatcatggtttcctttgaaggtaaggctccttcctagtaattacattcttaactgacatgagaagtttgaaggattaaaaaaaaaaaaccaaaaagcaaacttctatttttagaagctgaaaacagaaccatgactttggcactgatgaagagaagatcagtaatttaggacctgcagctttatattctctctgagtcttcagttcacagtcctatttttagaaactggtttttatgcctgcctgggaagtcttctacagtagaatggagtcatctttgtaaagagaacttagaaatagtaaaataatttatatgctgtaagtcagttccgttaaaaaacttgatgtagtaatttacaagagtagtgataggaagaaggaatcagctgtagcctgtacatccccaaataaggaataagaatcagaacagtcatgtgtgatcaactctaactcttctaagctgaagaaaaatccactgaaccatgttagaattaaaatattaaaaaatggattcgacagtaccagaggctgagtaacttcaaccatgtctttttaccctagttactgatactttgagtatatacttttttacaatcatgaaggagaattttatcacaaacctagcttttaaaaacttttctcctcgtgtaacttatgaaaatataattgtgggaagaaacatatatgaagaatcttttttttcagacttttcctattgttagtaccagatatctcttgattatctttttctttttcatgtctaagaagttgggtttacttttaagttactctgaagattttatgatggggacctgtcctaagaatacattgtctctatgtagtgtttctacactgaaaactttgtgtttctttttttttttgagacggagtctcgctctgtcacccaggctggagtgcaatggtgtgatctcactgcaagctctgcctcctgggttcatgccattctcctgtctcagcttcccgagtagctgggactacaggcgcccgccaccacgcccggctaatttttttgtatttttagtagagatggggtttcacggtgttcggcaggatggtctcgatctcctgaccttgtgatccacccgccttggcctcccaaagtgctgggattacaggtgtgagccaccgcgcccagccaaaaactttgtgtttctattccacactgcagacatttatttgccagtcctcaataaggggttttatgcctgatatttttatcatctgtctctggtaacaggtagataagagataagagaggtagctctctgaagacttgagctgataaaccttaaagaagctcaaaacttatcaatggatgaaaacagcaaagcatcctttcttaatgcaaattttatcttttttttttttctttttttttttcgagatgaggtcttgctctgttgcccaggccggactgcagtggcattatcatagctcactgtagccttgaactcctggactccagccatcctcccacctcagcctcctgagtagctaggactacaggctagctactcaccaccacgctcagctaatttttaaattttttgtagagatggaggtcttgtgatggtacctgggctggttttgaactcctgacctcaagcaatactccgcctcagcctcctaaagtgctggaattatgggtgtgagtcactgtgcctggccaaatttcattttataagcaaccatattcttagtaagagactgtattaggaactcatgtggaaaatattccatctccccaaatatggcacaaggcactgcatttgagttctccatatctacagaacacacttcctcttaaagatctgaagacactcttctccacccactgagtcattctaagtaattactgtggatgacagaattccaaattttcatttaatattgctgggagatacggtctttggttaaattcatttgtctcttccagatatatgcatgagtgttcaaaccatactagtcaaatgactgctaaaagtaggaagtcttaatttgattttgttatttgctatttgtgagtgtaagcttttgttatcagattagaagagatgaaaaggattgaaaatactctgtatcaacaagaatgaaaagaactgaacattttcttaccttcactgtagtggaaggacagattggtaaattttttctggagacaattttataatatgtatcaaatattaaaatactatgcccttggacctagcagttccccctctaagtatatttactaaggaaatagtagacaggtagggaaaggtatttgtacaaattttagcattatttacaatagcaaaaggaaacatatttttaaatagaagattagttgaattacagcatttcatacaagggaatattatggtattgttaaaaggacatttcatattctatttttactggcatcaaaaaatattcactgtatactactacatgagaaaagattatgaaacaacatagtgtgtataaaatgattttatttttgttcttaaaatatatatggatatatttttatgtctggttatacactatattgctttttacagtggttattttcaaggggaaagagagactaacgggcctctcatagtcttaatttttacacttctatatggtttaaaattttatatttacttttttgcttcatagtcaaagagaatagtaaagatatttacattctgaaaaatgaaagaatatacaggtttggagtaggcagtatgacattgacctttgcgttgtactcctctgtggagtgtccttatagtatttgctgaagcgtatcatgcacaatctccagtccatttcatgcagtttggcacattttccctgtgcagtgagaagattgctcacgtctggcatcgtgattcaggtgtttccactgcatgacagtgaagccctgaagaagcttgaggacacctggtacactcggtttgctttgaagtatcagcccataggtatgtgtcagtacttgttctcttaaagaagaggaaggcctctgatgaaaagttacgatctagcagtggagtcagctcccttgggcagatatttagtgctctactgggcagggatcaccagctacatgtgggaaaacattttgatggagggaataagataggttagatgaccccttttttctttttttaaacttttttttttttttttttgagatagggtctcactatgtcacaggctggagtgcagtgggatgatcacagcttactgcagccttgaccttccagacttaatcaatcctcccatctcagccttctgagtagctgagatcacaggcgtgcaccaccatccccagctaattttttgtaaagacggggttttgccgtgttgctcaggctgatcttgaactcatgctcaagcgatccttgtgccttgggctcccaaagtgttgggattatgggtctgagctattgtgccttgcattttttgatgttctaatactaccatagatcagtggaatcacaggcttttactacccttcaccaacaacacagacagttcagagtggccttcctgaatgtgtgtcagagttggaaccaaacaagtttttttgtttttgttttagtttttgttttgagatggagtttcactcttgttgcccaggctagagtgcaatggtacaatctcacctcactgcaacctccacctcccaggttgaagcaattctcctgcctcagcctcccatgtagctgggattacaggcatgtgccaccatgcctggctaattttttgtatttttggtagagatggggtttcaccatgttggccaggctagtttcgaactcctgaccttaggtgatccacccaccttggcctcccaaagtgctggaattacaggtgtgagccaccgtgcccagcctcagacaagttttaataagaatttagtttgactataaatgactattttgtatttgaaaatttctatttttgaggagccagttatttagaatgaaacaagctatgccacacttagggcaactagcaggccaaacatcttttgaggtgatttgtaattaccttggcatgcattactggatctgtcaattttctttgaatataattataagaataattattaatttatttggtatgtgctggacattatttaaaattttgtcaatatggatgttcaaatattttagtctggttatgttttttaagctggtagatttcacctttgcattactatcatttttttttctttaaaggacattttccttttggttttgtttaatggtatcctaaaataattttctttctgttttctatttctgaaaacaactattatataatgttttaccaaacaaaaattgttgtaagatcaaaccctaaattacattttgaattttgtttatattctctgaaaggaaaagttttgttattgttaattccaggtcatacaatagtcattttatattacacttaacaactgtttaactttgttttggcatttaagtggcaggaaatttgaatattgcctctaggacttgtaaagtgactatctgttagctactcctttttttttttttttttttttttttttttgagatggagtcttgctctgtggcccatgccggagtgcaatggtgtgatctcagttcactgcaatctccacttcccaggttcaagtgattttcctgcctcagcctcctgagtagctgggactacaggtacacaccaccatgcccggctaatttttgtatttttggtagagacggggtttccccatgttggccaggctggtcttgaactcctgacctcaggtgattcgcccgccttggcctcccaaagtgctgggattataggtgtgagccactgctcccggcctctgttagctacttcttagaaagtaaggggagaaagtgagtcgatggtgaaggctaggcatggggtggtagtggatttggggtcgctggggactgagactggtgatagcatctgggacataggtggatcttgaggctccttgagattgaaaggggaaggtcatctgctgtggagccaagtgtcatgagcatcttttaaaaagaaatgatcggatgttctttaacctgatttaaatttgaggtgaaatcatacctactgttttcatttgctcttgggttagggggaagaattaaggataggagaaaatagcctatctcagttcattctaactcatttttgtagactgctcaaattatcttaagaaaaatatgttaactgtgtattattaactaagaaataataacaccaactgtcacacttcctctcaccccctgcttcccaccctggtcctggtacaagatgctcttatgatccaagcactccccatgtggatgaggctggcaaaggatgcagtgttggtgacccctctagagtcatttagcttgtgttgagttcacagaacattagcagtcatgttgcttggaccttcttctgcccagtgcatatatgaaagtgttgataaatgtgttccatggctgttctggaagtttatgtgtagaatcctgttttgtgcttttgaataatttttctttagtgtattgaaaaatcttccataacacattgatgaaagtttatgtctctgggtagggaagagcagaattttgtggatggggagtcttcgtcaaaaagaacatttataacactaagtgggagaaaagtggggagcataaattaaacccccaaattaatgttcagtggacatggctgaacttaaattaggaccttggagattttgggtaagctacaagatgagttttcctttgggaagaaggtatccatcaggtgaggggaaacagagtccaggcacctggcggagcacaccccccagctaaggcctggcccctaacctgggggaaatgttggacctgccatgcagacaagcagggtctttatactgcatggagggtagatttaccaccacacgctgtttgggaagtgagggttgaatgatccccacttaactaaaaaatgaataagcgtacttgaaatgattttttaaagtgtttggtagtctatacttatgttctttctttgtttccactatagacagtattcgtggctactttggggaaacaattgctctgtactttggatttttggagtatttcacttttgcattaatccccatggctgtcattgggttaccttactacttgtttgtgtgggaagactatgacaagtacgtgatctttgcctcgttcaacctcatctggtccacggtgattctggaactgtggaagcgtggctgtgccaacatgacctacaggtgggggacactgctcatgaagagaaagtttgaggagccccggccaggatttcatggtgtcttgggtatcaattccatcactgggaaggaggagcctctgtaccccagctacaagagacagttgcgcatttacctggtctccctgccattcgtgtgcctctgcctctatttctcactgtatgtcatgatgatttacttcgacatggaggtttgggccttgggtctacatgagaacagcgggtctgagtggaccagtgtcctgttgtatgtgcccagcatcatctatgccattgtgattgagatcatgaatcgtctctatcgatatgctgccgagtttttaacttcatggggtaagacttgaggctttatattcacgtcttacttgcctgtaagaaatgttgcctagatcatgggattcacatagctgctaccttgcagagaaaatagatgttgctcttggctcattatagagacataaggaaaaatttatcagctttgtgaacactgatgatctccatgccatggttatcgtaactctcatttattatgtgttaattactatgttctaggtgccctgctaagcactttattcacagtatctcaccatcaccttctcaagggtaccgtgaagtagaagttatttcacccttttatggataaagataactgatgcttaatgaggttcagacagcaaatagtggagctagactaattcagacctatctttccaaagcttgtgctcctaatacataacattgtgtttcatgccgagggtaaaatagattgaaattgtttcactggctagagccacagaagaaagaaaaaaaaaatgtcttcatgatactcagctgaatcaactatgaccagtttcctaaaatggagtgtctagttggtgtgaggcactgaggactgctgttgagttcattgaaggcaggtgtttatggatgtatctgtggtaaaaaaggaacttggttataagttgaaaatggtcttgataggccattgactctttatttattcattcaaaccaatgaacaaattcgctatattattccctaggaagaagtcaaagccttaactttatgggacataaatatgttttaggggccagacgcagtggctcacgcctggaatcccagcactttgggaggctgaggtgggcagatcacaagttcaggagttcgagaccagcctggccaatatggtgaaaccccgtctctactaaaaataaaaaaatttagctgggcgtggtggcacacgcctgtagtcccaactactcaggaggctgaggcaggagaatcacttgaatccaggaggcagaggttgcagtgagccgagatcgtgccactgcagtctagtctgggcgacagagcaagactccgtctcacaaaaaaaaaaagatgatttaaattatttttattagttgtatgacaatatcagctgtcatttatcaagtactttccttgtgctaatactaggctaaagttttatattatttctgatcctgagagtgaccctgggaggaagatggtcagccttgttttgagggaataaggctgagtatcaggaggttaagtaacttacccaaggttaggcagtggctgagtagctgagttggtgttcaaatataggtcagtccaacactctatgtgtaagatgacacttctcttcagaatcttcctttttgtcattttatcttgctgttttgggatctatgcagtattaccttttctaggtgaagatagaaatttgagtttcctttcaagttaacccttgtaagccacatgaaactttacttacagaactttatttacagaaaactttatttattgccctcttctctagaggttactattattagttttcactattacttcttatacagggtctttgggtggctgtctgtaggattgtttgccagcacttcccaaatttctttgtagcagtaatttaaaaaataatttcagactacagtgctattgcagtaccctgaaaaatgtgtccctgtttgatgctcttggtggtaaggcatagctgtgattgacagcctagtacatttactgactgaggctctgatgttggacatctccgccctcaatgcaactcactttacctcataacagtgctttcgtattgttttcttactgagaagttacctgtgtgttttaatgttttagagaatcacagattggaatctgcctatcagaaccatctaattctgaaagttttagtggtaagtacagcgtttatgtacaaatccattttatgaaactggtatatactacataatatataggaatacaaatatgaagagttgcttctaatctaagatatcaatatattttgtgcaaataggcaaggattgattaataaatatgtgtacctctgtgttcagtagccttattacaaatgtgcatgtgatgtaagacttcaaaatataggagttagtattatagccaatttccagttatttaaaaactaggccaggtgtggtggttcatacctgtaatctcagcactttggaaggcctatgctggtggatcaagagttcgagaccagcctggccaacatggtgaaaccctgtctctactaaaaatagaaaaattagctggctatgatgacgcaggcctgtaatcccagctacttgggaagctgaggcaggagaatcgcttgaactcaggaggtggaggttgcagtgagccaagatggtaccattgcactccagcttgggtgacagagcgagactctgtctcaaaaaaaaaaaaaagaaagaaaggaaactaacgggccagacacggtagcacatgcctgtaatcccagcactttgggaagcttgaggcaggtggatcacttgaggccgggagtttgagaccagcctggctagcacagtgaaaacctgtctctaccataaaatacaaaaaaaattcaccgggtatggtggcacctgtaatcccagctactggggtgactgaggcaggagaatcgcttgaacccaggaggcgggggttgcagtgagccgagattgcaccactgcactccagcctgggtgacagagcgagaccctgtctcaaaaaacaaaaacaacaacaataacaacaaaactaacccactttttagatatgtttctattcttttccttttggtgatttctttgaatgttttgctatttagcaatccttcctgtcaccacaacctgtttagtgatggaatattacattaaaaaaaattttttttgttagatttccaaagttcaaaaggttcccagcatgttttgacaggtgggaggaaagagacagagagaaagcagtatgtaacctgcttgctgtttgttaaaagctgacatgtcgtgcctctttctaccattattataaataataaagaagtaccagcttgaaaacacctcatttatcgggggtttacctcagtcatctgtaacataagtgagaatcaagaaagttacctgaagaatcatctgaactttcaactggaattgatttaacacagtccgtgtactttactcccaagagaaggatgcaggccctcttttagaatctctgttctagctgtagaaatcattctaagaagtttatctatctggtttttcggtccttaaaaaatcagaaatcaccatcatgagggtgtttagatttctggaagtaggcaaacctacagagaaagaacaggtaaggaaatgaaaagctgtcataagagataagaattcaacaattgggcaataggaaagggaaaagtagccctacatatccaaaaggcttcgaaggcctccttcacaccgtgaaatggctgatacttaaaatgttggtgctaaatcagctaggaagttctgttctgtgccctctgtgtaagaaagtagaggaatatgggatacattaaaaagttcattcgaaaaggttatataacaggaggagctttttccctcagaggtaaaaacattgtttgtcttaaagaattcagttatttatgagactttattattctctgatgatgccagatacagttaggtaacttccttgtaaaaaaaaaaaaaagccgttggttaaagtcttcttcctccacggtgcttcttaggcctctctcttcctttttaatcttaaggggatggtgtttcttagccttcccaggcttttgcttttcaacttctgctctaacttagcacccctgtcctgcggtcgtgttgatcttactgctcactttctagaatgactccccatctccgcagtaattaagcactcacacctgtacacatagcagcctttgtctaagtgatgctactgggttggaagtagtcagcatgggggctgggaggcagaaaggaaacccattggtgcaggaagtaagctataggttcttgagcagggaactcctggaagagatggcactttttgtggcaggatccccttgattggtaatccccttcacccagcctgcttctgtgtatctggcagggcaggggagttcatgcttatggtgacaaagatgcttcccaggccagactggttgttatagcctcccagttacctgctgtctctctgcgatagagagaatctcaggtacataggcatgaagaggcctcttatatcaggcccttgtggcaggggcccccttgccagtgccacccatctgccccacttacttttgatgaggtttccaggcataggcttgctgtgatagggtccttcttgccagtgctgcctggccatcctgggatctctctgtggagcaggggagtcccaggcccagcaaggaagaagagcacttccccaggaaacttattgttggtgggggggtcctgattgatttccccttgccaatttagcagggctcccctggcactgacaggattcctattcaaatgtgggaggaatgagcctacttgggctacctgggtggtaggttggggttgggaaatgtcaggccttggtctcctccttctgttgggtgggggaacttaaggtgtgcacgtgctgtgctgttccttcagctctggggtcctaaaccatctcgtcttcctttaagcacctttcagagttctcctttggttgccttgtttgttatttccagagtttgtttatttaataaggagacatggggagaaacaagtctttaccatttcatttagactggaagtctcccattacatttttcttttttttttttttttaatgtaggaaaatacttcttttttttttttatactttaagttttagggtacatgtgcacattgtgcaggttagttacatatgtatacatgtgccatgctggtgcgctgcacccactaactcgtcatctagcattaggtatatctcccaatgctatccctcccccctgcccccaccccacaacagtccccagagtgtgatattccccttcctgtgtccatgtgatctcattgttcagttcccacctatgagtgagaatatgcagtgtttggttttttgttcttgcgatagtttactgagaatgatgatttccagtttcatccatgtccctacaaaggacatgaactcatcattttttctggctgcgtagtattccatggtgtatatgtgccacattttcttaatccagtctatcattgttggacatttgggttggttccaagtctttgctattgtgaataatgccgcaataaacatacgtgtgcatgtgtctttatagcagcatgatttatagtcctttgggtatatactcagtaatgggatggctgggtcaaatggtatttccagttctagatccctgaggagtcgccacactgacttccacaatggttgaactagtttacagtcccaccaacagtgtaaaagtgttcctatttctccacatcctctctagcacctgttgtttcctgactttttaatgattgccattctaactggtgtgagatggtatctcattgtggttttgatttgcatttctctgatggccagtgatgatgagcattttttcatgtgttttttggctgcgtaaatgtcttcttttgagaagtatctgttcatgtccttcgcccactttttgatggggttgtttgtttttttcttgtaaatttgttggagttcattgtagattctggatattagccctttgtcagatgagtaggttgcgaaaattttctcccattttgtaggttgcctgttcactctgatggtagtttcttttgctgtgcagaagctctttagtttaattagatcccatttgtcaattttgtcttttgttgccattgcttttggtgttttagacatgaagtccttgcccatgcctatgtcctgaatggtaatgcctaggttttcttctagggtttttatggttttaggtctaacgtttaagtctttaatccatcttgaattgatttttgtataaggtgtaaggaagggatccagtttcagctttctacatatggctagccagttttcccagcaccatttattaaatagggaatcccttccccattgcttgtttttgtgaggtttgtcaaagatcagatagttgtagatatgcggcgttatttgtgagggctctgttctgttccattgatctatatctctgttttggtaccagtaccatgctgttttggtgactgtagccttgtagtatagtttgaagtcaggtagtgtgatgcctccagctttgttcttttggcttagggttgccttggcgatgcgggctcttttttggttccatatgaactttaaagtagttttttccaattctgtgaagaaagtcattggtagcttgatggggatggcattgaatctgtaaattaccttgggcagtatggccattttcacaatattgattcttcctacccatgagcatggaatgttcttccatttgtttgtatcctcttttatttccttgagcagtggtttgtagttctccttgaagaggtccttcacatcccttgtaagttggattcctaggtattttattctctttgaagcaattgtgaatgggagttcactcctgatttggctctctgtctgttgttggtgtataagaatgcttgtgatttttgtacattgattttgtatcctgagactttgctgaagttgcttatcagcttaaggagattttgggctgagacaatggggttttctagatatacaatcatgtcatctgcaaacagggacaatttgacttcctcttttcctaattgaataccctttatttccttctcctgcctaattgccctggccagaacttccaacactatgttgaataggagtggtgagagagggcatccctgtcttgtgccagttttcaaagggaatgcttccagtttttgcccattcagtatgatattggctgtgggtttgtcatagatagctcttattattttgaaatacatcccatcaatacctaatttattgagagtttttagcatgaaggtttgttgaattttgtcaaaggctttttctgcatctattgagataatcatgtggtttttgtctttggctctgtttatatgctggattacatttattgatttgcgtatattgaaccagccttgcatcccagggatgaagcccacttgatcatggtggataagctttttgatgtgctgctggattcgttttgccagtattttattgaggatttttgcatcaatgttcatcaaggatattggtctaaaattctcttttttggttgtgtctctgcccgactttggtatcagaatgatgctggcctcataaaatgagttagggaggattccctctttttctattgattggaatagtttcagaaggaatggtaccagttcctccttgtacctctggtagaattcggctgtgaatccatctggtcctggactctttttggttggtaagctattgattattgccacaatttcagctcctgttattggtctattcagagattcaacttcttcttggtttagtcttgggagagtgtatgtgtcgaggaatttatccatttcttctagattttctagtttatttgcgtagaggtgtttgtagtattctctgatggtagtttgtatttctgtgggatcggtggtgatatcccctttatcattttttattgcgtctatttgattcttctctctttttttctttattagtcttgctagcggtctatcaattttgttgatcctttcaaaaaaccagctcctggattcattcattttttgaagggttttttgtgtctctatctccttcagttctgctctgattttagttatttcttgccttctgctagcttttgaatgtgtttgctcttgcttttctagttcttttaattgtgatgttaaggtgtcaattttggatctttcctgctttctcttgtgggcatttagtgctataaatttccctctacacactgctttgaatgcgccccagagattctggtatgttgtgtctttgttctcgttggtttcaaagaacatctttatttctgccttcatttcgttatgtacccagtagtcattcaggagcaggttgttcagtttccatgtagttgagcggttttgagtgagattcttaatcctgagttctagtttgattgcactgtggtctgagagatagtttgttataatttctgttcttttacatttgctgaggagtgctttacttccaactatgtggtcaattttggaataggtgtggtgtggtgctgataaaaatgtatattctgttgatatggggtggagagttctgtagatgtctattaggtccacttggtgcagagctgagttcaattcctgggtatccttgttgactttctgtctcgttgatctgtctaatgttgacagtagggtgttaaagtctcccattattaatgtgtgggagtcttaagtctctttgtaggtctctaaggatttgctttatgaatcttggtgctcctgtattgggtgcatatatatttaggatagttagctcttcttgtcgaattgatccctttaccattatgtaatggccttctttgtctcttttgatctttgttggtttaaagtctgttttatcagagactaggattgcaacccctgcctttttttgttttccattggcttggtagatcttcctccatccttttattttgagcctgtgggtgtctctgcacgtgagatgggtttcctgaatacagcacactgatgggtcttgagtctttatccagtttgcccgtctgtgtcttttaattggagcatttagtccatttacatttaaagttaatattgttatgtgtgaatttgatcctgtcattatgatgttagctggttagtttgctcgttagttgatgcagtttcttcctagtctcgatggtctttacattttggcatgattttgcagtggctggtaccagttgttcctttccatgtttagtgcttccttcaggagctcttgtaaggcaggcctggtggtgacaaaatctctcagcatttgcttgtctataaagtattttatttctccttcacttatgaagcttagtttgtctggatatgaaattctgggttgaaaattcttttctttaagaatgttgaatattggcccccactctcttctggcttgtagagtttctgccgagagatctgctgttagtctgatgggcttccctttaagggtaacccgacctttctctgtggctgcccttaacattttttccttcatatcaactttggtgaatctgacaattatgtgtcttggagttgctcttctcgaggagtatctttgtggcgttctctgtatttcctgaatctgaacgttggcctgccttgctagattggggaagttctcctggataatatcctgcagagtgttttccaacttggttccattctccccatcacttttaggtacaccaatcagatgtagatttggtcttttcacatagtcccatatttcttggaggctttgctcatttctttttattcttttttctctaaacttcccttctcacttcatttcattcatttcatcttccattgccgataccctttcttccagttgattgcatcagctcctgaggcttctgcattcttcacgtagttctcgagccttggttttcagctccatcagctcctttaagcacttctctgtattggttattctagttatagattcttctgaatttttttcaaagttttcaacttctttgcctttggtttgaatgtcctcccgtagctcagagtaatttgatcgtctgaagccttcttctctcagctcgtcaaagttattctccatccagctttgttccgttgctgaggaactgcgttcctttggaggaggagaggcgctctgctttttagagtttccagtttttctgttcaggtttttccccatctttgtggttttatctacttttggtctttgatgatggtgatgtacagatgggtttttggtgtggatgtcctttctgtttgttagttttccttctaacagacaggaccctcagcttcaggtctgttggaataccctgccgtgtgaggtgtcagtgtacccctgctggggggtgcctcccagttaggctgctcgggggtcaggggtcagggacccacttgaagaggcagtctgcccattctcatatctccagctgcgtgctgggagaaccactgctctcttccaagctgtcagacagggatatttaagtctgcagaggttactgctgtctttttgtttgtctgtgccctgcccccagaggtggagcctacagaggcaggcaggcctccttcagctgtggtgggctccacccagttcgagcttcccagctgctttgtttacctaatcaagcctgggcaatggcgggcgcccctcccccagcctcgctgccgccttgcagtttgatctcagactgctgtgctagcaatcagcgagactccgtgggcgtaggaccctccgagccaggtgcaggatataatctcgtggtgcgccattttttaagcccgtcggaaaagcgcagtattctggtgggagtgacccgattttccaggtgccgtccgtcacccctttctttgactcagaaagggaactccctgaccccttgcgcttcccaagggaggcaatgccttgccctgcttcggctcgcacacggtgcgcgcacccactgacctgcgtccactgtctggcactccctagtgagatgaacccggtacctcagatgtaaatgcagaaatcacccgtcttctgcgtcgctcaggctgggagctgtagactggagctgttcctattcggccctcttggctcctccccgctcccattacatttttaaatgctgcattacagttgtagtaaagtactctaaagcagtgcttaacacttatcttttttttttttttttttggcagttcaacttcctcaattgctttgcctcactcttctatattgcctttgtcttgaaagatatgaagcttttgcgccaggtaagtaaaaataacagaaaaataccaattttttaggtcatagaggtggttttctatctttagatgctgtaattgccttcaaattatttttacaaataaaatcttttaaattttgtatgtttttaagccaaattctaaataaaaaattattaggaatggcattgtgtattatgctcaactgaaatgagttgaacctaaccaacctgaaaaattaagtatagggcagtaaaatcaattatatagttcacctcaaagcttgtaagcaactctaacagcaaaaatatagtattcattaactgaactgttttgtgtgccttggatggggatgattggtgtaaccttaggtctcgcaaatttaatttttaagttaataagttgttaaactttagagaccagtggatcctatgcagtgctgtatcttttctaaagtgtctgacatttattttggtgtgttgtcatttctggatcacataataccaatgaataataaattaagaacaaattattgatttctaaattctcctttttatatttgaaccagttataagtaaatggctgttttttcccagttttaatattctgagattgttggtgagcagtctcaaaggctagactccacttgttaaaaattatttttcaaaatagagaaagtttaaagtagtacatttggaattgatgagttggatgtacatgtaacagtggtcccatgtaatagtgtattagttggatgtgacttctcatttcttctgctttagagagtctcctttacttagcagaagataggggaatggaggaggaccgcttaaaaaaacagttgtaataccagcaaaggtggggtgtgatggaaacattcatatctatctgagaaaagtggagattgatacatctctggaaaccagctctcttgatagctttgccaagaaacttaactcatccctagtaaatcttcagagaggagcaaagattcatgtacatagatatccaagcaccagcattataatagccaaaattgggagtaatagttaattcaacagcagtgtacaggccaagtaaaaaagaatttttaatgatacgggaaaatgctcaaacatattaagtgagaaaagcagtaaacaaagtgtatccatataggataattatagttttatttttatatatgattggaaagaaatatcccaagaagtagcagtggttttgtcatggttgtgtaattatgggtggctctttttttctattttttttttaataatacatacatagttgtacatttttatggggtacatatgctgttttgttacattcataaaatgtgtaatgaaggccgggcataatggctcatacctgtaatcccagcactttaggaggctgaggcaggcagattgcttgagcccaggagttcaagaccaacctgggcaacgtggcaaaatcctgtctctaccaaatatacaaaaagttacctgggtgtggtagcacttgcctgtagtctcagctacctgggagactgaggtgggaggattgtctgagcctgggagctccaggctgcagtgaactgtgatcacgccactgcactgcaaagtgagaccgtgtctcaaaaaaaaaaatgtgtaatgatcaatcaaggtatttagagtatctatcatctcgagtatttatcatttctatatgttgggagcatacaatacattattgttaaccataatcaccctactctgctctcatatgttagaacttatttcttctctctaattgtatgtttgtacctctcgatcagcttctctttatcctcctctccccaacacacacccacccagcctctggtaaccgtcgtcccactctatctctatgagatcaacttttttagctcccaagtgtgagtgggagcctgtgatatttgtctttctgtgcccggcttatttcacttaacataatgacctccagttccatccgtgttgctgcaattgacagaatttcagtcttttttatggccaactagtattccattgtgtatatataccacattttccttatctattcatctgttgatagacactgaggttgattctgtttctttattgttacaaatagtgctgcagtaaacatgggggtgcaggtgtccgtttgatatgctcatttcttttcctttggataaatacccagtagtcagaatgctggattctatggttgttctattttcaggtttttttttagatgtctcaaaaaaaaaaaaaaaaaacctctcgccatactcttttatataatgtctgtatcaatttccatttctaccaacaacagtgtataagagttccctttgttgcacgttcttgtcagcatctggattttttgggtctttttaataatagcaattctatttggagtaggatgatatctcattgtggctttgatttgcatgtccctgatgatgagtggtgttgagtattttttcatatacctgtggctatgtaaatgtcttctttagagaaatgtctattcatgtcttttgcctactttaatgggattatttgtatttttggtattgtttgagttccttgtatattctggtattctaggtattagttccttgtcagatgaatagtctgcagatcttttctcccattcaacagattgtctcttcactgtgttgtttcctttgctgtgcagaaacttttttctttaatatagtcacagttgtctatttttggttttgttgcctgtgctttttaggtcctagccataaaatggtgggaactttgcttagaccaatgtcctgtagtatttcccctatgttttcttctagtagttttatagttttgggtcttatgtttagatctttaatccattttgagttgacttttgtttgtggtgatagagaggggtctagtttcattcttctgcatatagatacctggttttcccagcaccatttattgaagagggtgttttttctccaatatacattcttcttttttttttttagatggagtctcactctgttgcccaggctggagtgcagtggcacagccttggctcactgcagcctctacctcctaggttcaagcgtttcttgtacctcagcctcccaagtagctgggattacagatgtgcgccaccacgcctggctaatttttgtatttttagtagaggtggggtttcaccatgttggccaggctggtctcaaacttcttttttttttttttttgtttgagacagagcctcgttctgccgcccaggctggagtgcagtggcgcgatcttggcttactgcaagctccgcctcctgggttcacgccattctcctgcctcagcttcctgagtagctgggactacaggcacgtgccaccatgcccggctaactttttgtatttttagtagagacaggatttcaccgtgttagccaggatggtctcgatctcctgacctcgtgatctgcccgcctcggcctcccaaagtgctgggattacaggtgtgagccactgtgcccggcctcaaactttccatctcaggtgatctgcccgccttggcctctcaaagtactgggattacaggcatgagccactgcaccctgcctcaatatacattcttagtgcctttatagaaaatcagttgactgtaaatatgtggattttttttctgttttatttttgtagtgagggtatgtattagtggtataatttaaattctttaaaaaagaatttagccaaactttttttatccagagttggcaacatcatttagatttatatgttgcagtcaggatgaaatgtcgaagaacacaattgcaagttaattcatttttgtaatgattctttttttaaagttgtagaattgacaaataattgtacatattcatgaagtacttggtgatgttttaatacataaaatgtatcgcagtcagatcagggtagttaacatatccatcctctcaaacatttattatttccttgtgttgggactgtttaattgaccagtttgtttcttattataacattatttgtattataatcttatttatcttttaatcttggtctttcatgtgaaaaaccataaattagaaacaccattctaacacctagcttttctaatactagtttttataacacaatagtatgctatttattgaagattccattttatttgttgcataattgtatttatgctataaatactgtagtttaatttatatataatttatacaaatgctatagttttattaagctgtattcccaaaatgtgatttgtgtgcttctctttagagcttggccactctcctaattacctcccagatcctcaaccaaattatggaatcttttcttccttattggctccaaaggaagcatggtgtgcgggtgaagaggaaggtgcaggctttaaaggcagacattgatgctacattatatgaacaagtcatcctggaaaaagaaatgggaacttatttggtaagttggaatattgctgaattaaacatttactgagagtgaataatagccatgcactgagttcaacaaatgttatacattcatgatctcagatgtgactattctagaagtgctttccagtcagtttcctcatcatgaaccactttaaagtgaaagggatagaactttgcattgaagcactgctgtctgaaatctaaagttacgcataatgacaccaaagggcaaatttggagaattacatgactgctttgctttgcggagagcagggtagaatagttgccccagagatgacagaacgggagagatggtccctgaagaggcagcagcattgctcgctcttgacacttcaaactcatggaaaatgatggctgcacaaacaaaagatagagactcattgatgaacaatggaatgccaatctgaagattgaattttagtttacattagtgctattgtataaatataaaacagttcttttaagacagagactttctgaattacttttaggaactacaagcagatcattagagatttacacttttaatatttgaaaggtctagctcataaaatctatgtgttcagccaacttttattgagctctgactacattcactgtttctatatttcacattttttttaggccattgtttcttaacatcctgcaccttccttgttgctacagtattctttctggtgaaatagatccttcagtgggtcatttactgagagcccattattgtgaaactttcatagtcttgtttttcatcttgaatgagtttatctcctgatttttgagtgtcttgactgactttcataatttttctcatgtgcttaggaatttgtatgttcatgttgagtaggactttgtctttttctctctgctcacttctgccttattttttgcagttgcccccactgagcctccaagcccctcatccagaaccaggtgtttgtagcccagagctcccatcttgtggtggtgatgaggattttatagatctggtcacagagccagtaggtggcatgctgttgacatagctgtagttaccaggcagcagttgtagcttttttaaagcctcctttgaagggcagggagcattgtcccaacccctggttttgctcagcaagcctggctccagttacactccaggggagagggtgctcttggttctcctccccataggatacagatcctagccccttctgtcattgctgtgtttgagggagatgattcaaagtataaacacatagtaaactttgaacagtaacattgtttatatttatatatgaagcatagagaaaagacacacacctactctgtctcacagaggaagaattaaagagaaggagcatgtgggcacaagtgtggagctgtcctttctggattggttgagtgctagcttactatgggataaaagttaaattatgtcattttactatgggataaaagttcccattatgtcaggatcctttccttgcctatgcttgggggtggtattcttggccacatttcttttccttttttcactgtcttatagaaactgcaccagcagtccatcccctgtactctcattccatcccccctcatctttggaggccttctgtcaccagccatcacctggtactcttgtatctacttcttctcctcctaactgctccaccaagtcagcaacttgcctattttgaactaagcaaactcttcacatcttctgctgtttttatcctgtctttccttcccctcacagttttctgcaataattctccatattgttgtctttagtttcctacttctctttctataatcaattagaatctgctttcagctgttctttttctctgaaatagtttgggcaaacaacattatctcctgaagtacccaaaacacgattcataatcttctgaagatgggtttctcctgctttgcccctggctcagtgaatggtttttagtacagtcctcatctgagcaattctaatttatctaagaactgtatgccagtgatgtgacactgccaaaatctcagatcttacctcttttgacatttcagggtatctgacaaaacctttatgaaggacggtgagggaggcatggctattcccatgtcaaaaataagcaaatgaagctctatgtcattaattatttggtgactaaatcagaaagaaggttcaagaccttgccttcccaattcagaatctttctgttatacaccacaggttctctgatgtgaagtaaaggaaataatatattgatttctctctcaggctctgggtctgtgactgaactctagggtttacagtgccactcctttttggacctgcagggttctgcgtgatctggccatttcccactcctgatctcttacaggtttctttttcaccgtctccactggagtgatgttggatatttgccatttcagttctctccatgtatttggaggcggggatacttttggatcacatttattctagatgattgtttcctatgcatgaatcctttcttctgggtccatttttctcctaattgaaatcaatgaatttagaactgtattttctgtaagctcatcctgactgttatatgtgagtctaaaataatgttgccaagctttgggaaaaagcaatttggccgaaactttaaaaacattactataaaagtaatactttctcactccctgtagaaaacttagaaaatgcaggatagagtcaatatataaaaagaaattctctgtaatattcccacccatggtaatcccctgggtctcctgattgctgttccaccagcccaggactaagctgtgttgcttcctagatcttcactgtcctctgctgtccttttcctgtgaactgcccactcatatccaactgcatagctgggtgaggctgaattttcatgacgactattccaagtagaacatcatattgctgcacagtaaatgaactgccttctactaaatgatacattacagaggtttgccagaaatgtaaaaagtgccagtctgcattaacattttttgaaatgtaattatttttcaaaagacatttatgttaatatgttattatttaaatgtattaatggaagatctttaaaatttctcagctttttttttttttttttctggtgagacagggtctcactttgtcacacaggttggagggcagtggtggcaatagtggctcactgcaacctcaacctcccaggctcaagcgatccttctacctcagcctcctgagtagctgggactacaggcatgtaccatcatgcctggcttatttttgtattttttgtagagatgggctctcactgtgttgcccaggctggtcttgaactcctggatttaagcagttctcccaccttggcctcccaaagtgttgggatgagccaccatgcctgacctaatttctcagttttaattaataatatggtaagcatcaaagcatcaactagataaactcacataaacaaaacgtcttttttttttttttttttttttgagacagagtctcgctctgttgcccaggctggagtgcagtggtgcgatcttggctcactgcaagctccgcctcccaggtttataccattctcctgcctcagcctcccaaatagctgggactacaggtgcctgccaccatgcccggctaattttttgtatttttagtagagacaggttttcaccatgttagccaggatggtctcaatctcctgacctcgtgatccacccgcctcggcctcccaaagtgctggaattacaggcgtgagccactgcgcctggccaaacaaaatgtctttaatgtcctcaataatttttaagagtttagggctccttaagaccaaaaaagcttgaaaactacagctctagaacaacctccttgccgtttttcaaggaattggcttttgtaaatctattgtttgatcttatttctcataagatttgagtgaaatgattttggaagtataccaccattgtaccccatcaggatgtgttgacgtctggttgcccattttgtggggtcaccttgtttgatcattcggttggcttggtaaaaggcagattgcacagtgtttttttttttccttcattttataatgaataaattatctgtgggtcaatacttttgaaactttccttttcctttttataaatagtatctctttaaaaatacaatttctaattgtttgttgctggcatatgggaatgctgttaatttttatatcttttacccacaattttgctgaactctcctgttatttccaaaacattttctatagattttgttggattttctacatagacagtaatttgagctataaataatgaccattttctttcttccttcagtttttaccctttttattatctactaggcttactggtatgttcaatacaatttgaatagaagtaattatcacaggaatctttatcttatttctgatttttttatcttctcaccattgtgtgttatgtttgttccgtgtttttagtaaataacattttatcagtttaaaacttctcagctgagtgttgatagcatggtccaacaaaaagagagaatagggtagattgtgtcttggttaatatattcttagtgtgtgtatgtgttttctttgttgaattttcattttttttccttcttgctgttggattatgtccttggtttgctaaatttcttggctcaaaagcactcagaagtgtaaaaggtgctgatacagtgttaacgtgtagctatcatcactcagaatcaccccgagagatggaaacacagagtgtggggaaacacagagtgtggagcacgctgctgtgtttggaaagggctcccctggtgctatacactaataactccaagaaggcctttgcatgattttcagaggcttcccaatagcacacctgagaaaaactgcctgcacatctctgcacaggcttgatctttacagcctgaaacagtgcaattttgaatgctgagcatagggtatcaggatttcttaagactgaatgtggtaaaaatggcttgattgctaagatttttactcttttcccaactcttgatttattcatccttcagagaaagagattgatgcaatgtcactgggtatatttaagaaccataactagatgctgcaacacaacatgagaacataccatctagagccaaatgcaaccaaccaagttatttagaaactgctcgcccttgaatcccaagttgagcatgtaacctgccagttctgaggtttatgtgtttagtggtactttctggtgaacctcgaaaatagccagtgagactcagaatcggtggttcatacttgattcagatatccagaacatctggaagaagcaccttttgccattcccaataccctattgttgtgtttgagattttctatttagtaaaatataaaataagaaaaactgactggaagtggactctgacttacactaatactgagcctaatatgcatatcttagtgaaagactgattcagagatgcgataataataatgtttattaatttgaaaatattaatgcttatgattgctttaaaatattgtgatgaatacttttcttaaactgaaattattattgcatgtgtgtgggatgatcatgaagcctgagggtgtcagaagttggagaaacactggtgtatggtggggaaactctttgaggtttttttgaatagttagaggccacagctttgattagtattgcaaaaggatattcctattgtatgatattaaaataatgcatgcttgtttatattttcagggcacctttgatgattacttggagttattcctgcagtttggttatgtgagccttttctcctgtgtttacccattagcagctgcctttgctgtgttaaataacttcactgaagtaaattcagatgccttaaaaatgtgcagggtcttcaaacgtccattctcagaaccttcagccaatattggtgtgtggcaggtaattgtttgagaaaaaaattattcctttaaaaaataaaaatacgaggtgttatgacagggaaaaaaaattaaaaagtaagccctacagagagatttaggaaaactgaatttgtttgtttggctacaaactagctgtgtggccttggataaccattaactttgtctagcttcacttttcttgtttttaaaattgggggttaggggagataaatataatttctaagaccccttttagatgtgaaactctgacaatcttctgggaaagtagccagctaagacttcatctcagccagtattaatgagaccctctctgctacagtgtcagtggaagccacatggggagcctagacttctgctcctatctggcagtaatgagactccttttttagtttttgctagtctagttttctagtcctggggtggtctcagaggaagcctagtggaatataaggagtttcaccacaaccctgcacagtggaggccacatgggaacatatatgaggcacctgtccttctctccctgaaggaagaatcagtagaggtctagtgggaagcagagcacccatccttgcccagcaataatgaggaatcccccctggatgccagtggtttctacatggggaacctggacttctacctctacctggtagtaataaggcgttatcccctcttcccttgctggaatggtgtcagagaaatcaactaaaacagaaggtttaaatgagatatagaatcttatctctcctaacatgtccaggtttctatttaaaaaatcactgatcagaccaggtatggtggctcacacctgtaatcccagcactttgggaggttgaggcaggcggattacctgaggtcaggagttcgagaccagcctggccaacatggtgaaaccccatctctactaaaaatacaaaaattagccagcatgctgctgggcgcctgtaatcccagctactcaggaggctgaggcagaagaatcacttgaagccgagaggcagagattgcagtgagctgagaccatatcattacactccagcctgggtgacagagcgacactccatctcaaaaaaagaaaaaaaaaaaaaaaaagaaaaatcactcatcatagaaagaaccaggaagaaatcaagcttaatgagaaaagacagtcagcagatgccactaccaaggtgacacaggttagaaatattggacagagattttaaaacagccttatataaaagtttcaatgagtaattatgaccatatctgaaacaaatgaaaaaacagaattaggatatctcagcaaagagatggaagatataaaagagaatcacattgatattttagaagtgacaaataccataattgaaataaaaagctcactgaatgagtgcaacagcagaatggaagggatagaggaaagaatcagaaactggaaaatagaataaaagaaattatcagctgggtgctgtggctcacgcctgtaatcccagcactttgggaggccaaggcaggcagatcatgaggtcagaagttcgagaccagcctggccaacgtggtgaaaccccatctctactaaaaatacaaaaaattagctgggcgtggtggtgggcacttataatcccagctacttgggaggctgaggcaggagaatcacttgaacctgggaggcagaagttgaagtgagctggattgcgccactgcactccagcccgagcaacagtgtgggactccatctcaaaaaaaaaaaaaaagagagaaattatccagtctgaacaacagagagaaaatattctgtaagcacaaacatagcctcagggacctgtgggggtataaaaaagagctaacattcatgtcactggagttacagaaggagagaagaaagagggaggggcccaaaaagtacttgaataaataacggctaagaactttttaaatgtggcaagagacccaaaactgcagattcaagaagcattgtgaaccccaaacaagataaaccaaagaaatccttgccaacacacatcgtaaacacttgaaagctaaagacagcatttcaagagcatcaaaagagaaataacatcttacctatagggggaaaacaattagaatgacaggcaatttcttattggaagctatggaggccagaagaaagtggcaaaatatttttcaggtccttaaagtattgtcaatatagaatcctggctgggtgcagcggctcatgcctgtaatcccagcactttgggaggctgaggcaggtggatcacctgaggtcagaagtttgagactagcctgaccaacatggtgaaaccccatctctaccaaaaatacaaaaattagctgggtgtggttgtgggtgcccataatcccagctacttgagaggctgaggcaggagaattgcttgaacctgggaggcaggggttgcagtgtgctgagattgcgccattccactccagcctgggtgacaagagcaaagctccatctcaaaaagaaaatagtgtgtgtatatatataaaatacacacatatacatacatacatacatacatacatacatacatacatacatatatatatatatatatatatatatccagagataatatttttcagaaatgaaggaaaaagcaagacactttcagatgcaggcgaactaagagaatttgttgccagtacacctatcctaagagaatagctataggaagttctcttaactaaggaattatgaaagaagaaatctgggaacctgtagaagaaaaaacatggtaaccaaaaatattagtaaacaaaatagacttttcttctcttattgagttttctatgttatgtttgatggttgaagcaaaacttataatactgtccaatgattctaaatatatgtagaaaaaaattttttttatttttttattttttgtaggcatgggctcccactatgttgaccaggttggcctcaaatgatcctaccaccttggccttccaaagtgctaggattacaggcatgagccactatacccaacctatgttgacaagatacactgtctgattcttttccctatatcaagacaagtatattataaataacagatggtagagggaggtaaggtttctgtgcttcactcaaactgataaaagatgacacaagtagaatgtgataagttacggatatataatacctagagcaaccactaaaaacattacacaaaagatatactcaggaacattatagataaaccaaaatggaattctgaaaaatgttcaagtaaaccacagtaagacaggaaaaagaaagcagagaaatgaaaaacagggaacaaacagaaaacaaggaaatgaccagccgtacatcctaacatatcaataactacattacctgtaaatggtcaaacaacaattaaagacagagattgggagagtggattaaaacacatgactgaagtatatgctgtctctaagaatctcaagtcaaatatgatttaggtaggtttaaagtaaaagaatagaaaaagatatatatggaaatattaatcaaaagaaagaaggaatgactatattagtatcagataaaatagacatctgtgcaaaaattgccagagaggaccattctatgatgataaaagtgtcaaattaccaggaagacatagcaatcttaaatgtatatgtgattttggaatatgcaaacaaatctatattgacaaaaagcagatcatattttgtttggacacaggtgtaaagagagggctgaattgcaaggtcatgaggaatcttttgggggaaatggaaatgtcctgtgtcttgtttgtggtggtggtggtttcacaggtaaatacacctatcaaaaggtaatgaagtatataccttaaatgcatgcagtttattatatgtaaattataactcaatataggtgattttaaaaaaaacctgaaagtttagttacaaacatattgcaagttcaggaagccaggcactgtcatatgctgctggtggaagcatgagctggtcaacccatggagtgcagcttcgtatttatctatcaaaattacaaatgcatgtcccctttgactcagccatttcactttccagaatttagcctaattccacatttgttaaatgatgtacttataagatcaccaattgtagcactgtttgtaatagcaactaaatgcccaccaataagaaaatggttacataaattctgatacgtccatgtaataaaatgcagaagcagtgtggcaaagaatgagggagctcttttagtattgacacagaaagtccctcaagacactttaaatgactaaagcaaggggcctgacagtatgtagtatgctgaaaagggagtaggaaagagtgtatatattcaatatgcttattttgcatacaaactgtctggaagaatacataagaaattgcaaatagtggttgtcttctagggagaatgggagctgcgaagtggaagaaaaggggacaagggaaaaagacactcttcactatgtacttagaattttttatttttaagccatgagaatataatcaaaagtaaataaatagaaattttaaactaaagtaaagacagtcttagatttcttatgaagaaaactgtggaaaaataatcagactacacaaagatttctaaattgtaagatggcagaagttctccatgggacaaaatgtattcatattaagtttggattcagtcatcttttgttttgcttcttttaaaattaatgtttctaatagtacttgtgtttcttggaattaatgggtaaattattaagtggtgatcaccatatactttgtattaaagaaaaaaagagcaatggtcacaacatttctccatccatccttggcagtatgcaccaaagtctccttcagggaatgctggaccagtttgtctagtaggtctcagtggggcctagcatctatatttttctaaagttctacatttgatttgctaaatgatgctagaaaaggatcaccatttatcactggtgccttgattataaagctggttatagctgagtcagatgtggtgtgtgatgtcaaagtagaaggatggtttcacaacataagttctgtttgaaatcttacctgttttttaatgtgaaacatttttccctggcagccctactttagattccccttagatgtgagtagagtaactttaacagtattcccaattcaggtccagggctgcctccaattaggaagatagaacatactgctttgggatattcatgccaaaagtatctaaaatactgcctaacagtatggcttttttttcagctaaaaaaatcataccatgacagagaaaaaaatttaaaatgtacttggaatgtttagaactagggtaagacattttccttgatttttagataacatgaaaaaggatgaggaaatatggaagcagtcattgcaatttttaatttccattcttttttcttttagttggcttttgaaacgatgagtgttatatctgtggtcactaactgtgcgctgattggaatgtcaccacaagtgaatgcagtctttccagaatcaaaagcagacctcattttgattgtagtagcagtggaggtaagtaaagatttaaacttattttaagcagtatccatattacgtttctctattccaaagcagtgctgtctcgggctgtccatgactgacaattgagcaatatggatttactggtaagaaagcaaaaacagttcaagtaatagaaaacatgaggattcaggctgtgtattcatggttattgcccaagtatgaaaaactgtcaccacaatgcaaacaggaagtgacttttccactattatgctggcctgcccagtgctaagtaggtaaatcctatttgaggatcaggtgccatggctcacgtctgtaatcccagcacccaagccaaggcagaaggatgacataaggccaggagttcaagacctgggtaacataagaccctgtctccacaaaaaatttaaaaattacctgatgtaatttggtacctgatggtaatttggtacctgatgtaatttggtactgtaatttggttcattcttgtagtcctagctatttgggaggctgaggcaggaggattgactgagccctagagttcaaggttacagtgagctatgatggcaccattgcactccagcctgggcaacagagcgagacactgtcccttaaaaaaaaaatcctattcaaaatcaaattccatacatttaatatgtatttttagtctattttagagaaaagacagttctactttcttaagcaaatcctaaaaacactttttgataatgacttaagtctcatttgctacaggtgtgaaattcattgtgaaacactctcaaacttcaaaatgtaatttgtaggacgatagataatttcacatgcaaagcccaagcaggctgtctgtgctctttttacgtttttcttttatcatgtttcagaatatggatccctgtaacatcttggaaattaagcactaaccaaatgtaaatggaataatttgtaggaattttttttgttgcttgtaattatagttgtcaagaatattgtaaccacctttcatttttagatattttaaaaacaaaacagttatggaactctataaaagcagaacttaggaggatcctgaatggtgtttcatatacttaaggccttaggactcagggctgaccagaggaaaggaaatcatgaacttgcacatttccagtgttggctaaagaaatatattctgctttgctctttttggctcttattgtatttggtaggaatctgtgttcatgatagatgctatatgtggaatatgcattttggagaatgattttagacagcagtgagtgggagggaaaagaaaatggccctgacagatacaagtagtctattttgaattttgtaagttgaatagaattttggagagctatttgcaaggctgatttatgacctgtggaagtgagaaaacaagacagagttacctttgacagggagagaccagctggctaggcttgtagtgtgctttcttgatttagaatatggcacttcacttcacagatctaaaaatttgtctttgccagtatactcagagttaattaaaggcttttgggactgactgaaacttaaaactcatgaaacttacaagggattgaccagaaagccaggtggttaatttacaataaaaagatactttaccaataccgtaacagtggatgttaaagtgaaggtggattggttattagaagatttcttggtaaatttagaacaagagcaggagtggtgtaatatcctgaaatacgcagaaaacctgaaaaccatccctacctccacacagagcagagctctctcatgagccagctcttggtgtccatcgctagcttctgagcaatgctggatgagctcattacagtctacatcttgatttttgccctcactttctctagattcctggctggctcaatatattaccattgattagcctactgctttcttttgtatttagtgataccttaatcacatattgagggcctggttcttcttacttaattcgggagacttactggcctataaatactgttctgcaggtggctagtctcgtgttaaacaggatggttttgctagtctaatcctcactcgattcacttaatctgcacattctagggatacttggctgttaccctctaggttctaaccattatgcctcctcttatttatttatttattgtctcttcacattgtataaaaacagctgttttaattgtcattgtctaaactggcaaagtaagaagcatcaaggaaggctaggaagaagccaggaagcatcaaagaaggctccctgcaggtttcagggggatcatagccctgccaacatcttgattttggacttctagcctccagactatgagaaaatacagtcctgctgttttaagccatctataatagtttgtgataactttgttctggcaaccctgagaaacaaatgcattttcctttctgttgtaataacttttgttagccaatttttaaagggtcagtctgctagcaacaaattctcttaattttttcttcatctgaaaactttttttctctttcattcttaagtatagttttgctggacatagaattcatggatgatagtctttttctttcagcatatgaaaaacattttggtatttccttctagtctcaatggtctcagaagagaaatatatcattccaattggtgttcgcctgtagttaatggatccttttttctctggctgcttttaagatttttttccctgtatctttaatttttgaaagtttaatcataatgggccttagtgtagctttttgggagtttattccatttggggcatgctcagcttcttagatctgtgggtttgtgtctttaaccaaattaaggaactttatagccgttatttcttcaagtactctttcagccccactctctctcttctcctgggattttcatatgaatcttgggtcttttgtattttcccacaggtccctaaggccctgttcaatttttgtcagcctgttttctgttattcacattaggtgaattctgttgatgtattttcaagttcactgtttcaacatcttctatatgtccacactactattgagcccatatactgaggtgtgtttttttttttaatttctattactgcatttttcagttctataattttcatttggttgtttttataacttgtatttcttttgcatgtggatgtccagttttcccagcaccatttgttgaaaagattgtcttttctctaatgcgtggtcttggcacccttgttgaaaatcatttgactgtatatgcaaagtttgcaaaatcatttgactgtgtatacagtttatttctgggctctttattccattggtcagtgtttctgtttttatgccagtaccatactcttgatttccatagctttgtagtatgttttgaaatcaggaggtgtgagactactaactttgttcttctttctcaagattgttttggctgtttcagtgtgtatttatgtcaatgtgcttgcagtaagctatggctatttattttatgatattttaaaatgttaactatcgatcagaagttggattatattggcacagatgggtcctctctttctgtcacagtgtgtatttgaatatttgttttgtttataccttattgactttcatacatttgagagggccctagctttggtttctcaatagaaaattttgtgtgtcaggacaaaaccaagctcaagctgtttaaaatagccaaaaaattagaaatttaccaatgctattctagtgttgctgagacctcagctgaatgccatctggtcttgtaatgaatccaaaaagtgtaacatttacaaatagaatagaaaatacaaatttttggtttgctaccattcagtttgtaaaatcatgttaaaattctaattctgaattttacaaggtaactatgtgaggtgatagatatgataattagattaattttgctaatcatttcataggatatacatatttcaaaatatgttgtataacttaaatatatttcaatttttatttgtcagttatacctctataaagctggaaaaaaagaatgttacagaatgttcatcaaaactatcagtggggtcgggcacggtggctcatgcctgtaatctcagcactttaggaggccgaggtgggcagatcacctgaggtcaggagttcgagaccagcctggtcaacatgatgaaaccccgtctgtactaaaaatacaaaaattagccgggcatggtggtgcgtgcctgtaatcccagctactcgggagactgaggcaggggaatcgcttgaggcagaggttatggtaagccgagattgcgccactgcgctccagcctgggcgacagagagagactctgtctaaaaaaaaaacaaacaaacaaacaaaaaaaaaccatcattgggtcaattaacatgtttctgtttataagatttttctcttttatctgaaaatcttttcaaataaggaaattaaatcttaaaattaacgttaaaatagaattttttactggagtctacataatgttcttattgatttaaaaaagttttgctagtagcatattaaattaacagcatgctatactttcatatgtttattcatggcccctataagagcagaaattttactaactcaaaaaatgccatagtctataaatatataaaaattctcataaatttttaacgtcttgatggaaaaagcaatttaagatgctttttttccaaattaattaaccaaataaatatctagatacatttacatgattagaatttgttaacagaacaaacacgacttagaaaatgtaacaattttataaagttgatgttgagtgttaatgttctcaaaatttaaaattggatgaattgatagtttctattgcttttctggatcacatttccaaagccaggtcactttattttttacgcaggtttctgattctttttttttttttttttttttatttcagacagagtcttgctctgtcacccaggctggagtgcagtggcacaatcttggctcactgcatcctctgcctcctgggttcaagcaattctcatggctcagcctcctgagtagctgggattacaggtgcacaccaccacgcttggctaatatttgtatttttagtagagacggggtttcaccattttggccaggctgatctcgaactcctgacctcaagtgatctgcctgcctcagcctcccaaagtgctgggattacaggtgtgaaccaccatacccagccctgattcttcatttttttttaaagcttgatttagtacagatgaaactgagtaaaggcaaaaatgatcactgctgtattatgagaactgtgtcatttgtcacaacttttgtgtatttactgccatctagtgttgcctttaaaaattgatgacacttgaacactactttcatttgcaaaataaagaaatttttgtagactgaaccagagaatagcctaccaatgtaatagatgaaaacatgtgaaaatgccattttttgtgggttaaaaataaatactggcggtgtcataaagttcagctctcaagattaaatcaatattcaaataatttcccttaagtaattatcatccttctttttgaggcaaacttagtttgcttttttgatgtaatttttagcaaaagattactactttacctgcagaattatgtatgtctccaatttctaaaaaatagaaatggcctgatatcttccaaatattaaatcttagataatacttcattttagtaatgacagttttaattctaaattaattgacagttttaattctaaacttggcaagatgtacctatcagacatgttgaattactgacaatttacctactaaaattggttctttttctaaggtgaagacgagttaactactcatcccagaaattacactgcatttctaatgtttagggcctggtgaccaccaagcctgcctgtaccatgcatgtttaattcgtggtttaaaaaatatcatttaattgcagtttcttttaaaaaataagttttcatgtggcaccccctctccatctgccagcagctgcttagaagcagaattgaggccgggcgcagtagctcacgcctgtaatcctagcactttgggaggccgaagcgggcagatcacaggtcaggagatcaagaccatcctggctaacacggtgaaaccccgtctctactaaaaatacaaaaaaattagcgggcgctgtggcgggcgcctgtagtcccagctactgggaggctgaagcaggagaatgtcgtgaattcgggaggcggagcttgcagtgagctgagatccggccactgcactccagcctgggtgacagagcgagactccgtctcaaaaaaataaaaaagaaaagaaaagaagcagaattgagtcttatctgtaataccagaagtatcctctgagaatgaactgagcctttccaggttcttttgtgccctgactcacaggctttattttcctagtttcagatttgaaagttgcaagcattatacagataattcctatatattctttatcaggattcactgattttgaacattttgtcacacatgtgttcttcctctctctcaactaagagagagggagggaaggagagagagaaacagagggagagaagagagagagatttatagatatttgaaactatacaaatgtggattctatccctatactgcctcttagggtatcaccttgtcttgtgagcccattcccttgacttcagagtgaggccagtgcagcctcccttgcatgagtgttctaaagagtagaaataacacatgtataactctgattatgtgtctggtattgagcaggtgcttactaatttgcaggtcttgttaccactctcacaaggcgaggcatagatgaggttgtatatgtgaaatgccaaacacagggctgagtacttggtcaaggcacaggggatgtgagctgcagttctaaccagcttagtatcagaatgaaactttcgttatctttattatcattttcatgattatttggttaagcaggtagtgtcacagcatagaggtagcttggggtgtcaaagtctggtggtaactgaattagaatcccagcatttccttttaatctttgagtctcagtttccttggatataaaatggagacattggtagtgtacacaagaagtgtcaggcaccatgtttgatgcagaggaggaagtggaaaattgataacagtttatagcaccactgttgttaatgagttcctctttcagcaattagttcatatgactctgtcagctctagatttgttgtcttgggccaggctctccatcatagcattgcattggttccgtctgtgttacagtttgctgcttacatgtttatctccctctcttacgtaccttctatctgtggcatggctgttttcttctctctgctgatcttacttccacgcctcagcctagccctccctccctctcattcatccctcatcaagacttgctgattctgacttctgaatatttgtttcggctctctcccttgtcactgagttcatgttcttaccatttctcatctagacatactttttaaaacagctgtggtgagcataactcacacaccatacaattcccttatttaaagcatacagttcaggagctctcacctaaacttttacagcagatcttttttacagaaggaaagccttctggctttcctgcttttcctcctttggcccatgctctctactgctggagtggttattcctaaatgaaactctgatcatatttctcttccgctgtggccctcacatgggtgtccatggcttacagaagaaatgcgttagtcgaatgccagatgtttgttagtctccttccccttcacttcccctggcttccattccatccttggataacctaggaccctttgtgaaagtcactgttatcatttgctaaaactgtatgacaatcacgtggctccattaccagatcgagcttcctgagagcatgagcaaggacagcatatgatgaagcctcagtaactgagaagcttcataaagtaactcagtagagttactttaactctttgttttcaagtgattaagtaactgcttgttaaacgtttattaattaatgaatgagtcatatatagtttttttattcagtgtacatatagttagtgccaattacttaagaattaatttataattataaggactttgataatgtacctttgagaagtatactaagaaaacccttaagtaaaatattaaaattatatcatttataagaaaaggcaaactatattgggcagtatggtatagtggttgagaacataggttctgggttcaaatcctggctacaccactgactagctctgtgtcttcaaatgagtacctacttctacaaacttaggaggattaaatgaataaatgcatgcagtatgtttagtacagtgcctggcaagattaagtgtttagttttgttagctattattgtcattgtttctgaaaaacaatctgttgtcatagaagtctcttcacctaattgaaaggtttgattaagttctgagaattcagtttaaaacttagcctacaaaggagcccacaacaaactaagttactaatctggtcaccatttcccattgttgagcatgagttgggttggttttttatttttggattagggtgcttttgaatagaattatggaactgggttttttttcttcctcctcttgtttcctttattcctgtgataatcttggaatttactagtctttccatgggctctttagctgttatctggataaaacattgctctgtgttctcctaatgttgtgggaataattagtcaaatcaaatgcttacattgaatacatatttattatgtgctaaaatatgctaggcattactatgatacatccctggcttcaggaatgctcacagacagaattatgcaagagatacatttcagtgcaataggaggcctctttcttcacctccttcccctgttaacccagctctctccattccctcctaacagtgccctgactagtgcaggctctgttggcctgctgagtgggcattggtgtgaggatgatggggaagatgtccactcactgagtttatggctcaccaagaggcattttgttcccaaatctgtttatgtgtggtattcttgttactgtaattggcataatttaatgaaatggaatggagaatgatgaaaagtgtgtgctaaaatagagccatcatttctatgaaaacctttggaaagacttcataaagacaaattgctgtcagattgaataaagatgagacaattataaaagattagggaaaaatcatcagaatatggacagccagattctgtttttacattgcttcacaagtgtctttaagttttcactctcctttaaagaaaacaaacctgggcatcttagacattgtcttataggtgttatttaggcgcagcagagagtgagacagtccatcactggatcctactcagaggaagggccctagctctacagcaaaagatttgcaaattagtgtacatttaaatgtttgctaaaacaaaatgaatatatgcattttgtatgattctgcattttagctgttttgattaacgaaggaattattggccccaattgtgtcatctaaatgggcttctgttccttgggagtgctaaattaggattttaagtttgtcaagtaatgggaaatacttgttttgttgaaaaacccaatgcccttggaattgatggttaatgtataatctgtttaaatatgacttagttaacatccagtttttgcagattacattgcaattttttaaggtcttacagtgggtaacctaacctgtttcttgcctaagaaagtttaggagaaggcaagtctcacccctctgcaagagatcgttttacactcagaatagagttgttttcagaaaacaattgtctgaaaggaggtaagcattagaaaattcaacagcttctctgtactcttaagccataatttcaaagtctggcatcattattttgtttaaagtgaaatcacagaacatcatatgtatccatattcaaatgtaaatacttcagatatccacaaacaaaaaactgatttgggttattcatctttgaggactgttgctcttgtctcttctcatttcatgctttcaagaccttctgtcaattacctgctccctctgctgtctcctactgcaccccagcctgtgcttcccgctctcaacaacagacctgctaggtgcgtcaccctcctctgggacctgcttgctaacctcattcttgcatgacagttaactttcctttcagatgcctgaactgatccagagtcaaactgaccctttttctctgacttcctatctattttaatggggagataaaaaagcatgtttggttttattttttttttctaggttggaaagcaagtgttgctttagaaagttgaaaatagacttgcaacacataagaaacccctgttctttgcaatattgagttgtgtgttgagcagtctcaaatctaatgggaatacatttgaggtggctctgtgtggcaggggacccgttgaaaaagtggaatgtgggggcagctccagtaccaggagggagcaggaggggtgaaataagagactgtaggttttcttagggagagtggagagtatgaattgggggataagaggtaatggatggggaaactgatggagggctctgaggtcatgatgaaaactttatagcccatttacattttattccaaaatggtattttaaaaaacactttcaaagtcatgactgcagtattcattttcattcactaacataaattctacttggccattccagtgatctctaaaaatgaatagattgtggattgaatttactgtatcttcttattgtgagattgaacttccaatcctctccttaccaggagcagcctcttcgttgggttgaggaagctgaaacagttcttgtctatgaagcacctgcccctgtgtgtgtagacagcaggctgttctccatcctgcatccccctctgcatctagcctctcctgtctctggtccaaccaccctcaagtccaaaagaccagctggagtctgcctcagcttctcctcttgattgttctcaaatccacctcattttttccgtttcttcagtcctgtgggttagatcccagttctttatgcctgccatcgttacagtttttttcttctgccagaattacaaagctgccatagtaattgttgttaaaaaaacctgttctttaaggtatccttctgtattttcacataacttgttttatttccgttttaaaaattttttctgaatttctagtcagtgctggagatacaaagaaaataaattcacccttcttttggaagagctggactcacaagcaagatcatttcagtacagtttttgatacctcttttcttattttttttcctcagttaaaatgctgttcttaaattcatatttgtcaatgtgtagaccctgttcaataacccatttctttaggaatggtttcccacattaacaataccccaaactcaaaatgctgtgttagtatgctacgtcaaatttcacttttagaaacacttagctgttttttttatactgaaattttatatcaaaaatagggccaggtctaactatcattttttagtatcatagacatttatgtattttgggtttggtgaaatggtataaatttgaccagatcttaatgtttctagttattttgatatgttgtatttgttcttatgtcttgttacttctgtccccccaccctttttagtctgtagcttaaaagcttcagagggtctttagtttcttttgtagtcctccagggtgccatgtggctaagactggattaaattagaaactttgtgacggtggtttgtggactccagggtacttacagatgtaagatgttaatactactactataatttcctcctaactaataaaatgtgttcccagtcccattatgttatgttactgaaatcgactatttctaaggatattaagaacaatgaacagaaaagaaaggtttttgaatattggttactttctaagaaaatttcttcctatctgacgtatattagttacgtgtgtgtgtgtgtgtgtgtgtgtgtgtgtgtgtgtgtgtgtggtttataaagtatgcctgctctgagcctgagatcatggttctgctctggtggatggagcaggaggtggaaggtgagctgcagaatgtaaagatatggttgcccccaagctgtcatcattgggccccagctgtgaccatttttaggaagcttgtaatgcttctattatcctttccatttcagcacttcacacagaactaattggcaccatctgtgctaataattaagcctgtgatgtggtcactggtgcacaaggaactcaggttgagggaatatttcacagcaaaaaggaggtgggatatgagtagaaagaatacagtttgttgatattcttttatgctggaaaaggaaacccaaggaaagaggagctctctgatagaccaatgatattcttccacagcctataagcctcttacccactgagtgtgtaggaaggacatatgagcaagatgacaggtagagctcttggcattgtcttctctttgctattaaatttgtcccggagattgctgtaatatacatctagtctacgtttggacattaaaacttaaccgaggatggttgccaaggactcagagtaaggtgaaaggtgagggctttttttttttttttttttttgagtgatgaaattgttctgtatcttgattatggtgatggtttcacagctgggtgcatttattaaaactgaaagtgctatacaccaagatgagtgattttctatttaagttaaaaggtaaattttaaaatgtataaaaacttgttgaaaaaatgctttagaaaatcttttgtggcttaggacatgtttacaagatgaaaaaagtagattttttttctttttcaaaattaagaacaaggcaaccgaaaaccagttaatctaaaatttgattttatatagtaaatggctcctttcaaacaccaaataagattttataattgaatttttaggcatattgctgaaaggaacaaaagaagagggcttttaagcttttctttctttgagccccagaactccattttaccattaaaggagctgctcatcttgagtattgttttgctgatgagaggaaattaatgaggtgaggcatcattctcatacatttgagaattcactgatcaaacttaagaacaaaaatgatctattgttttatgttttaacactctttcaaaatgtaggtcatgtccataaatgcaaatgactatgtagaaagtaatatgctactgctgctaaccgttttgagggcacagggtattcatgtgcttctagaatcatcaggatttgcagaagggcaataggaagtggcacactgggagtgattgagaattctagtgctctaatgagtgagggatcacagttgatatcagtggaatcattaataaatataaagtttgtatttggtactttttaaagaaataatttcaaattgaaagaagcattttaaacaacttggaatgttacatttacttttgtgttttacttttatcaggaatgtttaaataatctacaaagtatcctaagccaagaaactttttaagagtttaagctgaagaagcgtttttaaaatacaaaagactaataagtatgtgattatggtccaagtgaaagttaatttgtcaattggataacaaacatttgtcagtacttatcttatagtttttatgctttaaaatgagggacaacagactttcaaaactagggtgccaagtcctgcttattcattcctcttcaggagagttttataatctttaaagtctttgggaagacttaaagagacttaatctttaaagcctttatcaactgatatcatagttactagtttacacagtagctgagattaatggaatttggattttcaggatttttctcctggttgtctttgtcactgtgttactaaaatttactgtcatttatactcacagtgctactctaactgtggcccacactgtgctggtctgagaactgttagtagttcacagtaaaataaggagctcatactaaaatataaatcaacatcctgcttccttccttaagaatgtctaggaggccaggcgctgtggctcatgtctgtaatcccagcactttgggaggccaaagcaggtggatcacgaggtcaagagatcgagaccattctggccaacatgttgaaatcccgtctctactaaaaatacaaaaattagctggatatggtggcacgtgcctgtagtcccagctactcaggagggtgaggcaggagaatcgcttgaaccctggaggcagaggtttcagtgagccaagatggcaccattgtactccagcctggtgacagagcgagacctcttccccccttcaaaaaaaaaaaaaaaaaaaaagaatgtctaggtatggtggtttacttctgtaatcccagagctttgggaggccaaggcaggcagattacttgtttgagaccagcctggccaacatggcaaaaacctatctctactaaaaatacaaaaattagccgggtgtggtggtgcactcctgtaatgccagctactctagaggctgaggcacaagaatcgcttgaacctgggaggcgaaggttacagtgagctgagattgtgccactgcactccagcctgggtgacagaataagactctgtctcaaaaaaaaaaaaagaaaaaaatctacatataggaaaaaaaagttagcagagctctgagtgtgcttagtgacacagttgatttacattctggtacaagtcatctcttgttcatgggctgctaacaagtagtgctttgacctgtactggtttgcagcactgtaattacatatatggttctctcctccttaagacagttgttgggtttggataacattcaagctactgagcaggagcagtgcctgctgtgttgctcccatcctgactctcaagctgtcatgctccactgccttactgtctgtttccaggtggacattgggacagtgggtcggggtgcaggacttttctgcagagaggtggctttcaccctttggctctgtgtattggtgttgtcaggagtgttgtctgagtcagggaattatgttctacagagacatggctgctcctccctccctccccccaacccccttctctctctctttctctctgtctcccgttctctcttgcgcgctctctctcatgcgcgcacgttcacatgcacacacacatgctcacatacacgtgaacagagttctgaaaacagaaggcattcagatggccatttcaatcattgggagaaagaaccattctcaagcatttctactcagctctttgtcttctaaaatgtaacatttaatcaaatttttagagaaataattatttcccatatatacctcccatgtggacagtggtggcctgcctcatgtcttttgatagtttcatttttgttattagctgacagcatgtgcaaactagaaaggtattctcttacataaataattatcttctttatttaaattttatgtacttattctctgggtaataatgcatttacatgattcaaaactcaaaaggctcaaaaacacagtgataagaaccctctcctgtctcccagtcaacaaattcccttctgtggaggcagccagtgtgattggtttcttatgtttgcttccaggcatatttaatgtgcagataaacaagtatacaagtgtatgtaaataagcattaattcataagcagaatttagttaatttgttttacacttagttgtttagtacaaataagaatgctattggcaattaacaaaattttcaatgtaaaggaatccatgtgtaagatgacctctgatgctattgaactttggaatttatgacttgaatggtattttacaaagcagtttgaccttttcagaataagagaaattcttccatcatgaataaatgacaggttgaagtacaatgattggtgtgcttattatttcagatttggatcagtttcaccatcatttagcaaaagcaagaactgcttatgaataacaaatatttttgtcctgctttttgccaaggatagtactggtactggactggggtcaaagctaaggagctgtctatttgtgcatttattaaagtttttaaaataagaatgaatttctttactgttactaaggccaaagcttgtttaaatagataattgtggaactatggaataagaatctgttagtagaataactcaacaaaaatgcattggattagggagctttcgagtgtttttttaataagctgcataaaacttacatgtgatataagtatactttttggcctacaaattctacttcaaataatttatttcgaggagagatacttggaggcaggggcatggcttagcctcagtgatatggttctttgaatgaaattgccttaaccttcctgtttttggctcctttctcattcctgcttttgctaaatcagcttttctctccaacccttacatatccgtcagctttcttggtttcacttgacaacatgcttctcacttccatcatctgaaatgtgctaccattttttttctgctaacagctcatttcttgtttgagtctttaccgactattttgatgaagtcttgggctctatcatgcctggaagcaaggggaggtattattgagcttctcctggatttaggtcctggctttgccatagaggacacaaagacagagagtatagagaacgtttgtgccatgcagaacagggatgaccaagtaaagaatcttgcctttagaacagggcatgtgctttacatgaattcccctcctcacttagactgaaaccttaccatatcactttgtatttgaatctctgggttggagattcctagatgttttggggagattgctgttgttgttttgcattactcttttatgggaaaaagcattaaaataatatgaattaaaattaattttgcttcatctaactataaagatatagcttgagagatttttggtgggtgatgaaactgttctgtacctgattgtggtggtggttatatgaaactatacgtgcattaaaattcataaaacaatacaccagtcaattttattatatgatataaaaaacaatttaattttgttttgagaattttatgtatctctgcaaataaagatacatctgtggaagtcattaaggaatcagtattatactggatgaacagttgtatagcctcctttatgaaaattgggatttccaatgacctagtcagattatttctttctatctactcctccctgcatgtatacacctacctgtgttttcatatttagtataaaattagttctaaactgagcaaggatggcaaggcagcgatgatggctttttctcccctaatctttggaaagaattttaagccattaaacgtgagaagtttaagcgaaggcatagcatttgcaattatcagagcatcagtgactattgcctctttatttagacagtctgagtcctctgtccttttgactatgggacctttatccttttgcattactaagagctttaggggaatatttgagactttcatcctagctgcttgtgattcagctcttctccttgttggcaaggtacagttgatgtcatacatagggctggcagatgaatcagcaggatgctgcttggcaatgtggacggggtgactgagtgaagagggtttaagtttgttgggtgaagcatcactgagcttgtgacaatgctcttggctctttcatgactatgggttttgtttttttttttttgagacagggtcttgttctgtcaccaggttggagtgcagtggccgatggcccaatctcggctcactgcaacctccgcctcctgggctcaggtgatcctcctgcctcagcctcctgagtagctgggactacaggtgctcactaccacacctggctaatttttgtatattttagtagagatggggtttcaccatgttagctaggctggtctcgaactcctgacctgaagtgatctgcccacctcagcctcccaaagtgctgagattacaggtgtgagccactgcgcccggcctcatgattatgctttaattaccatgtaaatgacaaatcgtcagatcacacatttttattttagagacctatatatttattttttataccaataagaaacctaaaatgcagcatagtagcttttcatttcatattttaaaatgttgatgcaagaaaagactcttccatagacattagaagatagagaactttatctgagtcatgagaatcccttattttacctttattctcacaaaataatttgaaaaagctggaataatttataagccactattaagatgacatagatcttggtgaattctttagataaagattaagccagaacgtgtaatttaaagattgttaaaaacatttctccaaagtaaaataatttgcttaaaaatgtaggttggttcttgaagatctgtcattttgttttgtcttcaaaatagttgaaatattagctctacagcatgtagacatacttgaaagttagaatacttctgctagtgaccacagacttattttttgtctttttgcctagagtttattagtcatattacacaggttttagttaaaagaatacccaagtttggccttttacatacataacatgccttttgatatcaacactttttctatgacctaacataggattaggtttttgaatattctgtgtgtgcccaaggagaaggtatatcctctcttatcagtgtaatgttttatttgtacacacacacatacacacacacacacacattagtcccagcttatctgcaaaggatggttccaagactcccagtggatgcctgaagcaatagatagtattgaaccctgtatacactgttttttcttatatatacatacctatgataaagtttaattgataaattagagacagtaagatattaacaacaatagtagaacaatcattataatatactttaataaaagttatgtgaacatggggtctctctctcaaaatactgctttaataaaagttatgtgaatgtggggtctctttctttctctgtctctcaaaatactatgatatttttggactgcagttgaccacgggtatctgaaactgtggaaagtgaaactgcggataaggagactactacatacctattatatatctgtgtatgcatatatagaaaacctttatagtttatatataccatatataaaatatatataatatataggctatatgttttatataagaaatatataacctatataacctctatcctattaaacataacgtgtagatcttttaaattactgcttacttttcgttcacttgttttggtttaagagtgttgttaaagtctattcaatagcgtattcctgttagaaagcatctgttgtagtttgtgatttataaatgtagttactgtgttatttggtgcataggaatttataactgctacattttcatttttaattgtgatctttgaggttataaaaatatttctttaatgcttttggaccttaattccactttgataataggattgcatcccctatcttcttaatttctatttttccttagtatatcttcagttttcgcctttctgaatcactctaagtgtgtctcttgtatacagcatagaattgggtttagttttgcaagaaagtgtcaggtatttttcttttgattagtgtcttaagctcatttgcattaattgagatgcagaatatgtttggtctcaactttatcatattattttatgttatatatactctggtattatgttatatttaccatgtttctttccttggtagggagcaagtatttaggaaagttagttttatacctctatagttttatattctataatatcctaatttcctttgtttttacttagatttctactgtttggtttgtcagtttaaaataatatcctttattatgtattatctacttgacaatttatgtattctgctttctcccttttctcttctgctctcattatttcagttgtactatttctactttgtcagaatgtttaccatttacatatatgttttttagttctagataggtttaaatctttttgttgcttgccatcagtcatcttgccaaagttttccttttcccctttgttctatgaaacgtgttcttcagtatagcagttctcaaacaataatgagcatactcatcacctggacctcttgggcagggcctagattcccactcctaaaaaaatcccaaatggtatagatgctgtgggccatgaaccccactttgagtggcaaaagatttctcaagaagagttctcaagttcttgaacataagttccatattaggttctataacatgtatacttgaaggacagcttggctggattttaaaatactttggttcaaaaggttcaaagttcttgaaatttcttgaaaatgcccctccactgttgtcttgcattgttgctgtcaaactctgatgtgaatctgctttccttcctttagcaagtgacttggtcattttgtttggaggaccaagtgtttaatattagtgtaattattttataggcatatgtcttagagttgattggttcagatcacagatacacatgggccctttcaaatgtggtttcaggctttcttttgtttctggaacattttcttaaattacagggtttttttgtttgtttatgtgggttttttttgagacaggatctcactctgttgcccaggctggagtacagtgatgcagtccagctcactgcaacctccaccttcagggctgaagcagtcctcccatctcagcctcctgagtagctgggactaacaggcacacaccaccatgctcagctgatttttgtattttttgtagagatggggttttgccatgttgcccaggctggtaagttacagtttttaatattgtgttctgctgtttttttcttctgagtctccagctatatgttggatcttctttgcctgtcttccttgtcatttttttcattttgacacatatttttcttttatttttgtcctcttagtttttcaagcttttcttcagtgtcccttattatattttcatttgggtagtttcccccttgccattttgtaatttatcactatttctaagatgattttgttctcttcttccttttctttactgaatttagccactttcatttcatatcttccattttgttcatttgttagatatttttgatctgagtttttgtacttcttatctgaagttttttttcatgttcttaaatgcttatttaaggttatttaattcaggtttgattattgagttataactttcatctggttatgttttgtttggtttttgtttgctttcatgttgttgaggaacaaaatcaaaaatggaaatactttgattctcaatgtctgttttattttcatagtaaccttgtacagatgttatctgcttttttttttcgtttttttcattttgaaattttcctagactagcaatagtagctcttgttggaaagaataaggagtttttgggtagcttactgagtttttttagtttgagagcactcttttctgctggtatagtaaaatgttgtttcttttaacgagtatcttcttggtagtgagaggtgtgagtattgttcttgtgtctttaggactgttaatttctaccttttgctttcttctttccgataatcttcagcctccaggagatacctgagccttccgtaaatctttcctccccatccttccctcaaaatggtgccttcctaaaactaccacatctgattctgtgcattttcaagcactatccttttgattctctagaaactctctgatctagcagttcacagaccttttcttagtgaaaatttctttttctgggggtgattttatctgtgttccaatatcgctagatctctatttccctctctttcatagtgtctgacttgacttgccacttaggtgtgggctttggagctagtcttgctggatttggatgtttatttccctattttcatgtaacacgaagttcatgccattgcttatctcctagttaatgttgtaggtatgaggaatggttagtttgtcttctcttcctattgatctgtttgtttttggttttgagtatatatggagagatttggatttagacggctccattgtcctatgagaacccagaactctgtaataatgttattatatctagaaaaaattgaattcattttggtgtgttcaggcaatttaaatatatttatatatgaactaaagagtacttcatcttctgtttagtgtgcagcatattttattttatattatttgaattatcatacttattttgatttatacctagttcattacaaaatctattcttgttaacataatggtaaacctctaatatgtcatctgtaaggagcatgctggatatgttgtaatagtttaattggataaggggcattttgaaatagaattagtataaatatacaaacagccattggacacaatgtgaaaatctttcccagaaatcagtttacacagatgagtccataaatctatgatttaaatcttgtgtaactttgccccaagccactaaatagaagcatgctgtgtgtgtgtgtgtgtgtgtgtgtgtgttttacatccattgtatgtaccatatatatatatgtaccattgtatgtaccatatgtgtgtgtgtatatatatgtatacacacacatatgtatgtgtgtattttataaatatatactgtttttcattattgttgaggtcaaccagtagactagagattattttagaccctaagagaacttaagggacctctgctgttactgattaaagtagggctaaaataagaatatagatgctatattctatattatttataggctatcttaagtaaatattcaaaatattttaaggaattgcttgttaaggtgtagcatagatacagatactggttatgaatgttaggctgaatgaagtgtcaagaagtgaacatattcataagacataggacgttttaccagaagccccttcatgctcttcctagtcaccaccaacccaaaataaccactttcctgacatcaattgccatttagttttgcctctttaaattctgtatatgttatactatacattctcttgatatattttcaatcgtctcaggatgttgaaattgtttcccaactctggtgctcttttagcagttgtttccctggtcagttaatcctctgtgttgccgtgtgggcatgcatgctgacgcttctccgtggctggcagagagccacaagactccacagaggccctgtttctagtgttacaaaaataatcatacatgttgcatatctaaatccagtgaggaacttgtcaaaatgatggttgattagagagattaataaaatataaagatatttaaagatttggtggctgcacaggacaattaacatgttgctaattctgaaagtgaatctaaaatgggaaaggtaattttacagtccatatgttagtcatgtccctgactaaagaagtaagttggcagcctttttaaggtttcatcattttcatcattcaagtgcttttatttctctaagtgtactgcatttaatgacttttttacttaatactttctaagtatattatgtgaatatgctagaatatattaaatgttgtcatttgaagatagaataatgactctgttgcaaaacaactaaataaatccaaagtggagcgatgttgttggtacactacagtggcagcagacccttggatttagaaggaatgatttccagaaaatctgaggtttgaagtgaccaactgtcattagatttctcataaattgaggcattttgatattgaaaacagaaggaggaaaactcacaatggagaggaacaaatttgaaaactgggccaccgctctttgaaaatgcatcagctcccttcaccaccacttgcaagcttattttaggaacttagaaagaggaaagaagagagacaaaacatctttccctgcctaataactctatcccatttacattacttcttcccactaattatggtgaaagtactttgtggtgatgagaagggaagttcactggcctctgaccatggggttaactgtgcctcgtgggggtgctcacttagcagatacttgggtgctcacaccttgtgctaaggctgagcagaagcaggaatggttgttggcactggagctttatctagcatgaacacaaagcaccagatagtcatgcagatagatgtaaaaggattgagtttagagtaggggaacatgaccttgtccggagtctgaaaggtgtttttaaggagaagtatccagtaaaatggagcctgaagtgagagatggggatgagggactgtggagggaatgctttgggcagagaggatagcctgcccagggaccatggagtcccagagctatgaagatgcaggaaagaatgtgaggtgaggctagagaggacacagaggccagatgacctggctgcacaggccacattgaggatacctttttctcacttaagagccctgggcagtcattggtcggtggggggtaagagtatggctgtggtgatgacctcaacacatttgcagtttgtaaaaccaaaacaacccttgtcttgctcaacttggaggatggttctcactcatacccagcacggagaatgtttaagaggggttggaagagtcagtgagttaggtggtaactgcagtggttctagggaaggatcctggtagattggaacaggacaggcagtgactcttctggagaggcatgtactggaagcagtattcagagttcttggtgctgtgttggatacactgtgtgttaggggagaggaaatatcatgagtgactgtaggtttctggcttgggtactggaggagggccagttattgagataaaggatgctggaagagatctgtgttttggcagaagagcccagatgtgttcattgtcccgctgagtctaaggtacctgtgaaacaggcaagaggagcccagtgggcagttgggtggactagaaacccagttcagtgaatcatctgcatcagtaaatccatgttccctttccttccccctttctcacctgccccaactgtgcaacacataatcattgcacagggtacttggggagggaaggaagcatcttgaggaaaccttcctggtctctagggccaggccagattactgctgtggggtggactgtaaatgcaggaactgttgcaggcatgctgaaattaccacttatagacagctctcaggatctacatgggaaaggtagggtagggggagttaaaaggaattgagttggaaacttgacaaaactgttgcctaaaattttctttgaatatttcccccaaccaagaacctgggtctttaaaactgggtagaaaaaatactcttaattagaaacatgtttacaccacctttatagaaacttgaaatttcatcattatctgtgtgagaactactggaacaaaagcatgggaggaagaataaacatgatctgtgcacaatgcttgtttgaagcaaatgactcagttattctagaaagtcattccttctatgagggattcgtttcctggttttcttcctacctctttggctattcctccttaagcctgttcctgagcttcttcctgggctattctttcttaaggttccttcccaatcctcttcttcttcattcaatcattggttaaactcatctgctcatctccgtggcttccactgtagcccctgtgctcatctactccaggtgtagcccctaggtgagcttatctaccccatggcttccactgtggcccctgggtgagcttgtttaccccatgacttccacctccactgtagcccctggatgagctcatctactccatggcttacactctagtctctggatgagctcatctactccacagcttccactgtagtccctggatgagctcatctaccccatgacttcctctgtagcccctgggtgagcttgtctactccatggcttgcgttacctttacgcctaacagtgcccattggacatctacatgtgtattgtgtatgtatttaccttcgttgctttcacttgaatgtctcccagtgatctcaaattgagcagtccaaagctgagttcatctaccaccatccatctagtcataaccagaacttggggttagtcatcctcactcctcacactcaaacagctactgtccaggtggttgtttcatctaacccatttcttctccactcagtgccttgtgtgtagccttagggtaagccctcattattccttttctgagttgctacagcatagcatgttcttaactggcatccaggctccccagtcttggtgctctctaatccattctgctgctaaaatgattattctgaaacagaaatctgatcttactccttccttaaaagcctttactgcctctctaccattttcaggattaaagcccagattttagtgtagttttcgaggcccttcatgaaatcatgcagctctttccgctgctctcctctctccactttaataatactcagctcatgtgactcctccaatggaatgagctcttgcttacttggtattgtaggctgtgctgtttcctctgctgagaacccccttttcaggcatacttagcttaagttgacaggtttgaatattggtttgcctgaaagactggtgtaatatacatgagtcatcctgttttatcactgaacacataaacctctttcctgtgtccagagaatctctgacctcatggcagatgccccctcccactatagaagctgataatgcaggtactccctttccagcctcccttgcttctggggtatggacgtgggcacatgatctatattgagccagtaataattttttaccctaaactttgaactgtaagcttttggaccccaagaggcaggtaccatgcagaatccactcagctgacagtagctgtggcagtgctatgccaatggtgttgtgcctgtgtgcagcctggcatcattgctgaaccagctctagatatgactttggacattgctcctcactgtatgactgctcagcctggttctttagaccttttagagggtacgtgaactacctgataaccttttaaccaacctcttctttgcccaaatacaccagaattggtatttgtggcttgcaagtaaaaaccctgcttgattcagttacatttccagcatcaatactttcaaagacagagagcagaacacagttgtctatattaaactgcagtgaaatgacagatccctaatgcataaagttgtatgaagctcttggtttgtaggtaaatgaatagtcacaagacttaggaggatcttgtgctatatatgcaatgacatgatgaaagtcacagggttttcctagaaaagaacaccagaatattgctatgatcataaagaatggtgaaagtgtagatgcagaaatagctgtagagcttttttttaatgtatttttttatcatggtaaaatataataacataatttgcaattttaattatattgagtgtgtaatttagtcacattaattatagtcacagcattgtgcagtcatcaccactatcaatttccaaaactttttcattaccccaaacagaaattctgtacgcagcaggcaatgactctccatttcccccttcccctagtccctggcaacttctgctttactttctgtctctgtgatgttgcctgttctagacatttcatgtaaagaaaataatacatttatttgtccctttgtgtctggcttatttcacttagcattatgtttttaagtcttacccatgttatagtatgtatcagaacctcattcctttttatggctaaataatatgtcattgtatgcatatactgaattcattcttctgttgatggactcttgggttatttccaccttttggctattttagtacaaatgtaaataatactgcagtgaatattggcatacaaatatctgagtccctgctttcaattcttgtgagtatatacccaggagtagaatcactgggtcatatgataattctgtgtttaattttttgagaaacttccaaactgttttccgtagcagctgtgccattttgctttcccatcagcaacgtacgagggtttcagtttctccatattctcgtcaacacttcattttccattttctaaattatagctaacctagtggatgtgaagtagtacctccttgtggttttgatttgcatttccccagtgattactgatgttgagcatcttttcatatgtctggagcatctcaactatatcatttgtctcaagagcatcttgatcagttaagtaaagttccatttctgtgattatcatttttcctagaagtaagagattggggttctctactatttatcattttatggccagactcagctctcaaacataaggcttccctgtaaataccattaaaggcttgacagcagcattttaaaatttatgccttgttttcaacctgataagtgatgtgtgtgcaaaacctgcagttaacatcatacttaatggtaaaaggctgaatgttttctttttctctaagattgggaacaagaaaaagggtacctccccttaccacttaccagttttatttagcattgtccaggaagttctagccaagggaagtagataagaaaataaaatgcatgtcgattggaaaggaagaagtaaaactatttctctttgcaggtgatgtgctcttgtaaatagaaaatcctaaggaatccattaaaaacaattcagacgaataaatgagttcaggttacaagagacaagaacaatgtacaaaaatgaattgtatttctatacattagcaataagcagactaaatatgaaattaagaacacaattccatttattgtagcatcaaaaagaaaaaaatggaagactaaatattaacatggtagtacttctccaattgatctatagatccaacacaatccctattttaaatcctagctgacttattttcaaaaattacaagttgatcctataattcatatggaaatgcaaggaacccagaatagctaaaacaatcttgaaataaagaaaatagtacacgcactcacatttccaaatttcaaaactacagtaatcatagtagcataagaatgcccatgtagtaaaataataaataaataaaaagaatgtacatgtagatcagtgtactcaaattgagaggccagaaatcaaccttcacattttatggtcaattgattttcaacaagagttccacgacaattcattgggggaagaatagtcttttcaacaaatggtgcaaacagctggatatccacatgtaaaaggatgaagtttggactccatgctgtggtctgtttctatccccctaaaattcatatgttgaaacctaatcaccagtgttgtgttaattatcagacaccaaatttgccagcaccttaatcttggacttcccagcctctggtactgtgagaaataaatttctgttgtttataagctatcaagtatatggcattttgtttatagcagcctgaatagactaacatacactatatacaaaaatcaactaaaactggattaatgacctaaaagtaagagctggggaggaggatatggaagatggcaagaaggaaagttgtatggaccaggccaggaaggggcacatataactccaactcacatttcactggttgtggaagtcagccatgtgggtatcaggagaccatatggtcactgggaagctgggaaatgtggtccagctctgtgcccagaataaagaggagatgatttaggtgaatagatagccatctctgctacaaggaggttgccattggttattcctgtggacctctacattctgaaattctgtcctgtattagctctccctcattaagccctacagttacaagaactgaaaagaaacaagacaaataacacttcttttccttggacataagaaaaatgtaaagttcagccaacaaagttaacttcacagcaatcttgcttgcaaaaaatatgccccgtgatcttgtaacctacctgtgtatcagcatgatcctggcccgagaccatgatgatctctcctgatctctggtctgccctcatatgagtgaagggataagcatggttctcatacttgatgtagaggctagttggatgaagcttttgaaaatgagtgaacactaccttataggaggacaaacaagcaaacaagtaatggctccaaatgaaaccaaatgtatgaattagattccatcaaagatcctctggaatggacatcagaaagttggacggtgccccattgcaaccagaggattctcccctcagtggcaggatcacaagaataaatttgcttgtccatcttagttagagtatcttgagggcatctgttttgtgaattgatatatattctcaattgaaaaagaagtagtgtgctccagcggtgagtttgtaatctaattgtatgtaatgtgctctgtggatatgattacagagactgatggaagagctaaagggaaacagaatacaggggatgttataaataaggcacaatgctgttaatttttaagaaactgctttctgcaatgtcttgagggatcttgcctactgggggaaccagcccctgatatttcaacgtaggttcttttctattttccctaagtgttggctggtctgagaaataaaggaaaagagtacaaaagagagaaattttaaagctgggtgtccgggggagacatcacatgtcagcaggttccatgatgccccctgagccgcaaaaccagcaagtttttattatggatttcaaaaggggaggggtgtacgaatagggtgtgggtcagagagatcacatgcttcaagggcaataaaatatcacaaggcaaatgggggcagagcgagatcacaggaccagggcgaaattagaattgctgatgaagtttcatgtcccactggacacgcattatcattgatagcatcttatcaggagacagggtttgagagcagacaaccggtctgactaaaatttactaggcaggaatttcctaatcctaataggcctgggggcactacaggagaccggggcttatttcatcccttatcgacatataagacagacattcctagagcggccattttagagacctccccctaggaaagcattctctttctcagggctgttccttgctgagagaaagaattcagtgatatttctcctatttgcttttgtaagaagagaaatatgactgttctgtccagcccctcaggcagtcaggccccatggttatctcccttgttccctgaaaatcgcagccatcctgttccttttggatgcccagatttcatattgttcaaacacacatgctctacaaacaatttgtgcagataacgcaatcatcacaggatcctgaggcgacatacatcctcaatttacgaagatgatgggattaagagattaaagacaggcataggaaattataagagtgttgattgggggagtgataaatgtccatgaaatctccacaatttatgttcagagattgtagtaaagacaggtgtaagaaattataaaagtattaatttgggtaactaataaatgtccatgaaatcttcacaatttatgttcttctgtcacagcttcagcaggtccctccgttcagggttcctgacttcccacaacacttgcccagataggataggactgagcttctgtattattcccctcactctgcagcatacgtgtgtttaaaattcctgcctttgagttatgtgcttaagctaaatgttgcattttttcacaaaacaatcacagaaagactgtaaactggtgctggacaaagtgtgatctgcagactggtgttagtccacaaagtattttttaccagcccacaatcagataagcacagaaatggaaggtgtttacaaactcctaaggcagtttgatgctgctgcagtatttaagcacacaatcagtgggcttatcctgttaaccaaggtaaaccaattagggtagtgctcaatttgtatgatgatctgcatgagatgcaagctcattttggtcacacgtagtatgcattagtttgcacaataacacagactgggtagcttaaagaacaaaaatccaagcaaggtgccaacagggtaggttccattctgagaccttttttcctagcttttagatggccaccatcttgctatatcctaacatgaccaattctttgtgtgtactcaaagagaatgagtatgtgagctcactggtatctcttcatgtaaggatgatagtcctatcatatcatggccccacccttatgacccctttcaactttaattaccttcttgtaggccctgtctccaaatacagccacattgggggttacagctttaacatgaatttgttgagggcaagggggcattcagtccataggacagtaggaccataatggactgggaatttaaaaattggtccttcacctcagatagttcaagcagcactgtaggtataattaagctaaacacaactggatattactaatataaaaactagaaaaaatttgctttaggttacaaatgtttgaatatttatcaaattcatataatcttgacattcaataaaattgttttgtgtaaaacattgaatgtttacaagagattagattataaaaacttgattggatactgaaaaaaatgtactgattagttaattcctacagaggcctgggcttaagcttgatgtaattacagcatggtagctgttcttatagcatagctctcctgcctgtgcagccgactcataaatctatgcatctccctgctggccctggccttctggcttcctgaagacatgtccccatggccattccataaataccactatctcagccattcagaagaaggcatgtcacctccctggagccctacccctgtgcttccttcctactctgttttataatctcaacaaataggaacattattttcatgttactcacgttgaaactgtggaacattttcagctgtgctcttttcctttggagatctcttttctctcccacctgcttattctgcctccagaatgcctactccttcaatccccaccattctaaggtgctatcagccttgcaccaggccactgctgtcatgtcttatttggagtatttcagtaagcacctcactactatccttgacttcagtttctttctctccagtctaatgtgtgtgaagcacggttctgactatatcccttgcaagctgaaaaagcctttgctggtttccttttcttacaaaataaagtccagcctccttaacaagggattcaaggtcctctgtaatctcctcttatctgtctttcgtccctagtctcccttcgccctacgctttcaacatgcatactgtattataggcatagctgtgttttacattttcctgcttttgtgtctttgcctggagttttctttggcctggaattttctcccatccaatttctgctcttcagaggatcccttgttcttcaaagtctagttcaggcatcacctttccctcagttttccctggtctctctgtttagcgttaatgattaattaatatgctcccataacatgttgaagtttcatccattcctttactgtgtattcactctcccctagttgatcagttctttgagagcaggatccatgctgtattcagagttggcattaccccagtcccaggtcacagtactgagcacatggttggtgctcaattggggtgttgctaatgtaaggtcgtgatctatatgtgaaatatctcagatcacgaagagaatgataatgcctctctacgtcgttttgagaaccaggagagcagaagaggcagttttgcatgtgcccttgattctgctcagaaggcaggagtagattccttaagtttactcttcattgtacttcctgagggaagatagtcagggtatattcagtagtcagaaggaaaccttgccccaggctggggtatttacagcttatggttttagaaaaggggcaagttcttagcaatacgaagcaaagaagttatctcgattgtgtccattgattctagggctagattatagcttcagctacaactcatcagctgtgcttttattttctctatcaccagtgatgtcacctttcctattcttgatattggtaatttgtatcttttcttcttactcatcaatctggctagaagtttattgtatttctctaggttctccagaaaaatagaaccaatagattatataaaatgagatttattatagggaattggttcatgcagttatggaggccaagccccaactcaagatccacacttgacaagctggatacccaggagagacaatggtgtcattccagtcctagtctggagacccaagaaccaggagagcccatgatgtgagtgctgggctacccaaaggcaggagaagacaggtagagagaattctttcttacccagccttttattctattcaggccttcagtggattggatgaggctcacccacattgagggaggtttttgctttattcagtctatggattcaaatactaatttcatccagcaacaccctcatagacacagccagaaataatgtttaatcaattatcctggcacccatggctcagtcaagttgacatgtaaaattaaccatcacatttatagatcttctgaaaaatcagtgaaactttggactttattgattttctgtattgttttactattttctatttctttgctttctgctctgttctttattgtttcttttatttgcttttgtttttctagttcctgaagatggaattgagataaaatttcctgctacatagtgttttagtgcatcccacatattctggcaagtgttttcatttttactcagtgcaaaatactttttcattcttcttttgatttcttctttgacccatgtgttatttagaagtatgttagtttccagatactgggattttccaaatatctttttgctactgatttctaatttaattacattgtagtcagagaaaacattttgtctgatttgagtacttttaaatttattgagacttatttaatgtcccataatatgggctatcttggcaaatgttccatgtgcatctgaaaagaatgggtattctggtattgttgggtagaatgttccataaatgacaattaggtcaagttggctgatagttttattcaggctttctgtatccttactgctttttttgtctactttttctattaatttttgagaacagtattgaaattttccgttataattgtggctttgtctgtttctccctgcagttctatcactttttgcttcttttttttgaagctctgtcatttggtatataattgtttcatcatcttcatggattgacctttttatgatataatctctttatcccggatgtaatattctttgctttgaaatctactttatctaatactaagtcagctttttgttgatttgtgttagcacaatatgactttttacatccataggttcatttactttgaacctatttgtgtctatatatttcaagtgtgttttcttttggcaacatatcattaggtcttgtatttttatccaatctgacaagctcaacctttttaattggggcattatggcatttatatttaatctgattattgatatgattaaagtgtatcatattgctatttatgtgtttgctattttttctatttttgcttgcaattttaattttgtttgcaattatttataatgtaataaattatataaattataatatgctatttctaatatagcaaacaaaataaaaatagcaagcaaaaatagaaaaacagcaaacatctatgttataaataatagcaaacaaaataatatttaatattaatattaaatatttaaaaatagcaaataatacgtaggtatttttattatttatttgcctgatctgtcatttcttcccttttcttccttcttttaaatcatagaagtgtgtggctgggcacggtggctcaatgcctgtaatcccagcactttgggaggccaaggcaggcggatcacaaggtcaggagatcaagaccatcctggctaacatggtgaaaccctgtctctgctaaaaatacaaaaaattagctgggcgtggtggcaggcgcctgtagtcctagctactcaggaggctgaggcaggagaatggcgtgaacccttggaggtggagcttgcagtgagtggagatcatgccactgcactccagcctgggcgagagagtgagactccgtctcaaaagaaaaaaaaattcatagaagtgtgtgtttgtgtgtgagtgaaattccatatttttccttttttgatgattggcaacaactttttgttttgttgttttagtggttactttagggtttatagtatacatctttattttacaaagtttaccctcaagatattataccacttcacatacaacatagtataagaaccatacaatagtttacttccatttttctcctccttcgtaatcatttcccagtactgagtcaagactcttccaaacactctctctggtgaccctgagttagattttctggtctggctggtggtgacagacactgttctcagtcctgtgtgaacagagctctgtttcttccaacctggtctgatgttgctttcccggacctcagatagtttcctcacatacgtgtgctggtaagacctctactgaaaacttgagggagatcacctgcagacctcctgagctatctgttgctctgcagctctgtcttcttttgttttcctgcaaacagctggtgccatgttgtccctggattctcatcatgactcagaaagtctgctgtgctcatcctgacgttttctccctgcactgtggcctggagactttgtctaggcagtaagtagcagctgtaggctcaccctgcttcttttccatcaggaaccacagttcttcactgcctgatgtccagtgtcttgaaagtgttattttataaagtttgtcttgttttttggttgttgtttcgggtggaagggttacttcatcttggtggaagtggtctgttaggatatttctaataaggatgtaagaagaatgaaaataacatttttttcaatttctataattagtgacttcatctttatagttgctaaggccagaaactttggagtcatccttgacttatctctctgcaacctctagtccaagattcttgttcacaccactgcaaaacgtaatatatccagaatctgacaactcctcatgacctctactgctagcgttgtggcccactcacactttgggcaaattactgagtctctctgtgcctcaggtcttaattttgcaaaataatgcctaataatagtaccacgtcataacattgttatgaagcgtaagtcattattttaaaataatgcacagaatagtgcacagtgtgcattaattatatgagtgtttattaagtgacaaaggcagagttgggattctctctcatgtctgactggtccctgagatattgctctctcatgttaccttgcttttcttctgtgcctagagttgttctcagtgctggaaaatacaaaatggtgagagagtgggcaccttcccagaagacacttgctagttgggtgacaggagctaaatatgatagaatcatgcattgacatagtgagagatcatgggctgcatctggtacttgtcctggtaaaagtccccacatccggggctcccacccttctccacactcccaccccagcttacagcctgggctgtccaaaagcacagtggggagcttgtgattgcctgattgcctgggtttagatgacaagactctgctgctttagaatttggcccttgtaccatggacctcattgtcctgtgtgtgcattgctcaggaaaacaccttggagcaaggcagtgccctgagggctgcctggagccagtgctcttgttttaatgtaggtaaaaatctacactcttaccccacaggcatgatttcatctcacaatagagagcccctgtatgctttgtaagtggtttctgaattcaagcaagcattttctctcttgagagaagcttacaggtcatgttcttgccagactacagacatgactctctgatcctcttaggtagcagggccagttcaggctgtatatcctaaaactaaaagtggggtactaaggtgggagctacaaggaatgaagggcaatgactaacagacataagcagaaaaacaaacgaatgggctctgcttgactctgtttatccacagtcatgatttacacgtgaagaaagatgcttaagtttattttataaaagattattttcagtcagagatagggatggaatgttagacgttaatttaatatggaacagtttatgcagactccactctaggactaaatagaattggaaatgtcagcctagagctaggacattgctaaaacgtttttctgagattttgcagatattgtgaagtcaataaatacattgatatatggactatattttgtgaattttaaaaaaatctaatttgtgttactagagcagcaataaaaaagctaaaacaaccataatgtataaataaattaggttggaaatataataatactttttattttgtgcatgttgcagtccattattttattggcattatctctttttgcattaattgacttaaaacgatcgtctttaaaaatgaaatcataaagagcatgaaattttgaatgttgcttataaaaattcactaattggacacattaatcaaactatactatcttgctttttaacaattttaattaaactgtgaattgggataaacgggtaatttttgacaccttgagaacagtatgattatactaaaactaaatatgattgtgtcctactattttaaaatatcgttttttcaactgtagctggagatatgaatagcatacagaatgtaaaccctggctgactcagtaagaggactgttagagagtgtctatgtaaatttgatgggtttaattaagcatcagttgaaccaaatgcattttttggctgccaagctcactcacttctttgtacacagtggtatattcagttaggtctcagggatgtgggagaaggggccataatgtctccatgatttttttaaaatttaaatgtttattgagataattggagattcatatgcagttgtaagaaataatacacagagattttgtgtacctgttacctagtttcctggatggtgatattttgtagaactgtagagctgtgtcacaaccagtatatttacaatgatacaatccactgatctaattcagatttccccagttttacctgtacttgtgtgtgtgtatttgtgtttagttctttttttttttttttttgagacagagtttcactattatctcctaggctggagtgcaatggcacaatctcggctcactgcaacttctgcctcctgggttcaagcaattctcctccctcagcctccccagtaggcaggattacaggcatgcatcaccacgcctggctaactttttgtatttttagtagagacggggtttcaccatgttggccaggctggtctcaaactcctgacctcaggtgatccgccttggcctccgacagtgctaggattacaggcttgagccactgtgcctggccttgtgtttagttctatacagttttgtcacatgtataggttcatgtatctaccaccaccatcaaaatacaggactgctccattaccatgggacccctcacccaccccaattccttacccctgatgatcaccaaaatctgttctctgtctccaaaattttgtctctcaaaaatgttatataaatgtaatcatacagtgtataaccttttggggttgactttttccttcagcacagttccctggagattcattcaatatatgtgtataccagtagcttattcctttttattgctgattattatctatggtatatatataccacaatttgtttaaacattcacccactgaaggacatctggtctgattcctgtttttggctattacaaataaagttgctatgaacattttagtactggtttttgtattaacataagtttttctttctctgggattaatgttcaaaggtaacattgctgggttgaatggtaattgcatgttgagttttataagaaactgccaaactgttttccagagtggttttaccattttatattcccaccagcaatgtgtgagtgatctagtttctccatatccttgccagaatttggtgctatcactaatttttattttagccattctgatgggtatgtagtcatattgcattgtagttttaatttgtattttcctgatggctaatgatgctgaacaacttttcaagtgcttatttgccattgctgaatcctcttcagtgaaatgtctatgtttttgcccattttatttctttttttttaaatttaagttctagggtacatgtgcacaacgtgcaggtttgttacatacgtgtacatgtgccatgttggtgtgctgcacccgttaactcattatttacattaggtatatctcctaatgctatccctctcccctccctccaccccacaacaggccccgttgtgtgatgttccccaccctgtgtccaagtgttctcattgttcaattcccatgtatgactgagaacatgcggtgtttggttttctgtccttgcaatagtttgctcagaatgatggtttccagcttcatccgtgtccctacaaaggacatgaattcatccttttctatggctgcatagtattccatgatgtatatgtgccacattttctttcttctttttttctttgtagatttcttttttttcttttctttttttttttttattatactttaagttatagggtacatgtgcacaacgtgcaggtttgttacatatgtatacatgtgccatgttggtgtgctacacccattaactcgtcatttacattaggtatatctcctaatgctatccctcccgcctccccctaccccacaacaggccccggtgtgtgatgttccccttcctgtgtccaggtgttctcattgttcaattcccacgtatgagtgagaacatgcggtgtttggttttttgtccttgcgatagtttgctcagaatgatggttcccagcttcatccatgtccccacaaaggacatgaactcatcattttttatggctgcatagtattccatggtgtatatgtgccacattttcttaatccagtctatcattgatggacatttgggttggttccaagtcttcgctattgtgaatagtgctgcagtaaacatacatgtgcatgtgtctttatggcagcatgatttataatcctttgggtatatgcccagtaatgggattgctgggtaaaatggtatttctggttctagatccttgaggaatcaccacactgtcttccacaatggctgaagtttttgcccattttctaatgatttttttagttgttgagttttaaaaaatatttctgtatcctaggtagtactcctttgttggatatgtggtttgcaactattttttcccagtctgtagcttcacataagctttgaaaagtttttaattttgatgaggtctcttcatgactttttaatgtttggtcttttttgaaaaatagggagaagtaccttcaatagaattagagcatttttctgttttaattatttttattctttttttattctctaccttcttccccttgacttttactccctcttcagcaacataaactttttcttgattgtgaaaaatattgtaaagtattaaaattatactttatttcagtgttcttaatgttctttaataaggaacatcacatttttctcttgccttttacaaacacctagaacatttcctttttgtttgatgacattttttgcaagtatttgttggcaattgtttatgctcttcaacagttacatgctaactatacaatctccccctttttcttcaaaaccagacccgtgtgcagatggcatttcatttttatcacagttaatagtgacagaacggccccctagaacccacagagaaaatccctgagcttgtatatttattttctccagttatgagaagaaaaggctaccctcatccatcaggatttagatatgcctttcctgagtgtccctggtcactgggcctaccagtgactctcctgcagtccagccaccatcagaggtttgctgtgtttccttttttttttgtcccttgtaaaggggtcagtcctagctatgagggcatccaggcagtgctgactggtctgcttctaaacttccagggaccagcagcaccaggggttgtgggagggatgccttgcacacttgacccagctgcatgttgaagtgtccagttgaagaagcagccctgggtgaggattgtgccccagcttcccacatggcctggacctgtggtaggtccctgagcctcgctgaacacttcttattccctcctgtaaagaaggggaaggggaagaatacaacccaccctgtctcctacgaaggacagtccagaaaatttctcacatccctctgtttgtggtatctgactctagtgaaagaaggtacccagtgactttccttgctgtatggatacagagagaaatgtacttatcaactcttgggtagataaaaagataatgataccaaacctgctaacaaaaagcacctttttcttatgaaactgacaggacttctagaatcttccaataagtaggaattagaactcattcagttaattcaataaagatatattagcacctacttgatgccagacacttttcttcgcagtgaggatacagcagtgaacaaaaggaaggaaaacctctgtactcgtggagtgtattttaggggggaagatagatgataatgagatgaaatgtatagtatgttaatcagtaataaccactcaggagaaaaataaggtgaggaagggagataggaagtaccacggtgggggtggtggtatagttttaaggaagttggtctgagaaaatgtcctagggagaatgatttctgggttaagacctggagtgagtgatgggaaagccatgcagatacctagtggaggaagagcagtgcaggcagaaggcacagcaccctaaaggcccaggggtgggcctgggctattaaggaacagcaaagaaactcgtggctggatcacagggagtgatgggagtttgagtccataaatatgatgcagaggatcacacagggatttttaggtcatttggcttaactctgggtggcatgggagctgccggagggctctgagtagaggaatggatagtcagagtctgacttatgtgttaatggggcctctggatactctgttgactgtaaaatgcacaggatatgagcaaaggcagagagaccaggtaggaagtcatggcaatggcttaggacagagacggtgtcttggaccagggcaggaaatgtggaggtagccaaagtggttgggttgtgcatagattttcaatgcaaaataaaggatttgataatacgttggaggtgaggggtaacaaaagagaggcatcacagatgaccctcaggtttggcctgagcaacttcacaaatggaattgtcatttctgagacaaggatgacgttatgaatgatttgtgtcaaataagtcctagataatactgtaagagcattatatctttattttaaaggtgaggattaacacacatagagtaaaatgcattaaagtgtacttattccaaattatagctttgcaggaacactatatcttaaacatattttattcatcatcggaatttgggggaaatattttttgtttgtttctttaataatttacatcttaaatcctttatcatttttagctgttccgagaaacaaggcacatgtctctctgctacagattgaaacataaaaataatttcttccacaagtatcttttagccctattatacatactcataatatcctggccctatagggagaataaagtataatctttgcccttagggaccatattatttagttgaacataaataaatgatgtgaaaactgcagaataataacaaattcaaacccactggctgacagtttttcatttcttgacttcgtgaatgtgtatgtcacctcctcctctggaatatctatcacaaaatgacagtgttttggttctgtgatctgaaagatgacttactggaaagagcacgtgaagaaaatgtgttatatcattcctgatgagtaaggaagccaactgaggttttgaagcatgcctcacataaagggctttgatggggtataattgtgggtttcactggtacctgagtaaacccatgtagatgatgacatctcatgaaaaacacatgcttcttagtcaatttactagtgaaatagtgttgggggaatccagcctatagacagtcctcatgctcagcagaaaaatgttctgacaattaaaacaattttaatttgaatcttattttctcatagaaaaagtgatgtgacagaaaatgtttattctaactggggatctgatgcccaacattttatagaaattaccataaacattgtacttaattacatttattttcaagtgtaagtggcatgctatttagtatagaacttagatagtatttaaaaactcgatggcattttatttatgctaacactatctcatactataccagaagctgcttttgttttcatgcattctacttaaattttagtaaagcaaatcagagcaactctcatggcacttaatagaattcaaaagaactttgttcagatttttaccatcttctttgaaagaaactttggactggttgatacattttttagaaacggattcaagaataattttctttctgctgggcacagtggctcacacctgtaatcccaacagtttgggaggcagaggtgggaggattacgaggtcaggagttcaagaccagcctggctaacatgttgaaaccctgtctctactaaaaatacaaaaattagccaagcatggtggcatgtgcctgtaatccagctactaaggaggctgaggcaggagaatcccttgaacccaggaggcagaggttgcagtgagccgagatcatgccactgtacctcagcctgggtgacagagtgagactctgtctcaaaaaaaaaataaataaataattatttctgtcatttctctgatattttgttgaaaaggctttttcctctaaactacataaactaatctgttttttttatgaacagtaactctcttagcaatggcagaaaactatgccattatagatagctacagttgcaatcagctaggtaccaattacattgcccatctgtttcgtaattgttatttacatttcttagcagagatatttcatgcttttcctttgcctttgatttatttgcactggttttttttcacctgtagatcacactttagatccccaacgctttatttttatctatctatctatctatctatctatctatctatctatctatctacctacctacctacctacctatctacttattttttgaggcggagttttacttgtcgcctgggctggagtgcagtggtgcaatctcagctcactgcaacctccgcttcctgggttcaagtgattctcctgcctcagcatcccgagtagctgggattacaggtgtccgccaccgtgccggctaatttttgcatttttagtagagacagggtttcaccatgttggctaggctcgtcttgaactcctggcctcaggtgatccaccgccttggcctcagcctcccaaaatgctaggattataggtgtgagccaccacacccagccgatccccaacactttatataacaaggtgttatataacaagactgaaagcttcagtgcaaatggcagccttactcagatttgctatactgtgaaaaaaaaaatcctctctcagccttcaaatcataaaaatcacctgattagaatgcagtttttaataggataaatgactgtgaagtgatgagacctctctttgtatgatagcactgagaaattcaaacaaatcttaacggtcagagcagccaaggcagcctataaacttaggctgggcttggcctgaaacctgtttgaaactattttatttggtttcttcagagatgttttcatagccacatgagtaaattcgttttttatgttatggtgataggacaaagagaacgatattagtcaaagggggagtgagctgtcttccttgtcatatggcttagctctgcccccttctcttcattcatggctgcttaagcttctgatggatcctgaagggagtagataaacttgccttgtggctttggagccatcacatttgatctatgggcctactcccctctcctcatctattgggatgaatgttagtagtgatctacttgtgagacttgggtttcccaataagaaaataattaggtgatctctctccccacccctcaccaagaaatcaaaataaattagaatcttcctttcagtatctgagagtatttaaaggtgttttaaaccactagagggagcccatattgttctgatttctgaaacctgtaatgtttaacagcttgattttattgcctatagaaaaggatctctctaaccaatgactggatcactacatccataactgtagtgttctcccttagtttgcattttttcttttttcccagtttttttattgtggtaaaatatacataatacaaaatttactgtcttgaccattttaagtgtacaattcagtggtattaaatacatttataatgtgcaaccacagtaatcatccacctctataattcttttcatcttgtaaaacagaaactctatacccattaaacaataactccctattatcccctccacctagctcctggaaacagcccttctactttctgtctttatgattttgactatactaggtatctgatataagtggagtcatatagtacttgtctttttgtgactggcctatttcccataatgtcctcagggtttatccatgctgtagcatgtcagaattcccttagtttttaaggctgaataatattccattgcacgtacatactgcattttgcttatccattcatctgttggtgaacacttgtgatgcatccactttttagctgttgctttacttcatttgtgttgttataaaaggaatacctgaggctgggtaacttgtttttaaaagaggtttatttggctcatggttctgcaggctgtacaagaagtgtgacacaagcatctccatctggtgagggcctctggctgtttccacttgtggtgcaaggtgaaggggagctggtgtgtagagatcacatggtgagagaggaagcaggagaagcggggaggtgccaggctctttctgacaaccagctctggcaggaactaatagagcgagaagtcactcattacagcaaggatggcaccaaacctttcatgaggaatctgcccccatgacccaaacactgtccactaggcaccatctccaatatcagggatcagatttcaacatgaggtttgggggaacaaatatacaaactatagcagctattgtgaataatgttttataaacataggtatacatgtatctcttcaagatgctggtttcagttcttttagatatatacccagaagtggaattactggatcatatggtaattctatttttaattatttgaggaatttccatactgttttgcatagtggttgtaccattttacatttccaccagcaatgcacaaggattccaatttctccgtattctcaccaacacttgttattttctggttttgtttgtttatagtagccatcctatgggtgtgaggtaaggagaaaagtggaaaatcaccaaacggagaccatcgttgatactggtgttcttgtactctgtggcttagaataggatgtgggtgaagtaattggagacagatcattttgatagctccttggctggggtctgtggctatcctcctccccttctccataatactcactgtcatcttccaccacatttctttccaccaatccctggacagatttagttccattcagcagaatatcagtcatgtgtggacattattatgctgggctgtgtggcaaagtagaaagtgaataatgagctgtctttcttgtcagggtaacaatcttagtcttcattgcatccaggtaatgtgttttggcctctttcaacctctcttccctttgctttcctctgcctctctactaagaagctttgacctcatgatttctcagacccccttcactgcttcagattctctagatttttcattttgtgttttattgtctttttaaagtattgggaatttataagattttacacttcctgctatagtttggatgtttgtccctccaaacctcatgttgaaatatgatctgtaatgttgtggtgcctaatgggcagtgtttgggtcatgcgggcagatccctcatgaatggcttggtgccatccttgtgctaacgaatgatttcccactctgttagttcctgctggagctggttgttaaagagcctggtacctcccctccctttgcttcctctcttgccatgtgactgcatagctggctccccttcaccttccatcatgagtggaagcagcctgaggctcccaccagatggagatgctggtgccatgcttcttgtacagcctgaaaaatcatgagacaaataaacctcttttctttatagattacccagcctcaggtatttcttcatagctatactaatggacgatggcatcttctgtttcagaatacaactaatttcttcactgagagatttgagttgattcaactgtacgtacagcgccctccccagccctcttacatacctgtgttataagatggtctgccttccgtttttgttgttgttgttgttgatcaccattctaggttgagctataggaagtcatgtagatgtcaaagcttatggagtctttctaaaccttctaagattatgccaacccaattcagagtatatacactgataaagtaagatatttattaggataatttctgtaatggttgtgtttgtgcactaaagtgtcactcagggttgaaaaggcaaatcgtgatttcagtcaattacattcaagactggttttacttttaatacctgcagagttatagcttaggacagaagcttaagagatcataccaccacatttcactgagcctaaggttaacttctcccacattttagtacctctgaaattgaatgtattttacagtggatatcagggagctgccatcgtcaacatgtggacaaatttgaatgtcaacactgggccatttctggtagtgtgatttggcaacagcaactcctcatggtttcagtcagtatagaaaatgaattctgggtggggctataaacctttcattgaccccttttgataagatcagaaaaagcaccagcatggaagcttgcaaatggatgccagctgcttggaaggaaatcctggatagagtggtgaagcactgttttaaggactgctgcatcacccacactgctgaggccacataagaggattttgtattggaaaatttgtgcattgtcaactctgagataaaacttgatttagaagtcttggactctgaatgtttaaaagatctagtagtacatggggctgggcgcagtggctcacgcctctaatcccagcactttgggaggccgggcaggtggatcacctgtggtcaggagttcaagagcagcccggccaacatgacgaaaccctgtctctactaaaaataccaaaaacaaaaaacaaaaaaacagctaggtgtggtggcatgcacctgtagtcccagctactcaggaggctgagacaggagaatcgcttgaacccaggaggcggaggttgcagtgagccgaggtcacgccactgcactccagcatgggcgatagagtgagtgagactctgtctcaaaaaaaaaaaaaaatctagtagtacattaacaagcctatattttgcttatattttgtaggtagcacaggagtgattattaaaaaaaaatctatctaaagaagttttaaaaagagcccttcaaattagaattctaggtaataagaacactttctttaattatttaattggcagtatttttttttcttggtggtatatgggagaatggtgtgtcttacggtgtcttacagtttttggtatcctagattgttgaaagaataatagtgggaagtgtggtttgcctgcatttctgaacttcctctctagcacccagtttttgtactgctgctgatcctggcttctgtgccttgcaaatgccctcttcccctgctcaatgctcctcctgtcagcctacttcctatacttcctttgatgctcaatctaagacagacttcctctgccaaaccctccctagtaaatacttccccatctagagcattcagtgtacttctatggaggtatatcatttgaactatacacttgactgtacatggctgtggaaatgttttatatttgtttcatgactgggttcctcaactgtaaaagattgtaaactctttgtgatagggtctctgtaccctatcacaagtatcgtttgataaatacttgccgagtttattttcactctgcatttgcctgtgccattgttagaaatttgaagacacgtgaaaaacaaggacaaacagggacaaactgcccctctctctagtggtttctctacatgagccctggaactgtggtggagaaggctcaatgtaatccccaggttttggtgtgatttttagcttcttcctcagtactcaccaccacctcaggtagtcgggtctggggacttacccccagtgcccaagcaccacagcctcaagactgtcgcattgcagaaccatttgacaatgaacgatcatatatgtgtgtttaccttatatgcatatagcaaggattaaattattttatagcactgagtacaagaaatgttatatcttatttttctgatttttattcccctcttaccctacctgctgaaaaggacagtcccattcatattttgactgctctttgcttctccctggggatgcgcaagaataagagggaggattatattttttgaaaaacaaaggacagcatcagtaaatctcagctatagtaagctgcatagtccagactacaaagtagagggaagggaatggctgggtttcctctgtgctaagctttggacttgggatcttttaggcaggctttgaaagccacgggaggtggtgtttattccctactcttccctccatatgccatcccatcagagtttctgttactttctaggacatgctgggggcaggtctctcctattgacacaattggtaggtaacactgccatcagggattgtcctcccaggttaggtcacatctgccctactacacagttcttccctcaatcagctggattttgcaggggtggagggcagttggcttgcccgctgagtaccacccatcttctggggaggcattagaaatatccaaggtcagaacagccagtggcttcccaagaagtgggcaggaaaactcccactgtctccttgctgtacctgccaacagccagtcagtggccaaaccaagcatcaagtcttatcctgctgcacatacacactttgtagtgcagaacaaggcttcagtgattcatactttttaaagaaatacatgaacagaaaatttgatgctacttacatccttttaaaataattaccagattaatgcttgattcacagctgagaatttattctgataggaacacagtatatgagtcattccatataagaagtacagagatgatgcaacaaaattacaattaagcatcaccattaagatacatgcatgagttccactctcaggtcttttaagtccatgtttagagtagctcaatttgtactggcttttcctttcatatatcacagcaaaaacagtatcaaaaatattgtatttgaggtgaattaatagaaatacagaataaaaatctttatttcatagaaatatgtaaatatatatcacagaaatatacaaatccccctccatgctgcttccctcccccatgcaaaccacaggcataggaaggttctgtaggagggcagagggcatctgggaggtggtaggggcccctcccttccctcactccagggacttaggctcctcaggatgtctgtcttaggaacagcttcccaaagattcagtagggtggattcattaactagccttagatccaccctgctgagggaacacaagcctgaaagggagttcctttctctacttttctgggactggagttttctgcaatcaggaaaaacagagcagaaagtgtgtgctgcttgccagaggttgaaactctgaagacagttctcccaaagaaagaggaggcaaaagaaacatgtaaggagacagggttatgtgactaggggatacttttctttgttttgtaaactattaaagttttctatcttttctccttaattacaaaagcattactcgcttattacaaccagataaagattatagagatttccttctgtgcacacgctgacttttgtatgctaggtaagtttgcatgtgcctcctgtggagtaaggaagtaggaattactcacacatttaccctccagtaggtttattgtctgcacttaattcaaaatcacaaaaatctttcgaaatgtgacagaataagaaaaagtgctcacatatgtactcttcatcccatctaccaaagaaaattctgcaattgctaacccagtcccatcccctatccccatactgccaagtagggttgttctttgtctttaaggatgcagtatatgaatataggaaattccatagctgggggaggacatggcctaaatcactgtgcatcatcaggaacaggaaggagcttacatcactgtacatcttgaggaaccaggaaggagaaagggagaagagaacaaaaatcagaggaggatttgaattttggtttggacttggtttagttgggtgctgtggttcaggggtgggggacaaaggataagcttcagagtggtgaagtgtggagaaaactggtgggaagaaagggggagacatggtaagtaccatgcaaaaagtaaataaagaatagaataaccagcttgggcaacatgacgaaaccttgtctctgcccctgctcccccacccccaaaaaatatatatatgtaaattagcagggtattgtggtgtgcccctgtagtgccaagtagtcgggaggctgaggtaggaggattgcttgagcttggaagatggaggttgcagagagccaagatcgtgccactgtgctcaagcctgggtgacagagcaagaacccgcctcaaaaaaaagaatagaattgttcttaaattaggttttggtttctgatctgtgcttctgaaatttgacactccttaggaatagaccactagggtaccatgtttgtcatggctacaatggggttgcatatgtcaatatatacaggtaaataaatatataccttgctctttgtaatggctacagaatattccacatggtccagcttttctcctgtcagtaggcattctgattgttttccgatattttgagttaccaccagtgtaacttttctatacacataccctttttcaatagagtatatattcctgaaagcaggattgctggatcaaagagtaggcactacttttaataggtacagtgagatcattttcccaaaagtgtcctggtaacttatttatgagagctccattttcatataccttactgtctacttgctcttaaaaatatttttcctggccagacgtggtggctcatgcctgtaatcccagcactttgggaggccaaggtggtcagatcatgaggtcaggagatcgagaccatcctggctaacatggtgaaaccccgtctctactaaaaatacaaaaaaagttagctaggtgtggtggcaggcacctgtagtcccagctactcgggaggctgaggcaggagaatggtgtgaacccaggagcagaggttgcagtgagccgagattgcgccactgctctccagcctgggggacagagtgagactccatctcaaaaaaaaaaaatttttttttcacaaattggataggcaaaatgttgtctgaggtggcattaggttcaatttcctgaccagcattgagaaagaatactttcttattatgttcaatggccacttgccatgcctcatctgtgaagctgcctacacatgacttaagctcatttttcttttgagtgtggtttatcttcttcttgtgaatttgcaggaattttgtattttaagtatattaactctttggtcacatgttacaaatattttcttctatctgttgtttagtattttttgtctctggcatatatcacatacatacttttttccattttttatataacccaagtgtatatttttctttgtttctcctggtgtcttgtcttgcttaagacttccaaataatcctcaaaatttcttggtggagttttgaattttgtttgctatgtgtcttatttacatttagatgttgaattaattttgaaattatttttgtttttttaaaattatttttgttttgaagtaggagtccaacttcatattttccaaagaaatagtcatttatatcatttattaaaccgtcttttccagtaacctaaagtcctacttttatcacgttattttgagattctcttctatttcactgacctttttgtctgtttttgagccaatccatattgttttgattatagttgttatagtaagttttagtatttgatagggcaaaatttttcctaaaaattttcctactacaatttttctctagaaatttgttgataattcttttattttttttatataaactttaaaattacttagttcagcttcaacaaaattcattaggccctgattgaaattgtgttacatttgtatatgaattttggaaggaataacacttttgtgatgagtttgtcctcctaaaaacgtattcactgtctctgtcaatgacttattacatatccttcaataaaattttttagttctttcacataagctctgtactttccttgtttttcgttggtaattcattgcatttatttctcttgtaaatagtatttttctaatcaatcttcatttttaactagttcttactgctataaagaagagcttttgaaaaatatgtcccataactactaagcactcttattagttataattggttgttagtttttcttgggttcatactcatagctgcaaatgaggataatgttttcttttttctgctaatactcatactatttatttatttattcattctattttttattttttgagatggagtttcgctcttgttgcccaggctagagtgcaatggcgcaatctcagctcactgcaacctccgcctcctgggttcaagcaattctcctgcctcagccgcctgagtagctgggattacaggcgtctgccaccatgcccagccaatgttgtgtttgtagtacagacggggtttcaccatgttggccaggctggtcccgaacccctgacttcaggtgatccgcctgcctcagcctcccaaagtgctgagattacaggcgtgagccaccacgtctggccacttatactaattattttatgtttgctcttattgcattagctagggcctcaaaaacaatattgaaaacatctctgtcttagtctttacttgaatagtgatagccttattatttcaccatgtaataaattgtttgcaggctgggagtggtggcttatgcctgtaatgccagcactttgggaggtagaagtgggaggattgcttaatgccaggagttcaagactagcctagacaacaaagcaagaccccatctctgtgaaaaaatggaaaattagcctagtgtggtggtatgtgcctgtagtactagctactcaggagattgaggcaggaggatcacctgaatccaggagttggagattacagtgagctgtgatcatgctactgcactccagcctgggtgacagaatgagacttgtgtcttaagttgtttgctgtgggtttgtaataaatgatttttatttaagtatatttttctacttttattttagatcattttctgtttgtttatcttaattgggaataactattgtatagcaagtgcttttttaacctttatgtttttttaaccttaaattattttttattgtgtttcttacctcattcaagagctaatggtccttttttgtggaaatgtggtagcctgtttagttgccattattttaaatactttcaataaataaatggcatattaaataaattgtctgatgtcctgaagaacaggcattatcaactgtttgaagcatcaattttttttttttaaattatactttaagttctgggttacatgtgcagaacatgcacttttgttacgtaggtataaatgtgccatggtgctatcaacctgtcacctacattaggtgtttctcctaatggtttccctcccctagccccccatgccccacaggctctggtgtgtgatgtcgccctccctgtgtccatgtgttctcattgttcaactcccacttatgagtgagaacacacggtgtttggttttctgatcttgtgatagtttactgagaacgatggcttcctttccctgcaaaggacatgaactcatccttttttatggctgcatagtattccatggtgtatatgtgccacattttcttcatccagtctatcattgatggacatttgggttggttccaagtctttgctattgtgaatagtgccgtaataaacatacatgtgcatgtgtctttatagtacaatgatttgtaatcctttgggcatatgcccagtaatgggatggctgggtcaaatggtatttctagttctagatccttgaggaatcgccacactgtcttccacaatggttgaactaatttacactcccaccgacagtgtaaaagtgtacttatttttccacaggctgtccagcatctgttgtttcatgactttttaatgaccaccattctaactggcatgagatagtatctcattgtggttttgatttgcatttctctaatgaccagtgatgattagcattttttcatatgtctgttcaccgcataaatgtctttttttgagaagtgtctgttcatatcctttgcccattttttgatggggttgtttgcctttttcttgtaaatttaagttctttgtagattctggatattagccctttgtcagatggaaagattgcaaaaatattctcccattctgtaggttgcgtgttgactctgatgatagtttattttgctgtgcagaagctctttagtttaattagatcccatttgtcaattttggcttttgttgccactgcttttggtgttatacacatgaagtctttgcccatgcctatgtcctgaatggtattggacaggttttcttctaggatttttctggtcctaggtcttacgtttaagtctttgatccatcttgagttgatttttgtataaggtgtaaggaaggggtccagtttcagttttcttcatatggctagccagttttcccaacaccatttattaaacagggaatcttttctccactgcttgtgtgtgtcaggtttgtcaaagatcagatggtggtagatgtgtggtgttatttctgaggcctctggttttttctgaggtgttttggtttttggaattttcagcctttctgctcggtttctccccatctttgtggttttatctacctttggtctttgaggttggtgacctcagttggaaatgcagaaatcactcatcttctgctttgatctctctgggagctgtagaccggagctgttcctatttggccatcttccaacctttatgttttaatttatggttatcttttcacttaaaaacgtaataaattatgttgatagtgttgctaattttaagctgtctctgcattcctgaaataaaccatgttatattattatattatatcatattctgtatatttttctgttaatttgttactggtggtgaatccatatgggtttgcagcaacttcagttcttgcctcttcagaaggatttgaccaaggggtaaggcagaaggagagaccgaggcaagttttagagcaggagttaaagtttactaaaaagctttagagtgggaatgaaaggaagtacagtacacttggtggaagaggtccaagcaggtgacttgtgagatggagtgtgcagtttgacctttgacttaagggttgtttgttgttttttcttggagatggagttttactctatcccccaggctggagtgcaatggcgcaatcttggctcactgcagcccccacctccctggttcaagcgattctcgtgccgcagcctccttagtagctgggattacaggtgcctgccactacgcctggctaatttttgcatttttagtagagatggggtttcgccatgttggccaggctggtctcgaacttctgacctcaagtcatctgcctgcctcagcctcccaaagtgctgggattacaggcatgaggccactgtgtctggcctgacttagggttttgtatgttggcatacttccagggtcttggattccttctgattcttcgcttgaggtgagatgtccacatgcacagcagcctactagtgcttgggagatgagcatgcacagtgtgtttactggagttgtacgcatgctcacttgaggtccttaccagtcaaatgtccctggaaggtcatatgccatttaaaccccgcccccctgccattctgcctcttaatatgcatgcctgagcccacttgtccaactcctgagatcttatcgggaagctgctgctcaccagtttcaggtgttctctatctattaggagactgcctttccctggcaccggctgtggccaattattattttagaaagagagtcagcaaccgcctgaccatcacctgatggtcacctgacattccaggtgtgtgtgtgggggtggtgctgggagcacccttctgccctcctcatgcctgactaactacctactgtaacaaattcacttctgggttctatttgccggtacttgatttagaatctttgcatcaatatttgtaagtgaaattggtttctgtttttctttgtcatactttggtattaagtgtgttccggctttttagaatgaattaggaggagccttccatctttttctatggtctagaccagtttgagtacatagcaagtatctgttctgtgatgatgcctactgccctatattaataaggctgtggagtattactgagtttttaatcttcactattatgatcttaaaatatgaccttgttttaaaaggagtcctctaaaatacttttcttccccctcttccaagttgccaggtttttggttatctcattgttttgctttttatttcacttgtgtttagataaaaagtttttaaatttcacatttttaggctggaaacttattgcaacaggagggaatatttagagaggagaggaacacacacaccatgcaagacttttgttgtggcgtagttggagatctgagaaggggaaggaaactggatttatcagaaagagggaggccagggctaaatgtcaaagcctggctgtagccctgtctcctataagctgagtgactttacgtaagccttctctgacttcaggctgtttttccatcatccatgtatcacgttgagaacggcctgatgtaattgctgtgaggatcagaagaaataatattcaaggacttctgaacccttaaggcattattttgatgcaaaggatactgttacaggcttattcttttccagtgattcgttataacagaatacttcttcagtgaaaggagatttttatttgtaaatgtttagatagttgttgatttttgtaagatagtttttttttttcttaaatcagggcctctaatggtcatgagataaaaaacaggttttaaattttaccccttgtttttttcaccaggcaaagagactgttttgtagcaaactagtcttctagctcaaagaaaagaaaagagaaatatttttttctgccatgcactttcaataccagttaattgaactatatgttctgagcacctgaaatgaaattattgacgaattcattctgtctaactgtgtaatctcctagtcttattgtgaaaacttgctgcatcctcttgtgccccttgtgtcttccttcactggtcaccctaagggccaagggagagctttccccttggccctctaaaggttcactgaaaaatcaacttgcaaaaggcagattaataggagaaaaggcggatttatttaacgtgtacatgggaactttcagaatgaagatccaacccctcagtaaggtacagaagcttatataccaccttaaggttataaaaataatgcaggctcagagagtggccaaaaacagatttttttttaatttttattttttattatactattatactttaagttttagggtacatgtgcacattgtgcaggttagttacatatgtatacatgtgccatgctggtgcactgcacccactaactcctcatctagcattaggtatatctcccaatgctatccctcccccctccccccaccccacaacagtccccagagtgtgatattccccttcctgtgtccaggtgatctcattgttcaattcccacctatgcgtgagaatatgcggtgtttggttttttgttcttgtgatagtttactgagaatgatgttttccaatttcatccatgtccctacaaaggacatgaactcatcattttttatggctgcatagtattccatggtgtatatgtgccacattttcttaatccagtctatcattgttggacatttggcttggttccaagtctttgctattgtgaataatgccacaataaacatatgtgtgcatgtgtctttataggagcatgatttatagtcctttgggtatatacccagtaatgggatggctgggtcaaatggtatttccagttctagatccctgaggaatcgccacaccaacttccacaatggttgaactagtttacagtcccaccaacagtgtaaaagtgttcctatttctccacatcctctccagcacctgttgtttcctgactttttaatgattgccattctaactggtgtgagatggtatctcattgtggttttgatttgcatttctctgatggccagtgatgatgagcattttttcatgtgtcttttagctgcataaatgtcttcttttgagaagtatctgttcatgtccttcgcccactttttgatggggttgtttgtttttttcttgtaaatttgtttgagttcattgtagattctggatattagccctttgtcagatgagtaggttgcgaaaattttctcccattttgtaggttgcctgttcactctgatggtaggttcttttgctgtgcagaagctctttagtttaattagatcccatttgtcaattttgtcttttgttgccattgcttttggtgttttagacatgaagtccttgcccatgcctatgtcctgaatggtaatgcctaggttttcttctagggtttttatggttttaggtctaacgtttgagtctttaatccatcttgaattgatttttgtataaggtgtaaggaagggatccagtttcagctttctacatatggctagccagttttcccagcaccatttattaaatagggaatcctttccccattgcttgtttttgtcaggtttttcaaagatcagatagttgtagatacgcggcgttatttgtgagggctctgttctgttccattgatctatatctctgttttggtaccagtaccatgctgttttggttactgtagccttgtagtatagtttgaagtcaggtagtgtgatgcctccagctttgttcttttggcttaggattgacttggcgatgcgggctcttttttggttccatatgaacttttgaactgaaggaaatagagacacaagagacacaaaaaacccttcgaaaaattaatgaatccaggagctggttttttgaaaggatcaacaaaattgatagaccactagcaagactaataaagaaaaaaagagagaagaatctaatagatgcaataaaaaatgataaaggggatatcaccaccgatcccacagaaatacaaactaccctcagagaatactacaaacacctctacgcaaataaactagaaaatctagaagaaatggataaattcctcgacacatacactctcccaagactaaaccaggaagaagttggatctctgaatagaccaataacaggagctgaaattgtggcaataatcaatagcttaccaaccaaaaagagtccaggaccagatggattcacagctgaattctaccagaagtacaaggaggaactggtaccattccttctgaaactattccaatcaatagaaaaagagggaatcctccctaactcattttatgaggccagcatcattctgataccaaagtcaggcagggacacaaccaaaaaagagaattttagaccaatatccttgatgaacattgatgcaaaaatcctcaataaaatactggcaaaacgaatccagcagcacatcaaaaagcttatccaccgtgatcaagtgggcttcatccctgggatgcaaggctggttcaatatacgcaaatcaataaatgtaatccagcatataaacagagccaaagacaaaaaccacatgattatctcaatagatgcagaaaaagcctttgacaaaattcaacaacccttcatgctaaaaactctcaataaattaggtattgatgggacgtatttcaaaataataagagctatctatgacaaacccacagccaatatcatactgaatgggcaaaaactggaagcattccctttgaaaactggcacaagacagggatgccctctctcaccactcctattcaacatagtgttggaagttctggccagggccattaggcaggagaaggaaataaagggtattcaattagtaaaagaggaagtcacattgtccctgtttgcagacgacatgattgtatatctagaaaaccccattgtctcagcccaaaatctccttaagctgataagcaacttcagcaaagtctcaggatacaaaatcaatgtacaaaaatcacaagcattcttatacaccaacaacagacagagagccaaatcatgagtgaactcccattcacaattgcttcaaagagaataaaatacctaggaatccaacttacaagggatgtgaaggacttcttcaaggagaactacaaaccactgctcaaggaaataaaagaggatacaaacaaatggaagaacattccatgctcatgggtaggaagaatcaatattgtgaaaatggccatactgcccaaggtaatttacagattcaatgccatccccatcaagctaccaatgcctttcttcacagaattggaaaaaactactttaaagttcatatggaaccaaaaacagattttaatggcaagacaggttataggggagagaataaaggaggcttgactagcaaaagtggccttgttatgtacatgaagcctcatagctagaggccctcagagagaatagatagtaaacgtgtcttttcagacttgtaaaggtgtcagactcaatctctcccagatctgtgaaaggcctagaaagggaagccctggctgcattaatggagattctctacagatgcaaatttgcccaacaagagacagctttgcaaggccacttctgtctgctggccctgtggcagccatttcaaaatgtgtcaaggaaatatactttggggtaaaatatttttattttcttcaagtgcaattaactgtaaagacataaactgtaccttttgcgggtggcggcgagcgcggagaggacgccatgaaggtctcgggcacactacgagagtacaaggtggtgggtcgctgcctgcacaccccggaatgccacacactgccccactaccacatgcaaatctttgcgcctaatcatttgtcaacaggtcccacttctggtacttcgtatctcagttaaagacaaagaaggcttcaggggagattgtctactgtgggcaggtgtttgagaagcccccactgcgggtgaagaacttcgacagctggctgcgctaatgttactgggggtccttgctcccagagctcccaagatggtggcgggctgcttccaagatggtggcaagccttgtcttctctgacctggggttcttggcctcacggattccaaggaatgcaatcttgggccatgcggtgagtgttatagctctattagaagtcgtgggtcacggaagagaaccttggaacccagtgactagtgttgagctggattaggacaaacccgtgcaggaacaatggcaagtctttagcccgatcaggagcggcaatgggcgcctccctggatggggagcacagcggacaccctgtcggatccggaggtatggaagtcagcagcgggtctgcgacggtggcaaagggcggcaaacagcagctagtcctgcctctcactatgactcccggagctgcacctacaacatgtaccggcaataccggtacctgaccaccgcaggcgctgtcacccagtgctaccgcgccagggcccactccatccagatcactccaccagatgaaggtggaggtgatcgcagccagcaagtgccgccggccggctgtcaagcagttccacgactccaagatcaagttcctgctgccccaccgggtcctgagccgtcagcacaagccacgcctcaccaccaagaggcccaacaccttcttctaggtgcagggcccttgcctgggtgggccccaaataaactcaggaacgccccggtgaaaaaaaaaagacataaactgtaaatgcttagacaattggtcatgcctgttggcggagaacacagccccgcctccatgatgtaaaccaaaaataaaatcctaagtccccccaccaactgaatggaccctctcttggccaagaagacctcagagaaacctgaaaaactgtgttcttggccatgatgggaagagaggttagacatacctcgttataccccctcccttttggagtttaggcacaactgactagcactaacattgaaatagagattattagactgataaaatagactttgttgccacaaagagtggcacataagatagcaaattccaaactgattctggtgtagcatcacatgacagcagaccctgaaggcgatagaaatattttaccccaaaaatatatttctttgacatattttgaaattaccctgcaaaactgtctcttgtggggggaatttgcatctgtagagatatctccattaatgtggccaagccttccctttctaggtctttctgggatctagaggagattaaatgagtttgtcacctttaagatctgaaaagagacatttaccatctatgttctctgaaagctgctacctggaggcttcatctgcataacaagaaccttggtctggctgggcctctgtagctcacacccataatcccagcactttaggaggctgagtgggctgtagctcacacctgtaatcccagcactttgggaggctgaggtgggcagatcgcttgagcccaggagattgagaccagcctgggcaacatggtgaaaccccatctctacaaacaaacaaaaaacccaggcatagtggtgtgtgcctgcagccctagctactcgggaggctgaggtgggaggatcattgagtctgggaggttgaggctgcagtgagttgtgattgcaccactgcactccagcctgggcaatagaatgagaccctgtatcaaataataatagtaaagagccttggtgtccacagccctccttaacttaactcaggcatttcttttgtctttaaacaaagcttaattctttcaaccaattgctaatcagaaaatgttggaatccacctatgacctgtaagcccctgtttcaaggtatcctacctctttaggatgaaccaatgtacaccttccatgtattgatttacgtttttgcttgtaacttctgtctccctaaaatgtataaaaccaaactaacccaaccacctcaagcacaccgtttcaggacatcttgaaactgaacactgggccatggtcactcatattggctcaggataaacctcttgagatattttacagagttttgtttttctgttaacatttatcaatcatgtgggtagtgttgacttacgaatcttttgagcaatgtgaggtgctgaggcaattgattttagtcttttgtgtctattgcatggttaggaaccagaccaagtgttacgtgttaccccagaggcatggacatgaactgttacttttgagtctatttctagcagcttggctcctctgatgagataccattttacaatgcaaatggaaagaacaaaaaacacaccacctgaagacaaaaattgtaaggtcaccaaaactctataaaaatgtcccattactaaacttatgagtaaaaggtttaagggctggaagcagatcttttttactcttgctagagttacgcaggaagtcattatttccacaggaaataaacaaagacattttcttaaaaacgaatgatcatcttgttgaattcctgccttgtggcatttgatgctgaccatccatccatgtcccagagcacaggaagcttatagcataaaatcattagttagagaagatatcattaattcttaaacatgaccaaaaattgaatcttttaagagacaaatttaataaacattctctttctttacgatccatggcctttttcatggattgcctacccattatgagtttctcctggagattggccctcctccctcagctgactgcaagggtacagctttgctcctggtggggactgtgtccccatccctgccctgtaccctgccctgtaccctgcccagtggtgagcacatgagcacccagcctaggctccaccctgcaacccatccttgcaaggtttgaaattgcctcaaagagtagtctgttttggtctggctgctctcccagattgaagggatgtgagattaggagctattggccaaggcctttttggtcacacagtctgggactcagagagagcccctcagaagctagagagaagtagaagtaggaactcagcagagaagaggcttcagggtcatgcctggccatctttgactattggaaggttagtgtgtttacctgggtatggtgttttggggggcataactgtgttgggagcagttcctaagggcagagttgttcacagttcacatagcaggtgtcacactggggagcaggtggcatattagatgattgttcaggcacttccaatcctgagatcccatggttctctaaaggcatgtcaatgaaaagagtcaaactctgtgaagtatttgaagagacttattctgagccaaatatgagtgaccaatggctcatgacacagccccaggagatcctgagaacatgtgcccaaggtagttgggctacagcttggttttatacattatagggagacataagacatcaattggctgggggcggtggctcacacctataatcccagcactttgggaggccaaggcaggcggatcacgaggtcaggagatcaagaccatcctggctaacacggcgaaaccctgtctctactgaaaatacaaaaaattagctgggggtggtggcacgcacctgtagtcccagctactcgggaggctgaggcaggagaattacttaaacccaggaggcgaaggttgcagtgagctgagatcacaccactgcactccagcctgggtgacaagagcaagactctgtctcaaaaaaaaaaaaaaaaaagaaaaaaaaagaaaaaagacatcaatcaatacatacaagatgtacactggtttagtccaaaaggttctctgaggttcaggcactgtggactgtcattttagtgtgatttggaaagcctctggcttccaggtcataggtggattaaaagattttctgactggcaattggttgaaagagttattatctaaaaacatgaaaatcagtagaagggactgtctgggttaagattaagtgattgttgagaccagggttttatcatgcagatgaagcctccagatagtgggcttcagaaataatagattgtaaatgtttcctatcatttctgtcagtcttaaggtctctgttttgatgttaatgctggtcagctgggcctgaattccaaagggaggagggtataatgaggcatgttcaaccccccatgtcccatcatggcctgaactagtttttcaggttagctttggaatgcccttggctgagtgaaggaccctcagtcagatggggagcttagaattttatttttggtttataggcacaaattgagtatcggtcttagtacctggcataatttaaaaactacattttactcatttttttcacttacagttgaccaagcaaattcagcttttttatctaatcatattttgtttttataaaagtaatacatataaataattttaaaggtcaaatattcctttaagagtaataacaaaagaatgggtctctgccctttcccaatttcctagagtatatgactcaaatttttagccctttttctgctgtttacctctatatttctaaatactatgtctttcagttttattgactctctactataaaatatgaatgtttttatgttccatcttgccagtgtaatttcacatcacaacttttggttaaatcagtgattgtattgttatacaattagtatattgtattattatacaattagtaattgtattattatacaattattatacaataatacaatgtagtggttgtattattatgcacattgtatttgtagataagtacgtagtgtgccatgattatgtttccttaagcataattgagttgaaaacggccttgttttttctttgtttggtttctgtgtacctatcattgattctttcctaaacatagtgtgcttaaacacaccagacagcctctcagtgtgttgtgttgttttccttggagagggtatttctggaactgtggtgttcccttcccatttgggcagttcacctccagactggctgcagggtttctgtcctcacttcccaacttcttgggaattcacttggcttctcgtttaccacccctttcttgtaaccccctcctttatcttggcaggttcatgagagatagtttggaatcttgcatatctgcagacatctttatgcccatctgccctccaaatttggaagacattacccattgcctctaacattgctgttgagagcctaatgccagcctgacccctgatcctttacacggggtctgttcattctctctggaagctttcacagtcttctctttatccctggtgtctgacatttcacaatgatatgcctttgtggtctcctcgatcagagggacttaacacttgcagacacctgttcttcagttctgtgaaatccttgaattatttctttgagaattatcttttctccatgttctatctttatttctggccctctgttgcattttctggacttaccatttgttgtatgttttccccctatttttgtgtctccttgtttgtttgggttcttctgtctattttgagattttctcaactgtatttcccaattcttctattgaatgtcagcaatcataagtttagtatccaagagctcttttttattctctgaatgttcccacctccttttagaaaatagcattctgtactttatttcatgaatgcagtattatccctctgtacttttcttctgatctctgctttgtctctgtttcctcctaattcctcttttagtggaaaggcgttttcattattgtgttactgcccctggtgctgcctgtagttcagtctcacttgataggaagtcttgtgtcttccactggatgagagaggggatgggactttgaaggatagagaggggtcaaggagtgtcttctgcccttctgcagccgttctgaggtcctaggctctatctcctggggttctccaaggcccaggcactgtgggctatcattttatggtgattcagaaggaggggagagcagacgtaagttcatctgtttaatccagaagtctcccaggtctccaggtcccagtattacactttgactttaaccatttggtaattaacttttctcctacttagtctatccacttagaaatgtctgcagccttcaactttcctttttccctccctcctttccttcctttcaaaaagctctcttcagggcagatgtaccaatcacatttcattagaggtctttacttctctggttcttttttattgttgagtactgtgaatttggtaatttttcatagattattgaactttagattgaccaacttctgaattaataaatatatcaaagtttaatatttattttttatttctaacttcacctacttgaaaaagaaagcaacaacaatgtttaaaatgtaaataggataattaggtatagaaactttcagagaacatctgggataacagggactgtgtgtttttaccacatgagacatgatacagcttttatacaattaggccttaatgcttgctcttatattttcatgttagcacgagtgaaaaggaaaaggtagtgcctcttttctgttattaaacaaaaggatcagggaaccttgattaacacaataatctatgcacgagtgaaaaggaaaaggtagtgcctcttttctgttattaaacaaaaggatcagggaaccttgattaacacaataatctatgtcctcaaggatagttttagaaaaccattcagatggttcactatagtttctaaagtgccctaacttgtggaggcatttctgtagggggctataatattataaaacaggtacttgggtttgcttttagatgctctaaccttaaaatggagacaatttggaagtctaaggatatatcagactttttaaaaactatttgacttctcaagcttttgccaaatgtttgatcacagtcaatttattattgaattatctgctacatatgtatggtgtgaataatctgtgtttgaaaatgagaaaaattgtactgtgtcaaatatgaatactacataggagtgagagctaagcattaatgtaaattaattacttgtgccaaagacttctccccactaggaggacagcctgtgttagcacaagcataaaccatcagagtagacagagccactatttttctgattgtgatgatgttggaatttctcactcacacatagtcactacagtgaaatgaaaaaagcatgggtcctggagtcagacagctaagatcctggcttcagatctcactagctaggggaagttactttccagaccttaatttcttaatctataaaatgggtggttaaagtccctactttaaagggtttgttaggattgggcttttcatttataaaacacatagcacagtggtgaggtcataatagatggctgctgttttttaggttgctgatttcagaattatcattttgcatagaagaggcaactttgacaaggacattttaaggcatctgttctgactaaccccaacttccatctccagaacctcactccatgtggcttgtatagacagctcactaactctgtgaccttggccaggatacgtaacctctctgatcctcagtttccttatctgtcaaatgggaataaatgcagtttctgcctcatagggctgttgtgagcattaaatgagtaaatatatgaaaagcacttagaatagggcctggcacaaggtaagcattgtggtaaagtgtgaactgaaaaaacagagactacttccttagagatgggccattgggaaatcacttctcaacattcctccctcactccctatgtgtgcctctggtgtgcaggttggcgggcccctgccaaagtcaaagaggtctgtccaattgtaagtgataatggctcttttttctgcccgtaatgagcaacaggcaccttctatgttaagattatgccttgcccaaacaggaaggccacgtcaccttcgcgtcttcctgtgtgctattgtgtgtgaacacacccaaggtcgactgacagtataggggatgttagaacatttaagatgaggggtaatttgtcatcaggctattccctcctgctctgagcttaccacaagtacagtattatggtccaggatccaaggaagcattacgagttttagatctgtgctcagattgttccgtttgatttgcaaatgacttttatgcaatgacattttgatttagcacttaaaatataacacgtcagctgttattaacaattatcttaataaaatgaaatggaaggtaatagatggagtacgtcttgcttcattttctgtccataccacttaggacagtccctagcatatggtagatgctcagtaaatgtttgtttgagtaagtaatttataaattattttcatattcattaataaaaagggagaggtggtacatcttttttgtgcatctgcctaagttttatccactacaatacctttgatattattctagcttttcttaacagttacaataatactgtatcttctcaacatcatatcatctcaatatgctgatcagttttaatttgagggataatgaaagatttctctatttgtaaaccagtagataaataacagggcttgtctctagggagaatactgaaagatggtagaggggtgcagagcaggaatggatggaagatcttttctgtatattctttgtctttattttttaaaactatgtatacacattactttctcaaataaaagaaattttacccatgttaaaagaaaaaaaaactcttgtatctgcccactgtggagatctgcctgcattgaatagtacagggaaattacttattgatcggcaaattgcttattgattggcaaggtttgctatgttttctttcttctttcaaaatacatgctatggtcatgcatgaattcggggatagtcttcattttctttgagcagttactcttaggctatctcattattttaatgtttattagtggtatagcttgctcatactaagttccacaaagtgatctaactcaagatttcttgggaagatggtgaagtaagggaaaaaaccgataaaaactacaaagaaaaaggaaagtaaggagaaaactccataaaccaagaaaaggaaaaggagaaaacagggagctggcagggaagtggtgtccgttgcattctacaggtgttgagaagtttttatctgatataacatgaaggacagaccaacttcaggaagacaccaagaaccagccaatgtcttcccttcctgagacaattggtgggatgacatgagaaatgaatttaacaaatgctagtagaccactacagaccccactaattggagatcaaaagcaggcctagaagaggtagagactctttctaccttaggattcagtaacattcacagaatgggtacatggatatcaccaagataaactgaaaacttgggggcaaccttcaggtctaccaacaattattttttggaattttcttctgttcccctttggtttttatttagacatgattaaatacatgataattttagggggaaagtagataagctaacagaaaaaaatactgtaaaacccagaaaaaaatactgtaaaactagttaacattataaaatgacaatatgagcaaacagtgtatcaaaatatatgattctgaagtaaatcacatagaataaatatgagataatggccatggacatttttgaagaaaataaagccacaataactgaaaaattatgataatggcaccagaataaatagataaatagaacagatcataaattccatgaactgtcaaaagtatagatacatacaaatttgtaggccaggtgtggtggttcacacctgtaatcccagcactttgggaggctgaagtgggcagatcactcgaggtcaggagttcaagaccagcctggccaacatggtgaaaccccatctctactaaaaaataaaaaaaactttgccaggtgtggtagcacatgcctgtaatcccggctgctccggaggctgatgcaggagactgtcctgaacccaggaggcagaggttgcagtgagccaaggttgcgccattgcactccagcctaggcaacacagcaagacttcatctcaaaaacaaaacaaaacaaaaacaaagaaccccccccacaaatttgtgataggcattttttgccagtagaaaaatgattgattaggtattaaatgttgctgggacaaatggcaagccatttggggagagtggataaagcctccccttttttaaagtacacactgaaatgaaattcagtcaagttaaatatatgaatataacaaattaaaaccataaaaggactggaaagaattataggtgaatatttatctgatctttgggtggggagaccttgactataagaatgacaccaaagagagaaactgtaagaaaaaaaattcacaggttcttcacgctaatgttgtgtgtaaggttcaagaccgagaaggagctatatgtccaacattagataattgaataaatgttgacccatccttataatggtatatcttgccactataaacataaaactgtatgtaagtatttatccttggaaagacagccgtgacatagtgctaagtgaaaagcttataaaggcatgtatatagatgtttgcttttgtataaatggcctgggcagatataatccaatgttaacaccagtagttttctctggctattaagatttgggtaatttatttattttggcttttctgtgtttctttcttttctcctactatagtgattatatatttaaataatcatgtctagttaaaaaccaaaggacaaaaaaaaattctacaaaataattagtgataataaaatcagagagaaaactgagcttcaaactcccctcttgactagattagatagatagatttcttagaaagattttggggaccatctgttttgttgcatgataacagcatttctttatgtggcaacttgaatctgtaatgaccataaatgcaaatttctttaaacataaaaatcaaatacatgtattcattctaaaataccactaaaggtcatatttttaaatgatgatttattatagttgacatttgacttatttatacattcattctttttaaacagtgtttgttttaatttttctgaattaaacatcaaagagctgttttaaaatacaaatttattatggacaaccaaagttaatgaatatgtctcttaatgagagctttggctaagccagtttaaaacatttacaagtcaaaaatgtaatcaaggagagattgttttagtttattgtccaccaagaagcttagctgccagcaagaaaaactctcattttctggggaaatgttgctcctcctgctttgagctctgcaatgttttatcgacttggaaaaacaacatattagttttgataatcaatcctgataaagtcctctgagcccatcagttttctcttgtgagctgacaatcttctaatgtgaaaaaggaagaaattggggttggggggggcggggaagtactgaaacttgcagcaagtggtatgaccacgtgtaatcagtcttatatagccctttatatcctaggtggaaatcaataatcatcattttgcctttgcttgaaattgctttataccaaaaccaaaaaggcctctgttataccactttctctcagttgcacacaatataaaaatgctctttggatcattccaaaactgtatacacatgctggctgggaggaatgaatgactgtgtgtgtttgctctgaaccctcctcagcccagctgtgttgtcacttgggctgcactctcactgtcatcaccaggcctctgtcactgactccagacctctccatcttcaggggttgtaattttctttgtatagccttccccacaaccccacccaataattgccatttgtttaagaatacctcaggatcattcattcatttattcaatgttgaagtgctgctgaacatcctatgacgtccagggcagctccccacaacaaagaattttccagtctaaaatgtcagcagtgctgaggttgagaaacgctgaggttgagaaaccttcagttaaatcaactattttcttcagcatgtctaggaacagtattgggcataaagtggtagaagagcgaatgggatttctttcctaccatcctggtaaattgacacatgagaaaagtcaacagataacaaataatgacagtggcatgtgggagaggcgcgtgtggcactgagagcacaggggtggtcatgctctctctgactgtgcctgtagggctcagagcattccagaccagctttatcatggtaggcaaggggagcaagtagagtgacgtggcaggagcctagcagtgaggaagaacgtggcttatgacatccaggaggagagtgtagacggcgctgggcatggaatcaggccagcaaagcggacagtgtctcgtcatgagagatccaatactgggcactgatcacgtttaaaagagaccagagagacataatcaaatgctgtgcatgaattttgactagattctgtctagtaggaaaacagctataaaaaaaaaaagacattttggaccaaaaatcttccagagaggatttcacaacacactgatttgccaagattagttttgtgaatgatttctctccacttattactttgaaattttcaaatatacagaaatgctaaaaaagttcagtgaatagttgtatgcctttaacccaaattctgtagttgtcattcatatttatcattttgcttatatttgctttatttttatgtatatacatgcacatacagaccatacagataaaaacacaactttttaaaaaatgaacttcttgaaagtaaggtgcagacatcaaggcaatttacctaaatatttcagcatacatctcctaagaataaggatagtctcctatttaatcccattgccattatcacattatgaaaattaacaagaatttcataatttcctctaaaatctggtctatatttacatttccccaattgtcttccaaaaattttttttatagcaatttttcctcctacgtcaaataggaagagccagtcaaaattcattgcatttggttgttatgcctctttggtctctctctctgtctttttttttggctagtcaagtgcagtagtgagaagggtggggaaagagtggaacaaggagttcgatctgtaactgaccatgaacgatcaactgagataactcactgtgataacttcagaccctcttttttggtgtcttttaaacttgaacagtcctatcaccctttccccctacccaccatatcagtgactttttttcattttaaaaattttaagggttttttaaaaaatttacatacaggaaaagtcatactttttggtgtaaagacctgtgtgtttttgtattaattcatgtaataataatcaaaattaagaaatagaacagtttcatcctcctttccaaatttccctccattgtcaaactctctccctacccttaaccactaatctgttctctctccctacgagttttgcctttctcagagtatcatataaatggaatcatatagtacataggctcttaagtctgtttgtttttcacttggcataatgcatttgagattcatccatgttattgcatttatcaatagtttgttccttttttgttgcagagtagtgtactatcgtgtggatataccacagcttgtttttccattctgtagaagaggaatattttgatttttttccagcctttgtgattttgaatagagctgccataaacatttgacctttttttcatccatttatttgtgatcttcactgataaagtagccatgacattgatttttgaagaggcaaggtcagcttgcctgtagattgttccacagtgtggatttgattgtttcctatgatgttttgtttcacttttcttaaaaagaaattttttttagagatggggtctcactgtgtcactcaggctggagtgcagtggcactatcatggcttactgcagcctcaaactcctgggctcaagtgatcctcctgcctcagcctcttgagtagcatgtccagcttgctttgttttctttttctttcttttttaaatacttgctcctctgtcactgtattatattggaaattgtgtctagaagcttgggatttcatcataatatgggagtacctatgggagcgtatcatttgtaggaatgtcttcaagaaaactggttacatgtggaatttaacacccttgatgttcacccagacgccctgaacactcctcctctgcggcagagggacatgatgaggttttggatcaagaatagaaaatctagacttgcaaggaatattccatttcctaagcattgaattttaaaactttgtctcttcctaaataagagatattttatggcaagcaagtaaggaaaaaataaatcttttatttatacttgatttttttcctaatgtttctgttttaattggatatactttttctgttagttaaaactggggttgagtgtttgatgtttttataaataggtttccaactgggggaaagtgttttctaaatattttctgggtcaccacagcagtgttatgtaagagaagaaatcattatagcatccttctaaaaatactttaatggaaaattattctacaaccagactatatctgtttaatgatgtaacattaaacagtcttgatttacaatgtaatttataaatttataaacttaatttttttagagcagtcttagttttatagaaaaattatgcagaacgtagaattaccatatattggccaagagcggtggtgcacacctgtaatcccagcactttgggaatcagaggcaggtggatcatttgagttcaggagcttgagattagcctggcaacatggtaaaaaccactctctataaaaatcacaaaattagctgtgtgtgtggtgagatgcggctgtactctcagctactcaggaagctgaggtgagaggattgcttgagcccgggaggttgaggctacaatatgccaagattgcattactgcactccagcctggatgacaaagtgaaactctgcctcaaaataaataaatacataaataaataaataaataaataaataaaataattaccaggccgaggcaggcagatcatgaggtcaggagatcgagaccacggtgaaaccccgtctctactaaaaatacaaaaaattagccaggcgcgcctgtagtcccagctactcaggaggctgaggcaggagaatagcatgaaccccggaggcggagcttgcagtgagccaagagtgcgccactgcactccagcctgggcgacagaacgagactccgtctcaaaaagaaaaaacaaaaacaaaagaattacgatatatctcccatactccccatagcccaaacaggttcctctgatcttttcactgtctctatagttttgctttttccagaatgttggaatcattcagtaggtagccttttcagacctgctccttttacttagcagtatccatttaagatttctctatgtcttttcatggtttgataggtcatttcttcttaccactgagtaatatgtcattatataactatgcaacagtttgtttatcaatttatttactgaaagacattctaattgcttccagtttgggcaattatgaataaaactgttataaagtagaatgtagtttttaaaatacaactccaattgttgatacttctctgaagttcagcaacatctgcatttgttaagctttacattgactgtttacccacagtatgtccaagaatgtttcctgacagcactagccatcacaaaagcagatgatcaaattccttgcctcgtggagcttcctgtctatctaagaaagagctggattatatttaaaatatatgtttgtgggtgtgtggaattaatatatatacagacatatgtgaacctctacaaaaacttttaaagactctagtcattagaagaagattaaacactgagtatagaagtatgtttaaggataatgggagactgaaggccatggacttccttagtgggggtgttctggagaagaaacctttgactgtgatacctgtgcaatgaccaccatgcatctcttgtttagggtagcttcatttataaaggtaaaagcactggttcttggcacttccagaagcctttagaattttcactcctaacagtgcaattaatgaaacaactgaacaggacctggaatattataaaagagaatagtgaaagattcttgacaggtcatgtgccttcaagtcctgttaatttgatgaatcagtaggagatgaaatcaatataaacctgaaggaattgtccgcggggcaaatcactaaaagcagctgattaggccgggcatggtggctcacgcctgtaatcccagcagtttgggaggccaaggtgggtggatcacgaggtcaggagtttgagaccagcctggccaacatggtgaaaccccatgtctactaaagatacaaaaaaaaaattagccgggcatggttgtgtgtgcctgtaattccagctagtctggaggctgaggcaggagaatcgcttgaacctgggaggtggaggttgcagtgagccaagatcgtgccattgcactgtagcctgtgtgacaggacaagactccatctcaaaaaaaaaaaaaaaaaaaaaaagcagctaattgatgtaggattgaaaatccagccaggcgtggtggctcacacctgtaatcccagtactttgggaggccgaggtgggtggatcacgaggtcaggagattgagaccatcctggctaacacagtgaaaccctgtctctactaaaagtacaaaaacttagccagccttggtggcatgcagctgtagccccagctactcgggaggctgaggcaggagaatcacttgaacccaggaggcggaggttgcagtgagccgagatcgcactactgcactccagcctgggcaacagagcgagactctgtctcaaaaaaaaaaaaaagaaaacaaaaaaaagaaaacccactgagatgtttagggaagagatttgagttaccaccaccacagtctgacctgctgagattgtttagtttgaagcctggatgcattcatgaaaacaggtgaaacattgggtgctgtgggaactttgtaaagcttgatttacatttaaagtttatgtgagctccagaaatcccgaaaattcactgtttttttgtacagtcctagaaagccatgtgcacacataccaggcatatggtgacagttcttccactggtgcagcctttgctctgtcactctttgactccttcacaggaagcttccatccttccagggctctttctgttacaggaaagtgttttgggtcagagataagcctttcagcatttcccaagggcccatgtgtcaatactgtgctgcacactggggatgccatggtgactgaaatagttgtggaaattatgaaaccaacttgtagagtagaccactttgtgaaatccttaaggattacccacctaccagcattgtgcccacagcaattttttaaacacataagaaatcactgctaaaaattattagacattatggccaaagcaggaaagtaattttgctatgaaaggaaaatagcttgtggattgaaaggatttataattaaagcttaaaatatgacctagatactcacattatacaaccccaggcaccacaaaagagtacttatgctcaatgctaagaactccatcactgtgatgaaagctaaataaagtgtcagtgtttttccatgtagtttcatagctataaattgactggaaaactctaaattcgtttgtattttcttttaattgtctttacaatttggtttgtgaatctctctgtctgacattgtatttattactgttgcagttaaaattagaagagttaaggaaggatcactgcattataccttatgcactattcttcatcagctttcttgaagtataatttacatacaataaagaggacccattttaaatgttcagcttgataggtctcaacaattgtatacatccaaaatcaccaccacaagaagatttagaacatttctatcactctggaaagtttcctcctcccctctgcaatcagtcccttctactccccagcacaggctgtcactgaagtgctttcttgtcactacagatgacaatggcctgttacagaaattcatatagatggaataacatagtaagtattctttatatctggctttttatttagcataatgcttttgagattcatccatgtcattgcatgtagcttgttgctttatattgctaaatatttattccattgtatgaatataccatagatttcttatccattcacccattaatgaacatttgggttgtttccatatttttaccgttatgaatgaggcagcagtgaacattcttgtacccatttctcatgtgcatatgtctttatttctcttgggtaaatactttagtggaatgactgagtcttatgataagtatatatttaactttataagaaattttctaactgttttatagagtggttttaacattttacataaacttcaaccagcaatgattgagagttccagttgttctaaatccttgcaaatatttgccattgtcagtttttagtttttttagccattctgatagatgcattgatatttcattgtgattttagtttgcatttccctggcaactaatgatgttgaacatctcttcatgtgtttattagcatactatttgtgaacattctgttaaagttttatgctcatttttgttgcaccatcttttcattattgagtttcatgtattctttacatattcaatacacaagttaattgtcaaatataatacatatattgcagatattttccccagtgtatgatgtgctttttcatttacttaacataatgtgttgaagacaaatttttaatttttggtaaagtacagtttctcgttgtgtgtttgtgattattgcttttttatgtcttgtcagaaaaatctttggttaccctaaggtcctgaagattttcttcaatgagttttacagttttaacttttacatttatacctatgatccatttcaagttaatttttgtttatagtatgagagagaggttaaggttcattgttttcctatatgaatatccagttgttactctagtcgtttgtttaaaagacccttttttctcattgattactttcgcaccttgtctacattcatcttgccatatatgtgtgtctcaatttcaggactctattatattccatttatatatctatattcttatgtgttgattactggtttttttttttgtttgtttttttttttttttttttgagatggagtcttgctctgtcaccaggctggagtgcagtgcagtgatctcggctcactgccacctctgcctcccgggttcaagcgattcccctgcctcagcctcccgagtagctggaactaccggcacgcaccaccacgcctggctaattttttgtattttagtagagacagggtttcaccatgttggccgggatggtctcgatctcctgacctcatgatccaccctcctcagcctcccaagggtgctgggatttcaggcatgagctaccatgcccagcccaattactgttgttttaactcttcatgtcagatagtgttagtcctgtaactttgttcttttttcaagttgttttgccgttctggattctctgcattcccagaggaattttaaaatcaatttgctgattcctacaaaactttttgagactgcatttcattagattgatttggagaagataaactgacattttaacaatattgaatgttctaattcatgaactttgtatatctttccatttatttaggtcctctttaatttttcacaacaatattttatagatttatttgacagaatttgtacatattgtattcatccctaaatatccatttccaattttaattgctggtacagtcatgtgctgcataacaacattacaatcagtaatgaaccatatatatgacagtggtctcataagattatttatttatttatttttgagatgaagtctcaccctgttgtccaggctggagtgcagtggtgtgatctcagctcactgtaacctctgcctaccaggttaaattgattctcttgcctcagcctccaagcagctgagattacaggtgcctgccaccatacctggctaatttttgtatttttagtagagacagggtttcacaataccacatttttactgtaccttttatatgtttatatatatttagatacacaaatatttaccattgtgttacagctggggacagtatttagtatagtaacatgctgtacatttttgtagcctaggagcaatgggctataccacgtggcctaggtgtggtagactgtctaggtttgtgtaaatactgtctatgatgtttacactatgacaaaatcatctaatgacacatttcccagaatatatatccattgttaagtgatgcatgacagctgacaggaagaaaattgctttttatgttgaccttttatcctgaaactttgaaaaatttgcttattagtaatagttttatttatatggggtaaaacttaggatttactctgtacatgaccacatcatctgcaaataaaaacaaattatcttcttcatttataatctataggttctttgtttacttttcttgcctgattgcactggttaggacctccagcagaatgttcaatagaactagtaaaagttatcattcttgttttgttcctgattttaaggaaaaagcaattaagtttttaccattaagtatgatgttagtgactctctttctcagtatctttttaagattgaggaaatttgcctctatttccattttactgagactttttatcctgaatgactactgaagtttgtcaaaaattttctgtatatattgatatgatggatcattgttcttctttattctgttaatgtgttgaattatattaaataactttctaatgtaaaaccaatcttgcatttttttttatatggggtctctgtctgtcacctaggctgaagtgcagtggggcagttatggctcactgcaacctcaacctcttggactcaagtgattgtctacctcagcctcccaagttgctgggactataggcatgtgccaacatgcctggctaattttttaatgttttgtagctgcagggtcttgctatgttgaccaggttggtctcaaactcctgagttcaagtgatcctcccaccttggcctcctgaagtgctaggattacagatgtgagccaccaagcctagcccaactttgcatttctgaaatatatcccacttggccatattttattagagattgctggatttgatgttctaatattttgctaaagaattttacgtctataccaatgagagatattggtctgtggtgttcttttcttgaaatgtttttgtcaggttttggtatcagaataatactgtcctcatgaatgtcccctcctttttttttcggagagaggctgtgtaggattgatgtattattcctttttcaggttgctgataaaaacatacattgggcaatttacaaaagaaagatgtttaattggacttacagttcaatatggctgaggaagcatcatgatcatggcggaaggcgaggaagagcaagtcatgtcttacatagatggtagtaggcaaagagagagagcttgtgccgtggaactcctcatgagacttactcactatcacgagaacagcatgggaaagacttgcccccatgattcagttacctcccaccgggtccctcccacaacacatgggaattcaagatgagatttgggtaaggacacagccaaaccatatcattctgtccctgactgctcccaaatctcacatcctctcatttcaaaaccaatcatgctttcccaacagtcccctaaagtcttagctcatttcagcattaactcagaagtccacagtccactcatccaagacaaggcaagtcccttccacctgagtctctaaaatcaaaagcaggtcagttacttcctagatacagtgggggtacaggcattgggtaaatacagccattccaaatgggagaaatttgccaaaacaaaggggctacaggccccatgcaagtccaaaatccagcagggcagtaaaatcttaaagctccaaaatgatctcctttgactccatgtctcacatacaggtaatgcaagaggtaggtacttagcattgagcataagtacacttttgtggcacctggggttgtataatgtaagcatctaggtcatgttttaagctttaattataaatgctttcaatccacaagctattttctcttcatagcaaaatctcctttgactccatgtctcacatccaggtaacgatgatgcaagagcagctctgctcctgtggctttgcagggtacagcctccctcctggctgctttcaggggctggtgttaagtgtctgcagcttttccaggtgcacagtgaaagctgtcagtggatctgccattctcaggtctgggggacagtggccctcttttcacagctccattagacagtgctccagtagagactctgtgtgggggctctgacccctcatttcccttcctcagtgccctagcaaaggttctccatgagagccccgcccctgcagcaaacttctgcctggacatcgaggcatttccatagatcttctgaaatctaggcagaggctcccaaacctcagtttttgacttctgtgtgctcacagcctcaacaccacgtggaaggtgccaaggcttggggcttgcaccctctgaagccatggcctgagctctacattggcccctttcagccacggctggagtggctgggacacagggcaccaagtccctaggctgcactcagcatgggtaccctgggcctggcccacaaaaccgctttttcctcctaggcctcctggcctgtgatgggaggggctgcctcccatctgacatgctctggagacattttcaccattgtcttggggattaacattcagctcctcattacttatgcaaatttctgtagctggcttgaatttctcctcagaaaatgggattttcttttctatcacattgtcaggctgcaaattttccaaacttttatgctctgcttcccttataaaaatgagtgctaggcctggtatggtggtttaacacctgtaatcccaccactttgggaggccgaggtgggtggatcacctgaggtcaggagttcgagaccagcctgaccaacatggcaaaaccccatctctactaaaaatacaaaaaattagccaggtgtggtggtgggtgcctgtaatcccagcaacttgggaggctggggcaggagaatcacttgaacctgggaggcggaggttgcagtgagccaagatcgtaccgttgcactccagcctgggtgacaagagcaaacctctctctcgaaaagcaaacaaacaaaatactgaatgctttcaacagcacccaagtcacctgttgaatgctttgctgcttagaaatttcttccaccaaataccctaaatcaactctctcaagctcaaagttaaatgaatttctagggcaggggcaaaatgccaccagtctctttgctaaagcctaacaagagtcacctttgctccacttcccaacaagtttctcatctccatctgagtccacctcagcctagaccttattgttcatatcactatcagcatttttgtcaaagccattcaacaagtctctaggaagttccaaactttcccacattttcctatcatcttctaagccctcctaactgttcgaacctctgcctgttacccagttccaaaattgcttccacatttttgggtatcttttcagcagcgccccattctgctggtaccagtttactgtattagtccattttcatgctgttgataaagacatacccgagattgagcaatttataaaagaaggaggcttaattggacttacagttccacatggctgaggaagcctcatgatcatggcagaaggcaaggaagagcaagtcacgtcttacatgaatggcagcaggcaaagggagagagcttgtgcagggaactcctcttttttaaaccatcatatcttgtgagacttattcactaacatgagaacaccacaggaatgacttgctccagtgattcagttacctcccactgggtccctcccagaacacatgggaattcaagatgagattcgggtggggacacagccaaaccatatcaattgataatatttattccttaaatgttttatatactttcccaataaaactgtctgggcctgagaagattttctgttatgaattcaatatctttaatagatagagggagctattcagatgttctgtttcttcctatgtcagttttggtaattttgttccttatttgtttatgtcatctaagttttttaacttacaggtataaagttgttcacattattttcttgttatggttttaatttctatagaacatttaatgatatctccttttttattcctgatattggtaatttatgtctttcttcttttattcttaattagtttagctagaggtttagtttactgatctttttaaaaaacgtttgttcttattgattttcttctatcgattgatttctattttactgatttttacacttttaatattttcttcattttttcctgttttttttttctagccccttcttagttctattatatgaaagattcttagattagattcctcagcttttctattgaagttttcattttgacaatcatatggtaatttccaagaactctttctggctttcaattgttccttttctgtgagtgtctgctcttgttgtatgaatacaggattttcttagttctccctgaggctgctgtcctttttttaaaaaaaaccctctctcctgttctcagaattatctgtttcatctggattcattttcttcttttttgccatggggtatatgtgcatagctgtgtgtctgtctgattttcttcatgaagacttttctcaagtgtttggtgagtcttggctatctgttcatattgagaattagccagtagcatggctggctcaggccttcatgatatgggtgaggttttccaagaggcaaagactttgctttatgatagaagacaaaggggagagggggagggtgcagaatacactgcccatcccccaatgccagaatgtggaaggtgttttgagctcccttagtcctcctaccttccaccccaagaaagttcacttaatttgtttagtaaagatctattttgtgtgtgcatgtgtggcacatgtatgtatgcatctgagagttacttagctgcagccatttgcacataggattatagggagagatgaacttccatatcactcttcctaccattatgagggcattgtccaggtacaaagcctttccaaggctttgctgtactggttggctttttccatagccaaagcctgcctccatctgggttctaggctgtaattttctacactcagttttatcatgctatactctttgatttattttctgatttccagaaatttacagacttttcctatgtgctgatggccttcttcccatttccctcattattatggatgcctttttgtttctttgctgttcttttgatgatctctccaaatggatatgagagataaatggaaatcttcaacctcccatctaaaccaatgcatagcattctttttaacttctttatatagtagtttataattttcctgattcctaatcccatgctgccatttactggtttgtgaccctgagtaacttgtttaacttctctgtgcctgttttttaaaatagagataacagtagtaccaactatgtagttccaccatgatggtggaagtgttaaaactaacccaccagcctggagctcagtccctccttccatgggcgagccctcactaactcctaccatctgaggcccaaaaagcactttcccccttgaatggttggaggcctgagcagaagctccagacaggcactggcaggaagcactcactagctctgggccagtgggaagcaccttcctcaggagggtcccactgagaaactggcagctccatcatgcctcttagccatgtcacctcttggccatgttctcctcactccgcacttggaccttcctctccacaagtcattcttctactggcagatatttctgtgagacctctgaaaccttgtttcattgccagcaagccctccctcacccttagcctcttcacagaagactatctgtggccctctctctgataataccaccttgtttgttacttactgaattggatgatgctcaatttggttatcctccatttactagggaagtgcatcaggtagaaatggaatctgagcactgactggtccttttccttcaacaacaccgaatcctggagcaagttgtggctaccgaaagaagagaacaaaagataaaaacaacttagtggcaggaggtggggtggtggtggttggacagaaagtgagtcaggaaaaaaaaattgagaagtgccaccctatgatagtgacacatgcagctagctattgctcttagagcccacctaatggcattaaacagtgctgcctttctcttctcatatatttatgttccacctggttacacataactcaaggggctcagagactttgttttactgttgtagagacattgatttggaagctcgtggcgtataagaaataggtttaatcatcatcctcagcaaactaacacaggaacagaaaaccaaacaccacatattctcactcataagtgggagctgaacaatgagaacacatggacacagggaggggaatatcacacacccgggcctgtccaggggtagggggaaaggggagggagagcgttaggacaaatccctaatgtatgcagagcttaaaacctagatcacgagttgataggtgcagcaaaccaccatggcacatgtatacctatataacaaacctgcacgttcagcacatgtatcccagaacttaaagtaaaaaagagaaaaaagaagtcggtttaagcctaatgggagattgaaagctctctgcatttcttgtctatggtgtcttcatttgatgttaataggaatttgtaatgcataagagaattcctgtagaaatatttcctatgtagaaatattttcagaatattttattgttatggtaagtaaaaggaggatgtggaggaatttgatggagcaaatcaaattatttcagcttaaatttaaaaactttgcagggcaaggtggtcttattgctagaaacatccttccaagaaggaaaaaacaggtatcctggattctttgtgaaacttcttcttagaacagatttttataaagtgtgtctgtctttaaggagattcatctgtggggtgctataaggatcttattgcacagtggtctccattgcagggggtctcttgactaggactccggggtcagcatttataacaagccttcagggttttaataatttttacaaatgacaaagattatatatagcacagtggggatatattgtcatctccccttttataggttaacaagctaggaacaaaatgagagttctgactccttttccaatatgtggttgtctactgtctttgttgcctggagctcagtgtcactcaatgaaagggagacaaagaaacttaagtgattattccaagatcccacacaaactcctataggaataggaacagggtagggggtgggggatgggttgggggccttgcatcttggttgatcagactacaagctcctcaagccccaggtacaccactgcagaactctccatgttgcactgagcatttcaagtggcagctcctcagaacacattagttaatttgatttccacctggtactgatctcctccttgcagttgattttattttagaaagtaatttgtagtttagagatggcaagcaaaaagcttgtaatgaattaggagtctataggaaacatacatgtattctaaagtaaagcaggtttggctctgtgttcccacccaaatctcatcttgaattgtaattcccacatattgagggagggacccgtgatccccacatgttgagggagggaggtgattgaatcatgggggtggtttcccccatactgttctcatgatagtgagtgagttctcatgagatctggtggtttttataagtgtttcaatagttcctctcttgctcccttctctctcctgctgccttctgaaaaaggtgcttgcttcctcttcaccttctgccacgattgtaagtttcctgaggcctccccagccatgcagaactgtgagtcagttaaacctctttcctttgtaaattacccagtctcagggaagttcttcatagcagtgtgaaaatggactaatacaagcatgtttctgcagcaggttattaactgtcagggttaactttgatatgtgtatttagcaatctgctaagaggcattttgtgtgccaagttattaaccacagtgtcaagttcaataccaaaggagtcttttttatctagtttcctccctgactttatttcaaagcataatcaaagctttattcttcattagatttagtattagctaatttagtttttggcaatttttattctggtttctgttatataccattcataaattgaaatgattgtgccaaaacatgttaagtttatagaatggtaatgtactgttgggtgcattgtcatggcacattatagatggctctggagcaagatttacaagtaacaaatacaagaaagttgtaagtatgaaaaatccgtacttactgtgtttcactcataagaacactgctatccacttttcccatgaccactaccgcctcaattacacaaaattaaaatgatcctactctttgcttcatgtcgcagacacctttgtaattgcattaattcctgcatctgtgaccctcccttttgtaggcaccaatggtatatttgatatatgtccttcccttccacctttcacttatttaaattatggtgtttgtgtgtgttgtaattaatgagcatggctttgggctctgaatctctaattctttttcactcagtgtttatgatatctgtctatgtggctatgtatgaatttggttcattgcttctgactgctacgtagatatccatcttctgaatacaccaaagttttcttatccattttcctaccgatggacaactctttgcttctaaagccagagctacataaggatgcacagcgttgtgtttgcttctttgtggatgtgtgcaagagcttacctcagagcacaggtgaagaaaatgcccaggtttagcagatttttagcacctttaaggcaaaactcagtgccatcagtataatataggacttctggagctttaaaatatatacattttgtataaaaggtgacactcaaaaatgcagctgagagtatcattaattatacactgcagtgtctgaagattctatttttgtagcgtccttttcctttcctcctaatgactgtgcaggtgttggtgaccgccgtacctgctcacctgctgagcccaggttcccagggtgggagccagcccaagttatttgaggagtaggcaaatgtagcatgtcaatttctatttaaagaaattatttcatcacctagtaggtgcttaaatgttttttaatgttactctttttgcttttctttatcccatcgtaaattagagttaacgcaagtctttgctcctgttgtttattgaacttgctgtagaatagcagtgctggaatatgttactctaacaagtaaatactgcgtcatgtaccacaggatattataatttatttttatatatctttatatattcatctttgtgtcagaatctgttggaaaaaaaaaaggtttgtaaccaatgtttgtttgactgatggtgtttggaaaaattttaagtgtagtttattcagaaaccctgaggaaaagatcacacatgcagcccagcccagtgaagttttgagaggggttcttagggtggtgaaaggagaaataatcaaccagtcagaacaattaaattagctggccccagaaaggatctgtgagatggaagactgccctcctatcctgctaactagttgatttacagtacctagcctggcttaccccaggtcatttccccccattcctcaaggacttaagggcctgactcaccccctctctctgcagaacctctctaatacacgtacctgtcactccttccacatccatggctgctgacatccttgacctctcctccactgacctgtcttccttctgatctcagcctcccacctccacagtcatacctctgactcatggcctgcctcactttagattcctaatcactgacctcaaatagccctcaatgctgcttggcatgcatgtgtatttccatggtcattctctctcctgcccttccacatgactgtttcatgccttctcctccctcagtcctccagtgcctccttccctcccttgctcttggctcatgaccttgcttcctacctcactgagaaaatgggcgcactacatgaaaactcccgccagctacaccacttgcatgcatttgtgcccatgtatttgactttttctcctgtcactgcagatggcccacatctgcgccccatgagggacacctccacactcaggggctggattctattctctcacatgtctccagcacaggctccaggagactccctcactctcacttgcattgtctttttccctttctataggatcatcctcatcggtgcataaacatgctgttatttcttctaccctggccttacatttccctctaattactgcctcatttgtctttaaacaaaacttgtgtaaattgttcatgcttactgtctccagttcttcttctttcatattattttgaaccattagtccgccaagacaccacttctgaaggtctctggtgatcagcaccttgctaatgccatggtcctttctcaggcctcaccttacctgactcctctctcctggaaacactgttttcacttgattttcaggtccctacatcacttgcttttcctcctgcctttctgaccactcttctttagtatctcttcctccttccctccctccatgtctcctcccctccatttctctcttcctctctccctttttttgtgtgtgttttgttgtgtgtgcttcttgcccactctctctgatggccagacagtcttgggctctgttcttgggccacccttctgcttttgtctggtctcaacacagcagccacagtggttttgttaataaccttacacatcacttctccatccagaaacctccagcaggttcccatctgatttaaaataaaagtcaatgtcctcactatgacttttgaaaccctatagaatcaggcccatgattatctctctgcccttatcatcaactcctctcaacgttcttgcaatccattccagacacacaggccttcctctgtgttccttgaacagccaggctactgcctcagggcctttacatttgcctttcccctgacccaacatgcttttcccccagaagaaagcctgcccagcttccttccttcaggtctttattgagagtcaccttcccctggctatcctgtctacattttagtcctactaccaaaacttcctcttctttgtttcataaactatgtatgttacttatgaatagtttaattatatgtcttctctaaaaaggtaagctccagctgtgctttagttccaatctacagcacctagagagtgtctggtatgtggtagttgcctactgagcatttgatgaatgaatgcatataagcagacaccttaagaaggatacaatatgtaataccggcataaggacagacttatagaccaatgtaatagaattgagaggccagaaataaactctcacatatagtgttcaacaagggtgtcaagataattgaatgaggaaagaataatcttttcagcacatggtgctgggacaactggatagccatatgcaaacaaatgaaattggatccctaccccacactatatgcaaaaaataactcaaaatagatcaaagacctaagtataagccaagactagaaaactcttaagaagaaacaaggatgtaaatctttgtgattttgaattaaacagtggttcttagatatgacaccaaaagcacaagcaataaaagaaaaagaagataggccaggtgcggtggctcatgcctgtaatcccagcactttgggaggccgaggtgggcatatcatgaggtcaggagatcgagaccatcctggctaacacagtgaaaccccgtctgtactaaaaatacggaaaattagccgggcacagtggcgggtgcctgtagtcccagctacttgggaggctgaggcagaacaatgacgtgaacctgggtggtggagcttgcaagtgagccaagatcacgccactgcactccagcctgggagacagagcgagactccgtctcaaaaaaaaaaaaaaaaagggggaaaagaagataaactgggcttcatcaaaactgaaaccttttgtgcttcgaaggacaccacagaaaggttgcagatatttgcaaatcacatatctgagaaggaacttgtatctagaataattaaagaactattaaaactcacaattaacccaattaaaaaatgggcaaaggatccgaatagacatttctacaaagaagattttttaagtggccagcaagcacatggaaagatatttacatcattagccatcagggaactacagatcaaatccactataagataatactttatactcattagcatagatataaacaaaaaggcaaataataacaacaagatttggtgaggatgtagagcaactgaaacccttgtacactgctggtgggaatgtgaaatggtacagccactgtggaaaatggtttagcagttccactaaatgttaaccatagagttactatgcgatccagcagttccactcctaggtatatacccaagtgaaattaaaacacatgtctgcacaaaaacttgcacattaatattcatagcagcattattcgtgatagcctcaaatggaaacaacccaaatgtccaccaactgatgaatggataaatgaaatgtggtttatttatacaatagaatattattaggcaataaaaagaaatgaactagtaatacatgccacaacatggatgaaacttgaaaacactgtgctaagtgaaggaagcccatcacaaaggaccacatactgtatgattccatttatgtggaatttccagaataactactttaatacagaaagtagactggtggttgcctacgggagataagggattggaaaatgaccattaaggggcataggctttttggagggtgcaaggaaaatgtcctaaaatgtattgtggtgatagttgcacaaactctgagtatactagaaggtattgaattatatactttcattgggagaattctatggtatgtgaatcaataaagtgttgttggtttttttaaaaacaagaatacatttacaagcctagagagtgttctaattcttttagaattgatctacattggtatccaagaagattaaataaataaataagttagaattgttctatggcctattttattagtaactaatctttagcctttgagggtagatttgactttagaatagccaaaaataatttaataccaaatcttgggagtttatcggtagccaaactgcctcatacagttgggagtagaaaaccaacaacagaaagccattttcacttactcactgtgactagatagatatctaagagttccaaaaatcttttgtgactttgcaattccatttccctagagtaagcatagagcctctcaaactcaatgctaagtgaaccacagttatttgaatgtgtaagttcttgggtgttctttaaacttcatttacattactttatagtcttatctaagcgtatttggactcctcagctaaattgcaccttgtgtgcaaaaaaattgtcttgtatttcttttgcaaatcctcctacccaccccctaatccccacccttcatccctaaccaccaccacctagacaaagccataaaaaaggtgatttaaaatcctcattttaaaattgattactgtcacaggtcaggtttcccagcaaccaaactctgagatggagactagtgtgcaggactttcgttagagaaagctcttgagaatcaacacttgaaagggatgggaaaggaagccgattgaacagagggagaagttgggcaacaacgcctcagctgatttcatagggagctctgaagctggaatggccaggttattattttccatcccgatagactagtcggtgggtacagcagcctcaggagacagaggcgagtgtggtcaaggtggctctcttcagctcaggtgtgtcttctagtagcccttgcagcagctgggagaataattccttcagttctgatgggacatctcggcagcatgtcccagcattctctgaagttcccttatactctgagtgttgcctctctcaaggtccaactccttaagcaactgttcctgcaaggatgtgcttagggaccatgattcaaagtaatctcgacattataaacttcagatatgtgctgtgatatactttgaaaatagggagtttcttctaatcagattggcattaactttatgactatgtaaggtatcagtgctgtattataaagcctaagcaacagaaaaaaatgcctggacttggcagatacctaatccatttatagaaattcatctgtgaatggattagaagcttaaggaacttatgaccaaaatgcagtttttcaggactctgccaaagtttgaaggaagtactttttgaactgtaatctgttacattacaaaaagatgacataaatgttctcatcaatattttccagagtgcagggtacctttcttatggctttagttcacgtggacttgaatatcatattcaggaatcttatttcaggtttgtcacttgatttataaaagtgtgtggcaaatgacagttattgacatatgatttccttatcataaccagggaattatctgagacatataattctggcataggtgaaaagctagatatgtaatttttctttttttgagatggaatttcactcttgttgtccaggctggagtgcaatggcaccatctcagctcgctgcaacctccgcctcctgggttcaagcaattctcttgcctcagcgtcccgagtagctgggattacaggtgtccgccaccatgcctggctaatttttgtatttttagtagagatagggtctcactatgttgcccaggctggtctcaaactcctgacctcaggtcttctgcccacctcgccctcccaaagtgctgagattacaggcatgagccactgtgcctggctgatatataatttttcacagccgtcagggctcagatttttcatgctgtaaattatattcatattttttctactttattccagaaaaaaaattcaaatatttttccactttattctaaaaacaatggcagaaactagtagaataaaagtcaactgcttacccatatacctgcagtgaacatttggaatttgaaattaaaaacataataccatttacattagctccaaaaaaatgcagtacttaggtgtaaatctaaaaagaaatgtacaaatatagatgagaaaaactgctaaactctactgacagaaatcaaagaaaatataaataaatggagagatatcccatgtttatggatgggaggattctctattaagatgtcagtttttctcaacttgatgtgtacattgaacacaatctccatcaaaatccaagcaagttattttatgtatattgacagactgattctattgtttatgtggagtggcaaaagacccaaaatagccaacacaatgctgaagaaaaacaaagaggactggcactaaccaacttcgaaacttgctgtaaagctacagtaatgaagacattgtggtattggtgaaagaatagacaaataaataaatggaacaaaacagccccaaaatagatctactattggcaaaggcaattcaatggagaaaggatagtcctttcaacaaagggtgctgtaacaactggacatcacatacaaaaaaaaaaaaaaaaaaaaagaatctagatagggaccttatacctttaacaaaaattaatcccaaatggatcagaaacctaaatgtaaaacacaaaactataaaacttctagaagataagagaaaatctgggtgttctagggtttagtaattaattactttttaaattcagttccaaaagcttgaaagaaataatttataagttaaacttcttcaaaattaaaaagttattctctgcaaaagagaatgaaaaaagccaaaaactgggagaaaatatttgcagaatacgtaaatgataaaggatttgtatccaaaatatacaaaaaaaactcttgaaactcaacaatgagaaaacaacccagccaggcatggtggctcacgcctgtaatcccaacattttgggaggccaaggtgggtggatcacttgaggtcaggagatagagaccatcctggctaacacggtgaaacccagtctctattaaaaatacaaaacttaggcagtcatggcatggtggcgggtacctgtaatctcagctactaaggaggctgaggcaggagaatcacttgaacccgggaggcagaagttgcaatgagccgagatcgcaccactgcgctccagcctgggtgacagaacaagactctgtctccaaaaaaaaaaaaaaaagaaagaaagaaagaaagaaagaaaacaatccataaacaaacaatccaatagctcagtcattgctgtgcaaatgcaaaatggtacagccactttggaggacagtttggcagtttcttagaaaactaagcatacttttaccatatgatttagcagccatgctccttggtatttacccaaatgggttgaaaacttatgtccatacacaaacctgcagatggatgtttatagcagctttattcatgattgtccaaacttcggagcaaccaagatgtccttcggtagatgattggataaaattatgttgtacatctatatgagggaataataatcactgttaagaagaaatgagctatcaagccatgaaaagacatggagggaccttaaatgcctgttcctaagtggaagaagtcagtctgaaaaggctatatactgtatgattccaaatatataacactttagaaaagacaaaactatagagacagtaaaaagatcagtggcagctgggagttgagggggagggaagagatgcaagggaggaagtgtggaatgaataagtgaaccacaggggtttttagggcagtaaaactatcatgtatgatactgtaatggtggatacatgacatgatgtatgtctcagctcaggctgctataacagaataccagaccaagtggcctaaatggcatttatttttcatgcttccggaagttgagaagtccaagattaagatgctggcagatttgattcttaggccttcttgaatcctcatgtggtagacagaggaagctctaggtctgtcttccatttcttatctgggcactatcccatcattgtcgctccatccttatgaccttgtctaaacctaattacctccctagcaccctacttcctaaaaccatcgtgttggaggttagcacttcaaaatgtgaatttgtggggacacagaaattcaagccataacaatgcatttgtgaaaacctgtatagtgaaccctaatgtaaactatgggccttggttgataataaagtatcagtattggtacatcaattgtagcagatgaacaatacaaatgttagaccttaataataggggaaactgggagaatgacaggtatacagcaactctctactttctgtgtagtttttctacaaaactaaaactgctttaaaaataaaatctcaataaaaaatagtagaacttcattagaatttaacatgttctaatatatagatccaatttaagccaaaaaatgagttatttgtacttgtacagaactggaatcagtgtctttcttcttctttcttcccttttctccaatccctcaaccttctcaaatgcttttcattatgaacagaaagtttacaaaaaaagcaaaatgcaaatggcggttaagtgtgtgaataggtgctcaacatcattcagagtaagataggcaagtggaaactaaactgaaacacctattgtcaccttatcagattggcagaaatccaccagagggatatcaccttgggtcgacaaggctgtggaggaccagggagtctcatattcagctgttgattgtacatgcgtgcttaataccatgtacggaacaatttgacagaatctacttatattacaactgtgtatatcctttgaccgagcagttctgtctttgggaatgtattccacaaatatacttgcctgtgcacaaaatgacaaatgttggaggaaatttattgcagcacccttactaataacaaaaatattggaaatagtgtaaatgtccatcactggtcgataaagtatgggtgctgtctaggtactaatatggaaagatctctaatattaggaaatacaaaaaaggaaaatgctgaacagtatttctgtatgctccttttatataaacatggagaaaatattaatatattctgattgtacatgtgggcaggaggcacagtggggcattgggaagatgagggcaggggtaggggtatcactttataccttttttcctaaccatgtgactgtattaccttcaaactatagttcaaaaagatataggtatatacattttttaataataaattcagaatagctaggataaatcgcttttgctgttgttaaaccttaaaaattatttttatctacctatgaatattcatcttccctcgagtgttttcggtatggcaagttctgagttgttaaaattgattgttattgtcactttgtaactgagagggtctccctagtgaaaacctgactttctcaaagaagtagttcaaatttctccttacttttctgacagtagtgtgcctcaagcatatcttaagaacataacaagtaataaaccataaaccagtattttcttcaagaaaatatatcagcggagaacagaaaatgttatctttgaaaaaaatatgcagttataaaaagttgtaactcttttttgttacaaactctctgttcaattgtatgaagttgctctctctcagagcaaagacttgccagttggctttacttctttcatcccctttcttctatatccactgcctctgtacatttttcccacttcccttgctctgacaaagatatcaaaggttacattaaagcaaaacctgagaagcttgagttattgctgataagttcaacaaggagtaaatttaaatgcaatctgagaagtagaagatgggaagcattccttcctgaatccacatgctctgttaggccctaaggcacaataaaatgtgggacatgaaccctgggccccgaagctgatgacagtggaggtcacaaagtgatcacccactctaagaattctacacacagtgatatctatacgtttctctctccgccaggcttcttgtctttactctcatcagtgtttggacagctcctgacagaacaaaggctgggtttggtgttctgtaatcccagctctttgggaggctgtgggaagattgcttgagctcaggagttcaagaccagcctgggcaacatggcaaaaccccgtctctacaaaaaatacaaatattagctgggtatggtggtgcacacctgtagtcccagctactctggaggctgaggtgggaagatcacttgagctcggcaagcagaggttgtagtgagctgagatagtgccactacacagcctgggtgacagagtgagaccccgtctcaaaaacaaaaaatacaaaaaaaaaatgcattgcctgtgttgtaggcaatgatatttctaatgtaaggaaacatggtcatagatttgggagatgtaggtcattttcaggatattcacccttaacctgagaactggtttagcagattttgctgagttgtttttagatggtttgtttggaatcctagtttaattattcattgttttacctgtgattttgggataaatatatatgataaagtaaaagtctttttaaaataaagtttttaattttaagatagttttagattacagaaaagttaacaagctagaactgatagttcccatatacaccatagctagtttcccctacttttaacatctaacactggtatggtacacttgttataattagtgaacaactattaatattattaactaaagttcatgctttattcagatttccttagtttttatctgataagactcatcttgtatatttcctgctgcggtcctagactcagccatttttccaaggagctctggttcctttgttttggacaatggtattagaaaccaagatctgtgtgcatctcttaacttttttttttttttttttttttgaggcaaagtctcactctgtagcccaggctggagtgcagtggtgcaatctcagctcactgcaagctcctcctcccgggttcatgccattttcctgcctcagcccacggagtagctgggactataggcacctgtcaccaggcctggctaattttttgtatttttagtagagatggggtttcaccgtgttagccaggatggtctcgatctcctgacctagtgatccgcccgccttggcctcccagcatctcttaacttttaacctgaatccctctatttaagatggatttcttgcagttaacatagttgagccttgctttttattctaactctgacatatatttaggccacctggagtgtcctgcaccctgccgtcctcgccatgactgtgtcaggtgaccacaggaggtcgattgtgtgttctccttgcactgttgtagagccacccactttcctgtggcccctgcggtaccacatctgccttatagctaacagtttaaggtttacaagtgtgtatttctctattgtgacttaaattctcacttgatacaattaaagtaaatgaagtaagtatatagtagaatgaaatcataatcttaagatatcactttgctttgtaggccttagttagagaatatttctgggcacacagtttttatatgttccttggtttttttacttgtcaagtgatcaaaataattgttgaaaaaacaaagcaagctccaaatcacacataaccctcttacagattttatttcctttcaccatcatcagatctgctctagaaactgctttgtgcatgaaatgtggctctgaatgagaggaaaacaaactttaacacatgtaaattgctttaagctgtataagatgtgttctttggtgacacagggcatgccaaagccttgaaagccagctttctcaccctagggacaaatgacaaccccatcattcagtgtccctcaactacaacaagcctcttgattagcaggtccctacaatggagattatattttaagagagaagagccaatgagacacatgatttaatttgtctgtaaccctttagattattttcttgcattaatttggtctaattgatatttcccccaatcaccttttctattaaatgatgaaatagagaaggatccgggtgcagtgactcatacctgtaatcccagcactttgggaggccgaggcaggtggatcacttgaggtcaggagttcgagacccgcctggccaacatggtgaaacccgtctctactaaaaatacaaaaaaattagccaggcgtggtggtgcatgcctgtaatcccagctactcaggaggctgaggcaggagaatcgttggaacctggaaggtggaggttgcagtgagccgagactgtgccattgcactccagcctgggcaacaagagtgaaactccgtcaaaaaaaaaaaaaaaaaaaaaaggaaggaaggaagtaaaatacttttcatgctttcatactgagcagttctccctctctcattgttttgactcttctaacatattcccttttttccctgtatacttcttttagattccagctattaatatttattgagactcagaaaccaatacccccaaatactgcactttgacatgctgaactgaaaagggagcctcaaggtctccctgatctcccccatactgtctctcccaaagcattagattctctaaagttcccttgtctgcctaaagtccagacctaccaaagaagaaaacaattaactgctggtcacttccctgagttctcattaactgaatccatatcacatcttttctcctgttaatctgctttttgtgagttgttttttcagcaaagcttcaagggtttgctgtacatcttttaagaccaactccttgttcactcgactgatcttggaaagtcacccatgcaggcagcccagaggcctaggccttttgtgatattagtggttccctgtcattccctgtgtggatcctcagcacactaggaatggagcttggttggagtggagcaaggtgagctgggtcatagacacagccctgccctgaagacgtcttctcagggtgaccaccagggcatagggcctgaagacactgccagagaattccttttaaactccagagaagagtcctagtcattatgttattgaggcacacattttgtgatgctttctcatcttttaacaaattcatatgagttaattaactgattaaatagagttttcagtctttctatacaatctataccaaaggatggcaaaccccagccaaaggaccaaatcctcctgccgcctattattaaagttgtattggcacccagctgcacccatttgtttatatattctgcttttcatgttgcaaggaatggcagagttgagtaattgtgacagagactgtgtggctaaaatatttattccgtggccttttaagaagtttgctgaccctgttggagattaagaatcttttgtgttagaaactgcattgaatctatagatcactttgggtgatatacacgttttaacaatattaagtgttctaatacagcacatgaacacagaatgtcttttcatttatttgtgtcttattcaatttcttgtggcaatgttttgtggtctcagtgtacacgcttttcatctccttggttacatttatccctaagtattttagtatttttattctttttgatgctattgtaaaaatgattgagttctcaatttccttttcaaattgttcattgttagtatatagaaatgtaactgatttttgtgtgttgattttgtattctacaattctgctgagttcatttattagttctaatgggtgtgtgtgtgtgtatgtgtgtagaattagggttgtctacatttaaaataatgtaatccacaaacagatataattttactactttccaatttggataccttttatttatttttatttatttattttcttaattgctctggcaattaagaaagtactggacttccagtactttgttgacaggaagtggcaagactaagcattcctcgccatgttcctgatcttagagggaaagctttcagttttccatcatttggtatgacgttagctctaggctttttcatatataacctttagtatgttaaggtaatttctttttactcctactttgttgagtgtttttatcatgaaagggtattgaattttgtcgtatactttttttgcatcaattgaaataatgtggtttgtctttcattctgttagtgtggtgtattatgttgattggtttacatatgttgttccatccttgtagttcaagaataaatcccacttggtcatgctgcgtaatttttttaatgtgttgttgaatttggtttgctagtattttgttaaggaatttgcatcaatattgattagggatattggactatagttttcttttttaaattatgtctttggttttggtatcacagtgatattgacctcataagatgagtctggaagtattcccttcttgtcagtattttggaagaattcgaggtgtattggtggtaattcttctttaaatgtttggtggaattcacccatgaagctctctggtcctgggcttttctttgttggtaggttttttattactgattcaatctccttactagtatagttctgttcagattttttttcttcatgattcagttttggtaggttgcatgtttctaggaattcatttatttctagtttatccagtttattggtgtataattgttcttagtagtctattttatttctgtggcatcgattgtaatgtttcttcttacatttctgatttttggtatatgagtcttttcttcattagtctagctaaggatttgttaattttgttgatcttttcgaaagaccaactcttacttttgttgatttttttttttgctgttgtttttctagtctgtttatttttgttctcatctttattatttcctttcttctgctaactttagtttgttctttttgtagtttcttgaggttaaagtcaagttattgacttgagatctttcttttttttataatgtaagcatttaccactataaacttctctcttagtactgtcgttgctatgtcccataagttttggtatgttgtggttttgttttcatttgcttcaagatattttctaatttcctttgtgatgtcttttttgactcattggttgttcaagaatgttaatttccacaatttgtgaattttccactttccttttgcttttgatttctagttccattccattttggtcagaaattatacttggtatgatttcagtcttcttgaatttgttacggcttgttttgtggccttaggtatgatctgtactggagaatcttttatatgtacttgagaagaatgtttattctgttattactgggtagagtgttctgtatatatctattaagttaaattggtctgtgatgttaagtcctctgtttccttattgatcttatgtctgattgttttatccattattgaagtgcagtattgaaatctcctactattacggtattagtgttcatttctcccttcaattccatcaatatttgtttcatatatttggttactctgatgttagatgcatatacaattataattgttatatctttctatataatttggccctttcgtttttacataatatcctcatttgtctcttataacagtttgttaattaaagtctattttgtctgatgtaagtatggtcattctggctctctttttgttgccattttcatggtaaatgaaaatgagcatttttcctcattctttcactttcattgtatgtatgtctttacatctgcaggtaattggatcttcttcttgttggttttttttaaaatccattcagccactctatgtcttttgatcagggagtttaacccatttacacttaaagtaattactgatagagcaggcttacaattgccgttttgttcattgctttcagtatgtcttgtaattattttgctgcactttttctgtcttgctgccttcctttgtattttgttgatttttttttgtaggaacttgctttgattcctttctcattttcttttttgtgtttttttacaggtattttctttgtagttatcatggggattacataaaatatcttatagtttaaactgataaaaacttcagtagcatgcaaaaaaatcttcttgtttacattttcccctcaccacttttattatcaatgtcacaaataactatttcttttttgagacagggtctcactctgtcactcaggctggaatggagcggcacaatcacaggtcactgcaaccacaacttccctgggctcaggtgatcctcccaccccagcctcccgagtagcttgaactataggcatgggccaccatgcctggctaaattctgtattttttttgtgagacagggttttaccatgttgcccaggctggtttcaaactcctggggctcaatgattcacccacctgggcctctcaaagtgctggaattataggcatagtacccagccacaaattacattttttgatccattggtattcttttgtagttagttttatgtttttatctttaaagtgtatactagaattaaaagtgatttatataccaccattgcattattaaaggattttttatttgtctatatatttacctttaccagagagtttattttttcttatgctgttgtgttgctatctagtgtccttgagcttctgcttgaaggaatgcctgtagcattatgtgtaaggcagttgtagtagtgatgaaatccctcaggttttgcttatctgaaaggtctttatttctctcctacatttttgaaggatgatttttccaggtatacaattcttggttgggagttttttctttcagtactttgaatatatcatcttgttctcttctggcccccaatcttcttgctgagaaatctgctgataatctgggaattcccttgtacatgataaattacttttctcttgctgctttcaagatactctctttgtctttgattttgacagtttgattataatgtgtcttggtgtaggcctctttgggctcatcttagtcacctttcagcttcttgaatttggatttacatttcttcagatttggtaagtttccagctattatttcctcaaattaagttctgttcccatttctttctgtctcttctcctctggaactcttataatacataattggtccaattgatgctgtttcattaagctttcttcacttttcttcttttgttgtttttgctcctgtgactcaataatttccaatgacctatctttgagttcactgattctttttttctgcttgttcaaatctgctgttgaacctcattagtgaattttttttttttttaagacagagtttcactcttgttgcccaggctggattgcagtggcaccatctcggctcactgcaacctctgcctcctggattcaagcaattctcctgcatcagcttcccaagtagctgggattacaggtggctgccaccacgcccagctaaattttttgtatttttagcagagacggggtttcaccatgttggtcaggcttgtcttgaactcctaacctcaggtgatccacctgcctcagccttccaaaatagtgggattacaggcgtgagccaccagtgcctggctgaatttttttttttttaatacagacaaggccctgccatgtcagcaggctggagtgtggtggtgtgataatagctcactccagcctcaaattcctggtttcaagcaatcctacagcctcagtctcccaagtagctgggacatcaggcatgtggcaccacacccagctaagttttttattttttatttttatttttgtagagataaggtcttgctatgttacttgggccagtctcaaatcctggtctcaaatgatcctccaccttggcctcccaaagtgctgagattacaagtgtgagccatcatacctaggtgtgacttgttaattcagttattcttcagctccagaatttctgttgggttcttttttacagtttctatttgattgctgatatattctctttctgttcatgcattgttttcctcattttatttagttgcctgtgacctcttatagctcactgagctttttaaagacagttatttgaattctctgtcaggcaattcacagatcttcatttcttttgggtcagcttctgaagaattattgtgtttctttgcttgggccatttttccttgtttttttttgtttttttttttcagatgcccttttgttttttgctggcatttgggcatctgaaaaacagccatctctctgtcattacagactagctttatacaaggaaggccttcaccaatcagcccagttagagaatcagagagtctctcaaatcttttctggtagtgtgtcttctctgggattatgcatctaatttcccgattaaaaaggcttgccagcttcttttttaggagattgtaatttctttctgcctctggtatctgtctgccgtactgcaagttctctggtgctgctacaagctgacaagctcttaattattctcagcactccctaggcatttaaagtatatcctttaagttcacatgccctctaatttagaaaaggcagaaactagtccctcaggcggtcctctgaaaagacagaaagttagatgtatacattctactttctctttccctctcaaggtggcatgagaaaggtccctatgaccccagcttctctgatggctgttctttattcactttggtgcagactccctggctcagtcctttcctttgtggggtcaaatctgacattgggccttctttgaggctcctttgagagtacctgcctttaccttggtactatcctcagaagttctggcaacttctcttattttccagtgttgtttcttttagaatacatctttctgtcatttcaggggacctttgggaggtagaagaagtagatgtacatgcttggtctgccatcttaaaatgaaaatccctgaggttgttttcttaagagcctaattccataacatttttttcaatctctgctccattaatcatttttattaatttgcatttggcatgtaatttgtctagtaatcagcagaggatacctttttcagggcactccttttgttcagtcgtggctgccatctgaatggagacaggtaactctgcatacataccattgtaggaatcagatctgcttttcagaattctaagaattcaactctaatttgcattttctgtttcattagagacagggttggggacatattactacaaaacacagctactactatggatcatatcataagttttctagtttttgcaaaataaaatggttctgctggctctccttgcagctggcatgagagtcctagggtttgacaaccctgcagtgaccaaaggtgagcaatgtgctaatagcagagcgggcagtactttactgctggcactggaaaacatttagcttctgagtgctaattttctctggtcctgttactttttttccctttcccaactcagacaccctataatcactttttaaggcatatttttgtggggagccaacttctttgtatttgctagttttaaaattctgcccgtctcctcaccctaccctccccccaccttcactgttcttctcctttactttgtttaggatataattttgtgagttttactgtaaaagaagattgttgatgaagaatcacaattctggtgcataaaatgtcttcttttttcatagacaggctccttccacccctctgttcattttgagtgtttttcttcaaatatgaatagattcctattttatcttattttcttttatttaaacaagaaaaaatgatgaaaatgctttttgtggttttttttctttctcagattagttagcataaagcagttcccagccttgaaacagagtggctgtatggaaaatgtaaataatatccaaaaaattgaccttttgaaacacgaggctataaatgttatttaggcttccaggctacaacacaaaagcttccttaatgatgcttaacttgaattctggatcctgggtaagagaaaccctaagaaagttggggtagaggtggggaaggtctaatatatcctttcctgaccatagagacaatattggctcctttctgcttctctttacacctcttccttgaagcaggtcccctgctgttgaagctgattctatctctgctgtgttgtcttcccacctcactcacaagtattcattgttatttgcctaggggtaggggtaggggtggaggatagcaagaaataacttgctagcaacagctaattaaagtaattaaccaatatctgtgaatggttgatgctccttaaccttcccactgatgctttcacttttaatagaaaatgtgtattaaagcaaataaacctataattggtgaaatttctggtagtttggcaaagtggggagaaaatcagtatgacagattagagaaggttaggaagtagttgatgaaggcttccatctgagcactctggccctgcataagtactttccacatatttgcagaatgaatgaatacaaagtgatcactttgcccagcttttttttttttttttctgagatggagtctcgctctgtcacccaggctggagtgcagtggcacgatctcagctcactgaaacctccgccttccaagtgcaagcaattcccctgcctcaacctcccaagtagctgggattacagatgtctgccaccatgcctggctaatttttgtatttctagtggagatggggtttccccaagttgtccaggctggtcttgaactcctgacctcaagtgatccacccacctcagcctctcaaagtgctgggattacaggcgtgagccactgcacccagcccactttgcccagcttcttatattcttggacttcagtttaaaaagccacattctctgaactgcagattgtctggctttgtctgtttactgggcaaatgagcaatcaggacgaggtgagtttaggagcgtggcagggcatatgtaattcatttataggaatccctgtgttcttttttatataagtttttcccccatataaaagtaattcatgtccattaaagagtaaagatagactgcctatagtgccaccatctaaagaaaaccattgtgaagatgctatattttttggaaaataaactgtagagaattactcataaaagcatgttgctatgcaaatgtttaaaatggcatcctgttttgattaatattgtctaatcaataccaacttttttcaattcatgagaattttgtgaacagttcgcatggaaaccacagcagcaaaatctgggcagccttgttctgttacctacttgttctgttacctgttagccagtcctggttcccaaacgagagtttacaccttccagatgccttacatccaagggaagcatgtccttcctcagcaggatattttgtttttttcattcctgccaaggctctgaggaagaggaaatgggtacagatttattaggagagatggaaaggggccatgactttgtcatgtcatgtagggctctggcaacttaagcccacacagactctgaaatacatggaagatttatttttatctactaatttgtgtacttcttgtctgatatttccactgaagagattgtcttgtataaaattatatctcagtactctaatggaatgaaataacagtacagcatagccttttctgaattattcatgtattctttggagattatatccaggtttttattaattcagttagttcagaatttcaacatagggtatcatctggtccatgctgtattatctacttgttttcctactctagacccttaatcagtatcttccagtgtcatctttggtcatggcagtcacatttacatgaaggctgtctgtccctggtctattctttgtctcttgttaataccagccactgcttagcctgtcctggggttctgctggttttcaagtcttctgattaaattattgcttgttctggcatcatgctgatttccttcactatttcatgcttctcccaggagatatctgcttgttatttatccctcatttctccttttggaaatatcacagtaagaaattcatttaatttttttcaactgtcctttttctgtcaataattcaatgcaacatttcttaaaggctgttccatctctctcattgattttcttaatgccttttaattatttcttttaaaattcacaacttttaatatttagtaactcatgctgtcaccacagaggcagctttatcctttgatcacttagatttctgtgggtgttgattctggatcacaagatgatctggattcggagaagtatcagtaggttgagcctatacatctgaacagcgggattaccaagggaagcaataccattggcttaattatacatctcatatcattatgttatagaggacttctttatgatgcttgtgtgagaaggaaaaataatagccaggttttaagttttccatattataatgtctgtgtacttaccatatatggagtcagcagcataaagttacaatcattgaattaatctttatttattatcacatcataaaagaaaatgcaccaaatgctatgggattagaggattcatgacaccttatttttaagatacatgtacgtttcatgtaactcaaactgaagtgcagcacagggacattgggcagagagtggagtgacaacaaatattgtatactaagatgcgtttctagaaaagagtttgtggaagacttcagaataagccatttttctataaaacattgagggtacccttacggtatcagtttacaggaatacctggttttaaaaagaataaagttggctgggtgtggtcgctcaacacctgtaatcccggcactttgggaggccaaggtgggtggatcacctgaggtcaggagtttgagaccagtctgaccaacatggtgaaacccccgtctctactaaaaaatacaaaaaaaattagttaggtgtgatggtgcactcgggaggctgaggcaggagaatcacttgaaactgggaggcagaggttacagtgagccaagatcgtgccactgcactcctctagcctgggcaacagaatgaaactcggtctcaaaaaaaaaaaaaaaaaaaaaaaaaaaaaaaaagaattaagcaaagtcagtaattactgaatgtaccacaacagggtggactcactcagtacaactcatgggcctgcttggtctttgatacttcacaggccaatacttagaaattacccaagattaatataaataatcctagattgcttagatatcaatttatttccttgcatatatggtctgatgtatcacatcaacatgtactctttcttgttttcagcacgcactcctggctttaaagtttatacttgcatttgccatacctgataagccacggcatatccagatgaaactagccagactggaatttgagtctttggaggcactcaagcagcaggtgagagcagctgtcctgaaaatgtatgtattgctttagcaaatgacaggaaaaataattcagaagaatcagtctcagcatttttttcagccttgaagttaccagtttaaatgaatacagaggactccagttcaggatgacataacaaaaccaaaatcctaacaatatgagcaacaaataggtttaaataactaaactaaagaaacaaaaatattcaggcaatgttaaataaagaatagagctagcattcagcaaaagaacaagacagacatctaagaatcaacctggggcagctccccacagcttccagttttgccatctactgaaacattaagtgaggagaagtgaatgaataaaatcctgaataatagctttcagagagcgagacagaatgagatcaggtgtgtagaagcagcaaaattgccctgaaaggagaaactgtgcctcagtgacttccacattctaccagagactacaaaaaaaaaaaaaaaaagccatgctggagttgaccattttggtgattttctgcttgtaggagagtgggagtagacagaagatccctagacacctggagtatctctcacttgttatctttagtgctgcataggaatttaagaaatgagagaatcagtaaggcattgccatctgaggggacaagctctgggcagaacctcctggacacatactccttctttggcctccaaaccactatgcatagaaatatttcttcttacatttggggagtggggagaaaaaaagaacgtgaagaggacccacctaagatgaccctttgatcaaagcctgagggctccaagggtagtgcgccggacaggagaaccccacatcaaaccaatacttgccctgatgaggcagggtgactccagaagaggacttgtgataagaatgtggaaaagaggatgaacccaggcccactagccatagctgtgctcatgtttgccacacagtaggtgacaagactaagttacctgcattcctagaggttgggcaagttcacttttggcatgtgggctagccagtgtgtctatatggtaaaccggaacccagcatcatgcccaataatgaaactccagagcattcccagcaatggcagaaaatccatcatcatcactgacagctagcattcttctagaggtactaaccaaagcagttgtataagaggaagagataagttcaagtagaagaggcaagattatcattacttgaaaatcagaggattaggctgggtgcagtggctcacacctgtaatcccagcactttgggaggctgaggtgggtagatcccttgagcccaggagtttaagaccaacctgggcaacgtggtgaaatcccgtctctacaaaaaatacaaaaattagccaggcatggtggtgcacgcttgtagtaacagctacttgggaggctgagctgggagaattgcttgagcctagaaggtcaaggctgtaatgagccatgatcatgccactgcactcccgcctgggtaacagagtgagaccttgtctcaaaaaaaaaaaaagaaaagaaaattagaggattatatagctaaaaataaattattaaaaataaaaaaatttggtaaggaagcaagttacaaagtttatctaaaatcgtgtttcttttcacaagaaataatcagtttgaaaatatttttgatgaaaaattcacatttacagaagaaaccaaaatgtaaaaacttaggtggtaatttatggaaacaatatagataacttatagaacaattttttttaaactttactgggatcaaaagattcaatcttgtaaatatccaataccaattcaaatatatcaaaataaacatctgagaatagcaaggaaacttctgataaagaagaaaaatggggactctcactcttgtcagatattaaaatgtattctgaatagtacaataattataattaaatacattttaaattagggaagaaatggaaaaatcagtggaatagagagcattgagtccataaatgggcccaaataaaactggggatttcatttatggtaaaagtgatattttatgtcaatggaaaaaagaaggattatttgttacacagtttgatggcaaacagctgtttgggaaaattattatactttattttaactcattccttatgaacctccccaccaccacaaaattcaaggttgacagatttaaatgtaaaaaatgtaaaccataagaagtctattaaaagtctgggtgtatcttttagtgggaaatgccttcctaatcaagacacaaaacccaaaaatcattaaaaaaaaaaagataaagtaaaatacatgaaaaatgaaaacttctgtatgacaaaaaataagcaaactcaaaagataaattggacaaactggaaaaatattttcgtatataacaaagtcaatatctttaattcaaaaaataatttccacaaatctataaaaaatgacagtccagtaatgaaaggaaagcatatgaagagatgctcaacctcattcaaaatgaaagaaatataaatttaaacaccagtgaaataccacatttcgcatgttctattggattatgtcatgatagcctgtcctcactggatttgggaaatggacattcttttatatataactgacagaagtgtaaattggttcagtcttcctcgaattgcagttgaatttaatttcaattactctccaacaccaaacaaaccttactagggtaatggttgtatctgaaaagagtaccaaaatttagtcattgaaacatttttattagcaaaaatctggagataactaaattcctcaataggagaatggttaagtaaattattgtatatctatacaataaaattccagtaacctgcttttttaaaaaagatctgtctatgcttatgcatgcacatacacactgcctacatttttgcagctattgaatttatgactaaaagattttaggtgtcagtttaaaaatgcgtgagagggcataaagcatctaaaaactttatgaggtatgtaagaaaaaaagctgaatgtacagccttgtctctggaagagttttagttaatcagatttctccattgattgcatttctggtgacattttgtagatgggggcaggcaacttcctggctggtgcatacatatcttaactccaggtctaggaagaatcatgcttcatgttactcaggatttcgtggtatatctatacagtaaattttatggtctgtatataccataaaattccatgaatttgcttttttaaaaaagatattttgaaaaaatcactcaggatttcatgttactacttgtttgtctaaaaaggaaaggattcttcttgagagaatgaaattatacctcattccctatgaacctccctcaccaccaccaaattcaacatattattagtatgtctcatgttactaaatacatttacctaaaactccaaatgcaggagtgttatatttgccattgagggtgtcatggatatgtgtttactatggatatggctaaatgacctctcaagtcatcttagctcttagattcccatatcttcaggtacactttacctgacagtgaggcaaagctctaattccaaatttatttatgctcatcttctttgagaaatgaaacactgaccaaaatcctctctcatacaagttgagtatcctttatccaaagtgcttaggaccagaagtgttttagattttggattttttttttcagatttttgaatagttgcattgtatttactgctgagccttcctaatgggaaaatctgaaatctgaaatgcttcaatgacttttttttttttttttttttttgcattcacaaagtttcaggattttggggtatttcagattttcagattagggatgctcaacctgtattacttaaaaagaagaagaaaaatctaaaatatgttatgtctctttgagatttttttcccctgaggacatagatctgattctctggttaaaaccaccttgtaagaaaaggtgattctgaagggacagatgtctaacaggttccattcagtatacttattgaatgctttctaatagaacgttcatagcttgccctgaaggtgatttttaaatttgtacatgtgcagctctaatgtctctgatccatcaagtgggcagacagcaatgatgagtgttgtcaggctctcttagggccttgcaaacccagaagaagtattctccctccctgtctccactaaatttttttcttttaattatcaatctgagaattaaaggttcagggttggctgggtgtggtggttcacgcctgtaatcccagcactttgggagaccaaggtgggtggatcagttgaggtcaggagttcgagaccagcccagccaacatggtgaaaccctgtctctactaaaaatacaaaaattagctgggtatggtggcacacacctgtaatcccagctactcgggaggctgaggcacgagaatcgcttgaatctcgaaggtggaggttgcagtgagccaagatcacgcctctgcactccaggctgagtgacagagtgagactctgtctcaaaaaaaaaaaggttcagggtaaaagttggaccaaagatatcgtatgtaacaaccgcctctcactctcttttgctgactcaaggctttgctgcatggttgacactgctacatgggccacccaagtttatgccaccaaccaggagagacaaacattttcatcacaattcctgtttagtctcactgcccaggaggtcctataaggtacaaaaggttacctccttttcagaaactcaaaaaattaactggccatgacttcagttcacttgctgaactagtgccatttctaggatggagaatagatttctcatttttctttaatctgacatttaactatctgctttgtaactatgagtagcctcaactcactgggctcctcccacgtaacaaaagcagagagagcttctgtcaggtaacctggtcagtttgtgggaccagatcagaaattgagttattgaaaacatatttgggtgaagtctcactattaagtgaccagatattgatagtaagcttatcagtagaaattattacttatggatagttattatgtttaatttataccttaattgctacttttcaactcaagtctcattttatgggcaaaatatgattgagaaatttgacagtccttaaatagggttgtgcattttacatgtaaacccttgtgaaaaacacatgtacttagaccctatgccctgaagattcttcttccctaaatcgaaggtggcgcccagggacttacattttttttaaaatgctcctgtgtctccaccccacttttatcaatccccaccccccagcaaaaatagattcccaagcatggccaggtgagtgccaagaacaagcaagtttgaggccaccttgtgccacctgtggacaagtcaggtggcctcttcgcacctcagttttttatttttatatatttttttttcataaaatgaaagactggattccccagtctatgggaaggcccaagaaatctcctttttaaaccagcacatcaagtgattctaattcagggtccttggatcccatttggagacatgctctgtggattcagttattcttctcagcttgtgacaggaggagtggtggtggattgctgaaatgaatgtgggaaggaaatgtactgaaaacagatcttttttggtacaaataggaagctatgtgtgtttctaaatatataggcaaattagacatacttgaaggtgggaggcaaactgaggaaaataaaatagtttactttgcatagggcattttcaaatgattaggctttatttggctgaaacctttacaaagaattgtagacagtaaatatcatcctagtgatgcccttttatttctcttcaaattgatttattcatctctcagtcattttaagatccaattaaaaatagaaaggattctaatgcaggaaccatttgataactccgtggcctggagcacaaggacaacatccacttaacctgcttctgggcagtcagccctcctgggagcccagaacacacacagaagccagggagcagggctggctgcctagagcctttgagaaagaaaacagcctcaggaatcagttaaatgaacaagagaaggactttaaggagacactactaattatagctctcaggggcctcaaattaggtgtaggacccttaactagacaggccaactgggccaggccttatcaaataatgtctttgttttttagagttaagtgtatttaaattaatttatgttaatggaaaaaccaaactctgtaagatatttaaagaggtttattctaagccaatatgagtgaccatagtcccagggaacagtctcgaggtcctgagaaagtgcccaaggcagtcacgttacagtttggtttcattatgcattttagggagacagaagttacagagaaagacataaataaatacatgtgaggtatacattgatgcgatgtgaaaggtgtggaggcgggggagggatgggcttacaggtcataggtggattcaaattggcaattggttgaaagagtcaagctttgtctaaagacctggaggcagtagaaggaaatgcctgagttaagataaaggggtttgtggaagccaaggttcttgttgggtagatggtagcacccttcagaggggatacatggtaaatgtttcttcagaccttaagaggtatcagactcttggttcatctctcctagatccaggaaaggactggctgtattaatggatattctctacagacgcagatttcccccacaagagatagtattgtggaaccatttcaaaatacgtcaaagaaatatattgtggggtaaaatatttgatttcctttggggtctgctatctgtcatgtgatgctgtactgcagccaggttgcaatttgttatcttactgccacaaagggtctgttttgacagtctaatgatctctattttaatgttaatgctggtggtagtcatttgtacctaaactccaaaagggagaatgtataatgaggcctgccaacctccctgtcatggctgagaattcagctttccaggattctctgaggtccctttggcccaggggagggggtccgttctgttagttgagcagcttaggattttatttttggtttatatttaagtattcagtgttaaattaggttaaatattaacctaatttaataggtttttttcaacatttcgtaagaacttctgaacttcttccccccgctccatttgtgctctcaagttaaggtaaatagaggctgggcacagtggctcatgtctgtaatcctagcactttaggagaccaaggcagacagatagcttgagaccagcctgggcaacatggcaagacctcatctctatttaaaaaaaaaaaaaaaaaaaaagttacagtaaatacataagcatttttaatggaaactgtaaaattttacagcctagaattaaggtgctaaagtatttgactattgaataggtaatcacatattaatctgctaacatctagttcagaatgaaatgttaaatccaaatacagaattagcctctaacaaagccaatagccacagtccttaggaaggggtggtctacttcctggggccccaagtcaggtctaggcccagtaaaaagtaccaaagtttatggtatatctatcatttgggtggcctgtctgagcctgcctctccctttcttctttcactggaaggtttgtcttccagccctgtcaccacccaaagggttcatttcgcccgctgcccagatagagccaatttatcaagacaggagaattgcactagagaactagtttaattcatgcagagcaggttgaacatgagagcagttttattattactcaaatcagtctccccaaaaattcagactagagtttttcaaggatagtttggtgggtagggggccagggaatggggagtaccgactaattggatcagaggtgaaatcacagtgagtcaaagctgtcttcttcagctgagtcagttcctgggtgagggccacaggactggttggtgaatctggtggagccatcagtcctcagaaatgcaaaaactggaaaagagattttaaaagaccgatcttagattctacatgttatctgcaggagtaactggggaagttgcaagtcttgtggctaatttgttagttttataaaggtggtctggctcccaggcaagaaaggagtttgtttcaggaaaggactgttaatcatctttgtttcaaagttaaactataaactaagtttcttccaaagttagttcggcctttgcctaggaatgagcaagggcagctagcttagaggttggaagcaagatggagttggttagatcagatccctttcagtgtcataactttctcactgcaacgatttttgcaaaggaggtttcagccctgtgtagctgcagagaagtgacttgaccttcctgtattagagtccccccaacactcaaatggggcaaagtcagaatgaggctggaatgaggcaatgtgagtaagacccattatggagcagtgtgttgggggaatgaggatgatgagggaggaggaggaccaactcatgcatttgctgggtgaacccagcaaggaattctaggataaaatggtaccgtaacatcagatttgcctggagagtcagaattctacctttgtggcaatcccacctattttcatgacctaacacagctgggctgtaataacaatgaggtagtaacagctgacatgtagtgtgtgagaacatgagccaggcactgttctaaaccttttgcatgtgccagtgtctcttcagaacagctctccacggtagggtctgttagccatttgcaggtaattttttgcacagtaaatttctctccaattgataaaatgataacctcctttaaagatgattaatgcacaaataaatactggctcctttgcaccttttgggtctagcaagattcccaagcactcctactttgtaactctgaccacaagtatacctgccctctgcagtcagcttcacagaccccacctcctggagaaagccttcttcccattgtgtaacaggagcctggtgcccatttctgttcatttgccccactatagtttgttctgtttcagtctcccttgtgagctgcgaggtccccgagggccaggtgatgactcactcactgctgagtcccctcacccagcatagggcctggcgcccaatagactctgaataaatatccacttaatcaaactgagtttgttgactcacatgtaattcacaagccaatatattaaataaataaggacaaatgatgtccttggacaaaaaaaagagtcttaaaatagatactctggcagaaatggaaacaggtcatgtgcctttctgggatcactggggaagagaatgcattctgaagaattgtatgtggacactttagaaggaccacataccttgccttgataaagctcaaatccttttttttttttttccaaaaaaaatctgactgtgattgacatcagtaacaagagtagctccccaagattgtaaaataaccccaaatcacgcaagaaagaattctaaaatagtttgtactttgcacttgtacttgttagctagaaaactaattcaggctctggagcaatcctccttttatcactgatgggtagactttttcctcctgtattttatgttttcactagagaaaaatttctttaaagtgcacagaggcatccagacagtaaaataaaactacagctcttctgatcgttgtcttcctcagtaaacaatgtatgtaagtgactacttatctcattggtttgctaagcaaactgtaaaatttatatatcttaatattccccgtagatgtgagaaacatggccaaatcataggcagatttattttttcttatgaaaactactgaataggctgtgaaatggaataaaatttaccatttttcaagtcaccccattgatagattggaagcaatgtggtaagagggggcctggaggcacaggtccattccacagagaaaggccttggggccactatgctgtagaagtgatggctgtgtgcttgggaccattttcacagatgtcattcaaatgtatttgcattggtaaagaaaaaacttgcctcataataaattctagagatatcagaatgcttaaaactatatttaaaaacaacaaaaaagggtgggcgcggtggctaacacctgtaatcccagcactttgggaggctgaggcaggcggaccacaaggtcaggagtttgagaccagcctgaccaacatggtgaaaccccgtctctactgaaaatacaaaaattagccgggcatggtggcatgcacctgtaatcccagctactcaggaggctgaggcaggagagtcgcttgaacccgtgaggcagaggttgcaatgagctgagatctcaccactgcactccagcctgggcgacagagcgagactccatctcaaaaaacaacaatagcaacaacaacaaaaaagatgtattcttttttaaagttagagttccaatctcatattctgtattagattaataattgcattgccatgatggtcaacatatgggagagcagctcttcttttgcaggtaaatgcctaggattggcttatgtatccatttatttactttttattaaatattttaggaaattaaaagattatactgttagatgaaaaagttatgaagagggaggtagagattttatgttacacgtattttaccacaataaaaaaacttttttttttggagacatggtcttactccgtcactcaggctggagtgcagtggcacgatcacagctcactacagccttgaccttccaggctcaaacaatcctgcttcctcagcctaccaagtagctggaactaccagtgttagccaccacacctctctaatattttgtatttttctgtatatttatagtagagacagggtcttgccatgttgcccaggctggtttcgaactcctgggctcaagtgatctgcccacctgggcctcctaaagtgctgggattacaggtatgagccaccatgcccagttcttttcttttctttattttttgagacaggatgtcactttgtcacccaggctggaatgcagtggaatgcatgctcactgcagcctcgacctcccaggctcaaatgatcttcctgcctcagtcccccaagtagctaggactataggtgtgcaccaccatgcccagctaattattatttttattttttgtagaaacaaagtttcaccatgttccccaggctggtctagatcttctgagctcaagcaattcacccacattggccttccaaagtgctgggattacaagtgtgagccaccgctcccagccctggccagttcttttcttgagacagtcttgctctgtcatctaccctggagtgtggtggcgcaatctgggttccctgcaacttccacctcctgggttcaagcaattctcccacctcagcctcccgagtagctgggactacaggtgtgtgcctccatgcccagctaatttttgtatttttagtagagacagggtttcgccatgttggccaggctggtctcaaactcttgacctcaagtgatgcatccattttggcctcccaaagtgctgggattacaggtgtgagccaccgtgcttggcccctggccaattctttttaaaagattatactgttggcatcatcgaatttaaagatactggtctatgactaccagacaagaagctttttggaagcaggattactccagaaatgtagatttataatcgttgaatgaaatagtcattaattaagtgaacatcattaaggtcaaagccccatccctttgtgccttttttcaactattaagtgctaatcctttgactttgaaattatcctgtgtgtgttatagttgggtattagattcaggaaaccattattaaatatttaatatactttcctacaccaaaagtgtaggaaaccacacttaaaaaaaaactttgtttttaattactagtaaactgctaaaataggaaattttttgtttactgtaacaaacagtattcctttcctttcctttctttttccttttctttttctttgtctttttcctttgcttttgctttttgtttttgtttttctttttcttttttgagacagggtctggctctgttgcccaggctggagtacagtagcatgttcacagctcactgcaacctgcaacctgcacctcctgggctcaagctatcctcacacctcagcctcctgagtatctgggactacaggtgtgcgccaccatgaagggctaatttttgtattttttgtagagacagggtttcatcatgttgcccaggctggtctcaaactcctgggctcaagcaatccaccctcctcagcctctcaaagtgttgggattactggcgtgagccactgtgcccagcatattttttacttgatttccaatgctataggatctcaagaatatgactgaatattatattatgtaataaacatagagaaactgggctgaaatatattagtgattgataggctaggaaatttagacttttaaagtaaagccctaagaacaacatgtttgctcatttgtttctttctcttaagaatagaatgtagaaaacaagaaatgtttggatttaagaactcttttaaatactacctaaaggaaaataatcacttcataaagaaataatgcttatgagaacataaatagtaatatagtgaacccatatgtaactcaaaatgaaaatacagatattaaaattcagcaacagctgggtgcagtagctcacgcctgtcatcccagcactttgggaggccgaggtgggtggattgtttgaggtcaggagttcaagaccagcctggccaacatggtgaaaccccatctctacaaaaatacaaagaattagccagccatggtggtgcacagctgtagtcccagctactgaggaggctgaggcaggagaattgcttgaacccgggaggcggaggttgcattgagccaagatcacactccagcctgggcaacagagcaagactccatctcaaaaaaaaaaaaaaatgcaacaaatactaattgaatacatctatgattgaaacacaaaaatatatcagaagttctctgcatcatataattgtccaatgttagagttgaaaaattctatagaaatgatctttttaggaattctgactttacagattaaggaatggatctccagctgttgttgtcagcttctacgatgttctacagtgatccctgctgcctagtatttatgcccttgtggagtcctctcccactttgtatcttgatttttctgtgtgatcagtagaatactgtagaaatgacgttatgtttcttctgaggccaggtcattaaacaacatgatggcttctgccttctccctcttgaatcactcttcctcttgcgaagctagctgccatgttgtgaggacactcagccagccagtgtagaagcctacaggactaggaacatggcttattgccaacaaccatgggagcaagtgatcttggaaacagattctctgggctaggagttggcaaactttttctgtaaagggccagataataaatactttaggcacgtgggccatccagtctctatcacagctaatagttctgctgctgtaatgcaaaagcagtcttagacatacgtaaatgaaagagcgtggctatgttccagtaaactttgtttaccgaacaggctgtaggccagttttggcttagggacctattgccattcccttctttagccttagctctaagcctttgaatgactgcagttcctgcctacatcctgactatagctttgtgagagactctgagccagagccacccagctgcttccaaattcctgacgcacaggaagtgtgagataataaatgcttgttctaagccactaagttttgggataatttgttacgcagtaatagataaccaatgcatcaacaatccaggaagggaggctgggtgacagatgaactgtttggctatgagttaatcattgttgaagccaggtgatgagtaagttggggttcattattctctctacttttgtataataaaatggaaaaagaaaaggaaattggtcactaagaaggatatgtgatttgtctaaaatcagaccctcagcactttgaaaaagcccatgctgtacacccaggtctctggccctaaagtcccatgttctcttagctacctctccctgcataagtaacaaccaataaagatctagccctttggctaagttttccttccaattctttgtttgtttgttttggtttggtttttgttttgagacagtctcgccctgtcacccaggctggagtgcaatggcactgtcttggctcactgcaacttctgcctcccagtttcagacgattcccctgcctcagcctcctgagtagctgggattacaggcacctgccaccacccccatctaatttttttatttttagtagagatggagtttcaccatgttgctcaggccagtctttaactcctgaccttgtgatccgcctgcctcagcctcccaaagtgctgggattacaggcgtgagccactgcgcccggccttccttacaattctttaccaccttagtacctccagtttaacatccaagacaattctttggactttgatatcattgctgttatcgaaccatccttgaggctctttagaccatagactataagcttagagctgagggagggagccttggtgagacatgtatggaattgaacctccatgtgacctgaaatataatatttaacatttatttaattttgccattgatagagcactagcagtccactatctttattaatcctcgcacagcctataagaatagacctgtcaggtcgcaatatagcagtttatgtttgactttaaataaaagcactattgaagcagctacattgtgtggggtaaatacctggggttcgtcgtcttgcaccaagaaaatttaggacacgaacacacgcgaggagtttaggagtggaagtttaatgggcagaataaagagaaaaaaagaaaggaaaacagctctctctctagtaagagaggggacttccgagaggaaaagagcaaccggtagtggatgcgccggactttgtagtccggcttgaggaggcagtgtctgatttaagtagggctcacagattggttcagtcaggtgtgacgtttacatagccgtggggaaggctggtcgccccaccctaatgttattatgcaaataaactttccccttggccagcgccatcttgtctccttcttactacacatgtggttggcagagaacggaagatggagccaccattttgaatatgcctagtcccaggtagttctttccttctggcattcacccgtgcaagttcccagcttgcctgtctgtgtctgcagctggactttacaggctgctctttgttagaaaatgatttggagctgcttttcattaaaaggaaaaccttactgaggacttctgtaccctatctgcctaagtaatttcttcttaactcctgtatcactatgtgaaggtgcctagcacagcgttgggcacatgggttctaaattagagtttaccttccttttaaaatcctattgaaattggaaatgacaccagaagggtttttgttggcataaataagttaatgaggcgattgttaggtacacagagtggatgtttgaaataactcgtcttttgatccattgcattgatcaaatggacttgcctccccagaatggttgatgattgacaataatctctaaacttggttggattaagaggctgggaatggatgggggatcctgtggattttcagggtaaccatgaaatcagatttggtattgggttctgactatgtcatgttttctgggtgtttaaccagatgtccttggtaattccatttacaaatgagctaaaattatgtgaacaaggcctcacaagtaagtagtgggagagcaaaaagcagaataccagacctgctaaaatgccactggactatgaatttcagttgacaaatacatcttctcctccttttcctttcagaattctgtttcatgttgtattttcctattaataaaaatatggttgagaacaagtgaattttcccccataaatttttgagttttgtatttttatttttgatggctattcttttagatagactctacaaggcagttactatctgccaactaactgttatcaagaggtataactaaacatttgatctctctcccaaaccagtttggaaagaatcttgtattatttgttattaggaaaataaatggatctcaggattctccccaggtcttcatccaagttgctctaagcagtgtatgcgtagatttgtagacactttttgtttgaatatttctgaaaaaagataggcatattttaaatttgcaagtctggttttagtcacaggcacaagagaaaatgaactgccaaatgtctggaagatacagctccaacccctctactttcatatgtgagaaatattgttttgattagagatagaataaatccaggtagacttttttttttttttttaacttcttggactgagttcactttttaaaatgtcagttgtggaaagccatctttaacaacatcagtctaggttatttaaactttatccaggatagctgtccacagatcacttctgtgagaatgatgtgtgatttaacaattataatcagggaaactcgctaaagaattgccattttttggctaggcatggtggctcatgcctgtaatcccagcactttgggaggccgaggcgggtggatcacttgaggtcaggagttcgtgagcagcctggccaacatggtgaaactctgtctctactaaaaattcaaaaattagccagacgtggtgctgtgcacctgtaatcccagctacttgggaggctgaggcaggagaattgcttgaacccaggaggtggaggttgcagtgagcctagatcatgcctctcactgcactccagcctgggcgacagagcaagactacatctcaaaaaaaaaagaaagaaagaaagaaaaaataagaactgtcatttttattcacagtctgtactaaaacattggcttttgagtgaagcattttggtttgctgaggacataatcaaaatccaccaggagcagggtgggtgttttgtgtgtcttggtgttgataaaatggctgttggaatcaggtatacatgtctttaaaaaccagctttcaccattactaagtaaccttgggcaagttaccaaacctctcggcctcagtttcttcctctgtaaaatgggcacagccgggcacggtggcttacacctgtaatcccagcacttgaggaggccaaggcgggcagatcacttgaggtcaggagttcaagaccagcctggccagcatggtgaaaccccatttccactaaaaatagaaaataatgagccgtgtgtggtggtgcatgcctgtaatcccagctactcaggaggctcaggaacgagaatctcttgaacccaggaggtggaggttgcagtgagccgagatcatgccactgcactgcagcctgggtgacagagtaagaccctgtctcaaaaaaaaaaaaaaaaaaaaaaaaagcacaatgacaggaacaaccatacagggtgaggaagtagttaggcccaggtcattgactttaagtctgtggcttttctaccatatcaattaggaagatgcagaatgaacagagcacatgggtataagtaacacaaaattcttaattgagtgtaacaaagaaattgtggaccatcaggatataaaatatttccatgcttagagatggatggttttaatactccattcttagagatcttccagaaaagaagaaaccactttctttggaaaattacgtgctttctggcaagaagcagtctcagatccctcccaaacctgtgagtccttaaaaatatttactatcccactgtattttaaccaaaaacaggtcgttttgaaaggctaattagccaaaactaatttggattttaaatgaatttctagaaatgaagagtggtatcaggtcaccaagcagtagccttccttcaaaaattatgaggctcctgttggatatctcttttgggactcaagcttgaaagataaatctactcttttcgtgccagaatacactgagcagttgatttgaaataaatcagaacatagagtttctaataatattaataatattaaacatatagaattgagctgcaagtatagtatcttgtctgtgtatcagtcactattccttttctctttgctgctctctccccattttcgtcttctttttattctgtttttctgaaagggaaaaggactaactgcacagagtagccattgtttgaactgatgttatctgaacgcccttctttttgtgtgtgtgcttgtgttactatttgttttcttcatttccttttagcaaaatatcctgccttttcttctgtttatctttgctggtgctcatgcatcctttctttattctggtggttctatcttccaatcttcaaagctcttgtctcaaacccttccttggaaaggtctcggtccttgtggtctgtgctgttagccagaattcctgcctgggaagctgtgtgtggaggatgacttctctcatgaaggctgccttctcttgtggggaggcagggggagatggacctgagagagcccttctagtgcagctgactgtggtggggcctgtgagacatgcaggctactttcctggtaacagcaggcaaggtgaaaatagatctaatccagatcctgttacggattcagccgtgcagtcaatttgtcactgttctctgaagaaaacggtctgccgctgttgatgatcataaactaactcacttttaaatgttgacatactagatggctgtgttaggctgttcttggattgctgtaaggaaatacctgagactggttaatttataaagaaaagaggtttaattggctcatggttctgcaggctacacaggaagcatggtgttggcttctggggaggcctgaaggaccttttactcttgggtgaaggtgaagcaggaacaggcatcttatatggcacaagcaggactgagagggagcgggaggtgctacacacttttaaacaaccagatcttgtgagaatgaactgtcaggaggacagcaccgagccattagggatggtgctaaaccattcatgagaaatctacccccatgatccagacacccccaccaggattacaattcaacataagatttgagtggggacaaataaccaaactatatcaatggcaaacaaggagtcgctcttaaattgaactagaatcaaaaagtaaatgcagcctggggaagagagaacttctctccattctctcctgtggcctcttccatagacacaggcagagagaagtaaaaagtaggatgagaagaaacaggaagagagagtagaggatgacagagctttgagaagcagaactgtttcctgccacatagagattgttttttctactttgtgattttttttgaaatggaatcttgctttgttgcccaggctggagtgcaagtggggcaaccttggctcactgcaacctccgcctcctgggttcatgtgattctcctgccttgtcctcctgagtagctgggactacaggcgtgtgccaccatgcctggctaatttttgtggttttagtacaggtggggtttcaccatgtcggccaggctggtctccaactcctgacctcaagtgatcctcctgcctcggcctcccaaagtgctgggattacaggcgtgagccacggtgcccagccacatcgagattgttttatctccaagtacaggctcttatattgctctaccatagagaagattttttttgagatcatagcacacatgctttccattgttcaaacaagacagggaatacagagtttgtttctttcatatgatcaaaaaagaatgactgtgaacgagaagttatgtcaaagatttaggcagccctacctatggagatgagcagttgcttcggaagtgccagggcgcactctggaatgggaacagctttgcagggttggtagaggaagtgtgagaatgcgccagagcagctggcccagtgcagtgcaggcaacggtgtgttcagccaccctcagagtgggcacctgggatggtcaacagccacaggtcttggcagttatctctagtcccctccttttcctcattctcctaaaaccgactgcatcggcattcctgatctgcctctgatatcaacactttgtcccactgccccacacacgcctgtcaagccctgtgtgcttggtcagagggtggttaaggggtaccaagctaggcatcattgtaggagagggcagagggggtttgattttcacttttggttgaagacctggctgttttctattcctagcttcaggaatcttatttgagccatcaaatgtccatttataactatccagatacccttattatttggacttgtcagtttaaaataatatatatatacatatatataatatatttacaaatatataaaatatgtaaatatatattatatatataaatatgttttttttaacttctcctttgtgatacttaggccctatcctatccacaggcacagggagctcaaatcaaacagcttaactgtagagagaggaaaaaaactaagtctttgtgagttaattacatcctaacacagtgacagtctcagaaagaaatggttggttagcacacagctattccgcctgaaactaatttctctgcaaaacagtagctccaaaatgcagttgttcctgagccccaaaatacagactgaggcatttttagatggccctacattggacttgaaaccatctgcttttttgtagctaaagtatgagttttccattgttgtaagcaccatgacaatggcatcattccagagagagaagcagcaccatggagccctgtggaaggactcctgccagccctgctctgagaggcacttcagcttcatttccattgatttgattaaaggacaaagaaccaaagaaaaatatagtgtctattcagaattgagctccactctcctaatattctcttgggcttctgaaggattaaatctcacttcatctgcttctattgagtacccatttacgttatgtctctcaaagagtaattagccctcagctgcaaaatagttgtcaaaatcagatgatctgcttttgaagggctgtaaagaaaatggggaggcaagtttctcttacaggaaaattatggaccataaagatgatattaagtatgatatcagagtgggttgtgccttgctctgattcttagtgtagcttccaataaattcttgattaacttctttaatcatactgtatttgtgcatgtcccattttccatgaccagttcctcacagtgtcactacatttatgtatactagcaaatcaaaacacataatgcctaaggctgtagacataattatggaggtaataatttggttttcaatgcacaaaaaaagtgtacacataccagagatttgcggaaggaccttatcattctgctattacggaacttttcttataggtaagcccgtgagggaggtgctatcttctgcttgccatgttaccagaactgcagtcgtttattcaggaattatcagagaaaagttatacttcagaccacttagaatcatattctccatctgaaaacattcacagaaaatcttattcataaatactgcactgtattcaaagtgtattttctcatgcaactaaatgccttgagctagcatggattttctgagtgttcagttacataccctgaggctgagtaagttggaatggacttggtaatgttaacttcttgctagttacataaattgcaccctggttgaaaaggtatatccgtgtgttctcatggtttttaagagcacatcaaaatagtttattatgctgcagacttggaatgtcttattgtttaagaaaatataaacacagaaaactcataattttgtagtcataaaaggttccattgcaatctagataattaaattcaaatagtattgccttgcagaatcagatacagggccagtaagaccaatataatattttaaaacaaactctttaaatggcagtaataggacatttaaaatcacatagaagccaggtgtggtagggcgtacctatagtcccagctacttgggaggaggctgaagcaagaggatctcttaagcccgggaattcaaggatgccgtgagctataattgtaccactgtactccagcctgggtgagacagagagactctgtctctaaaaaataaataaaataaataaaatcacatagagaaaatctttgcaacaacttcttagtaaaatacagttaaacaaaacttgtacaaaatccttgttctcttgttttacctttctgtcatcttatgttaaatacggaagatttcgtaagggaagaaaaaggtaatctcacaaaatgtaatacgttttatcgttcattttccaaagcgattggcatgatatcccatttcagtgggaagaaacagtcccaacttctcatttaacacaaatgaaggactcaaatcactacatcctccttacaattttcttaaagtttgggtcttcaggaataatactgctgaaaaaagaaagaacaatattcaaatgtaatataaaaagtcagaaaaagttaaatccccttaaaacgcttgcgtagacccttagctttgatggtccttttctttacactatattttgttaacacaacattaaccccagatgggttgattgcagtttagtcatggaatatgcatatgcttatcattggttatagttgttcttttgttgttattattaaaagtaactggtaaaaattcattccagttctttgcggtaattagctgtaagtaacatgaactgtattttatatctggataaacaaggttctgaaagacatagacttggctacagaggagtaagaatagtgcttccttttgtttcttgtttctttttcttttcttatttttattgaaacagggtcgttctgtcacccaggctggagtacagtggggcagtcttggctcactgcaaactctgcttcccaggctcaagcgatcctagcacctcaccccacaagtagctgggaccaaagatgcatgccatgcccgactaatttttctatattttctagagactgggttttgccgtgttgcccaggctgatcttgaacacctggactcaagtgatccacccgcctcggcctcccaaagtgctggaattacaggcatgagcccatgtgcccagacacttccttttatttcctaacggcacagcttcatagattccttcattttcatttctgctccatgaatgctggatttttgattaggcagtggaggtagtagtggtagtgataatgtgtgtgtttaaattaactttaggtactgttcatggttaaggtaccctgaaagcaggaaaatattggtgttgcacagatgtcatgactagtcagaaaatacctagaggtacagcactcttttttttgagacagggtttcttttgcccaggctggagtgcagtggcatgatcttgacccactgcagcctctttctcctgggttcaaggtattctcccacctcagcctcccaagtagctgggactacaggtgcatgccaccacacccaggctaatcttgtgtatttttagtagagacggggtttcaccatgttggccaggctgatctcgaattcctgacctcaagtgttccacccgcctcagtctcccaaagtgctgggattacaaacgtgagccactgtgcctggccaaggtaaacacttttacactgtagtgttctatcctcgaatcaccagccagaaagtaaaagtaaaaagctggcaggagagtgatcctatccggagctcagtgcagggcatccactgcagtctcttcgatgaagtcagagaacactgaggcctcccaggtttcagatcgcaggtttggcttcttcagtcatcagacaatctttatgcaccttttgtgtactttgggcagtaagtaaaatgtaaggcagtatgaaaggagcaggtcgggaagtgaaatataagagcaagctctaagttgaaaaacccattttcaaaatcacaatatatgctgctggtttcccttatgtccttattttcatttggtactttaaaaatttcagaaattatcttaaggacgaataatgaaacttaaatctctaagattaattaatattttaatctgcttttaaaagatttgaaattcttcttttacatcatttgagaactctctatgaccaagaactgctaattatggtaacaagctgtagttttagattttctttgtcagggttaagaattcagatacctaacttaagactccacatgatatctagactaccagtattttttgaatgaggctttcttaggagtatgttgatgcactctcatcctttcctccctggactcctaccacaaccctctgactgatctccctacctccattctctcttctctccactccagttttccttttgctgccacagcttgctatcccaaatacaaatatgactcaatgttatggtcctgctcaaaattttttagcagctctgcatgactcaagagaaaccccagcccctccatgtggctgtgcttgcagcctcatccccctgcaaagccccacgtgggctctggccactggactgtaccctgttcctagaacaccctgtgttcttttgcctttgcacattctcttcaccctgctggttccctgttgtccacttttcctcctggacaatttctcctccttttaaagactcacctcatggatcaccaccatggtgaggctgtcctttgttggcatttgtcatgctccattgtaatctctgggccacaaccagagcgtttcttctctgtgttctcttagttaccgagcttgtggtgggtgtgcactaaaaagtgacatcattctccttgacctggtgatcccatatttgcatctatacttccaaggaaggtggtacatgcactgctgcttgaggcagccctgttatcccagggaaagattctaagggataggccttgcctgtccctgggagtcagagaagtgcaggttagggagagaaacatatttggggttagtgcacctgcgatcaatttggcagtctctttaagtcaagggagtttaactagcattcagagagttcatgaatctgtggtctgaattccagtctgcgcgctggcacagaaaagccatgcaagcttgggcaagtctggtaacttttgatttggtattctcatcattaaatggacaaggtggaccaggtgatctctaaagtatctccattgcagctgtgcatggtggctcacgcatgtaatcccagcactttaggaggccgaggtgggtggatcacttgaggtcaagagttccagaccagcctggcaaacatggtgaaactctatctctactaaaaatacaaaaattagccgggtgtggtggcacatgcctgtagtcccagctacttgggaggctgaggcaggagaatcgcatgaacctgggaggcagaggttgcagtgagccaagatcatgccactgcactgcagcctgggtgacagagcaagattccctctcaaaaaaaaaaaaaaaatctctgttgcgagactcagcgtgcacactgcaggtggaataacctagtgactttctcaggtgttcagttgatagtcatatgatcaactggcactgttgtgtaaaaatgcccatttccaaagatggagagggaatttagaatgtcgtaaatggaacatagtgttcatggcatcttttttgctatggagttgtgaactaattttaactttctaaaaggaaacagtccagctttgtgggtaactagggtagaaagcagcagtttgctttatggtgagttctgcatgctttgtcatgaatcggtggcatgtgattcgtcatgtaagccattcataactggtgtttctgtcagtcatatgcgtacagaaggcagttctccatgtgctcatactttagcagaataagaatgtgactgttgtttcaaaattagaatcagtaaataggtgatgatggcttattttttgcccctatttcagtattggctcacaacacttgaaaatgcgcctctaaaaaatgtcgtcatgatatttatagctcgatgttttgtaaatgagctgaatgtggtgagtgagaacagttgcacgtcctgtgcttttgatatttcccttgactgctgtgaaggctctgactcagcatggatgatgtacagtctgctcaagatacagccccacaggagtggaggctggcgtcatcctggaggcctgttcccgaggtgctggaagatggcacggagtggttgccatgcagatgggattcttcccactgccctgggagcttccattctagaactgtgaattgtggacatgtctatgtccatcacagtagcggtctgtggttagcctgctttcatactgatagggcccagctctggggtgatgatttctttcctttttttccccttccttttcacagtatactttcaagaatggttaaaataattatttcaccttaactactatgcaacttggagtaaattaaaggaaaattgtttttcttttcaggttcaaagaagtaggtaattacttttggcaaaggagcagacaaagatctagcaatatgagattcatttgtcaataattaggcaatgataagtatatattttaggttgaaattttagctatttgaaaaaaactacaggctgggtgcagtggctcacgcctgtaatcccagcactttgggagactgaggtgggtagatcacttgagcccaggagttcaagagtagcctgggcaacatggtgagacctcgtctctacaaaaaatacaaaaattaaccgggcgtgatagtgcactcctttagtctcagctgaggtgggaggatcgcttgagcctgggaaagcatggctgcagtgagctgagatcacaccactgcactccagcctgggtgatggagtgagaccctgtctcaagaaagaagaaaaggaaaaaactacagttgaataatttgccagtttctcataaattaacagaaagctttgagtcttcagagtcacaacacagtgagttcatggatggtcagtgggacttctggcccaagtggccattctcacatcacttctgccctcctccccgtggactgctttaggaatccatgggtccttcctctaattaagatgtaacaccctcttgccccagaattcctccagatgggattgcttgggactcaggtgtttacagtttatcaaagggtagcatttcttaaaagtcaccaaaatcctgcagaactaggaataatttgccagaaaagctaggcaacacacaggaatttggatttgtttaagattaaaaggacatgttagatcaacttgccaatgaaaattacggtgcagatcttaaacattttctaaatttgtgtttacttcaaactgtaaaaagttttgtaactaatttctgctcaactatttcatgtattcatcatgtttcatgtatacatcaagaatgtagcataaagagtttctagcttgacactatattagttttgctttttttttcttttcctttctgttttttggtggtttttttttttttttttttgagacaggttcttgctctgtcacccaggatggaatggaatgcagtggctcattgcagcctcaacttcctgggctcaaatgatcttccatctcagcctcctgagtacctgagaccacaggtgcacaccaccatgcccagctaatttttttttattttttgtagagatggagtctctttatgttgcctagactggtctcaaactcctgggctcaagctattctcccacctcagccttgtaaaatgctgggattacagggatgagccatcatacttggccactgtattagatttctgttgctctgtaacaaattaccacaaatatgatgggttaaaacagtccacatttgttatttcgcagtttctgtggatccagagttccaacacagcttaactgggtcccctgctcagggtcttagtaggctgcaatctaagatgtcagctggggctttggtcttatcagaggctgaactgcagaaagttctgccttaagctctctgaggatgttagtggaattcatctccttgtggccttaaggctgtgttcggcattttcttgctggttattatccagaggcttcccttagctcctggaggccacctgcagtttcttgccatgtatccctctccataggtcctctcgcagcatgacacttacttatacaaagccacctataaagagtctctctgctcagagtctctggcctcagggacagctgaggccctcttttaaatggctgctcacttactaagtctggcccactatggataatctcctttttggttaacttaaagtcagctgaatagggaccttaattacatctgaaaacatctcttcacccttgtcatataacataacctactgtgggagtgaccatcctcttttctacatgctgttgatgagaagcaagtcccagcccctgcttatactccaggaggggagggtgttatacaaggtatggttaccaggatatgggaatcattgtgtagtggggggagcagggcctaggacttaccctagggtgtgtccaccacaggtactctgaatgtttattaagttgaaagattctgttataaatcatttatttggaatgaaaattacatgttccagtaggaatcgggtgatatttatagttaagcttataggtaagctgaccaagcctatttaaaataaagtgtggctaatctaaaatattactattccatttgtcttgaatttggaataaggtcagggtgtgaagtacaggaaaatgcttcttcccatcttctggggcacagggttatcctatccatcagctccacagctttcccctgcttccagccctatttggtgataggccacatttgcctttctctttcccatagacttggagtagccggcccttctcctgctgccctgagctcttgctgttggacccacatgggcccagcccagccccccagctcctcatgtgcccagatgatctttctcttgttcctcctgtccaaaccattttccctcagtaagtttcacttcactaggtattagaccaaaagcttccagtgtggaggaaggagaaaggctaattatgggttctgtttctctctgacagatgtcaagttttgctgtgtttttctcaaatatttaaaatatctgtggcacctctgtgagtttgctgcagttcccaggggtgcctctgggcatagtttgggaactgtggctgtatcctgtgtaggattctacctgcattgagcactcattatttgtgaggtccagtgttcagggttggaacagcaaatggaagaaaaaataatctaacagctgacttgagcactgagaaggatgcatttgaggctcagaggccctgctgtgggagggcagagcaaagtgtgtttgcttctgggatggggtagcaaacatcattttgccttaagacgaaataaataccagccacagcatgatgcttcctggcaaaatgttcctatattttgcctgaagcagagctgaaatccttaacagaccatggtacggtcttggtaatctgtttatttgttgtagggcatttactgcccacttcagtggtctactgttcagttgtttttaatagggacactaaggcatgtttttaaaaatcagcttgaagggaaagcatgtaaatatagtcacatatcctgagcttgggctggctaagggtcgctggtggggcagggtgccattttgaaaagagccagtgtggtacctctcaggaccaagggcacagaagaagggatgacctgggaaaagaccaggattccttcagcctgtagccaggtgatagaatttctacagcacacaggggtaagggctgctggggaagtaacccacaaggacatgggaatcagcactccatcgtgtctgtggccagatcaccctggagccctgggcaggcaactctacaatgaacataatgttttaaaatatgcaaagtaatattatgtatcatttaggcataatacatgtaggggaaagaaacatgggaatgataaataccacatctaggcaagtggtcctgtctgagggtgagggcagaagatgagacccagaggggctgtgatgtggagcgagctctgttagccatgtccacttcttaaaggagctcatgcgcaggggctgagggtgtcattctttccaacttcaagtcttcataaattttttctgatttttaatgggaagagtaatactttatggatttatgataattacattttttgtttgtgtttgtgcatttggtttgaggaaaactagtgagtgagcaggcatgccagaggccagctgttgtcaccgaggtttgtcagcctctggattgaaggaagagcccactggggatgttacagactctgtgcccaagccggactgtgcctaaagcacctccttataacctgggcatgggaccctcagagctgtaccacatcatcaggaaaatgcagagggtgacacccactcccttgagtgactacagaggaaggaagatagcatgtgcctgagcccgacatataattgaccacagagtaaacatcagttaaacatggatctaaaaatgtgatggcttttggatgctccaaagaatgccaggggaaagtgagcagatatgggaagatatttatatttatcttatttattacacctattatcctatcacagaacatatttaaatatggaaagtgctccattctataattataacaaaagaagcaatcatgtagaattgtcccgattttaattcattaatttttccaacttgaaaatactttgggatatttcataatagttcattttgcctgaaacaaattgaaccatgaaaccactggtctgtgaaatgactgaatgaattaaaactgtgtgtaagcagctagatcaaaattaataagagaatctaagcataagtagaagcccattaacaaagaatctattcttgaagtgtctctgtagcatatttttatggcgtttcccccccgccttttaaaaaatttaatgtatctttacatagagtgatttaataacagaacttcagcctgcaagggaatttttgagttgtttattttgttttttaaaatgaactgtgttctcctttggatcatgagtgttcacatgacagaaagtgtgggtttgctgctggtttctggtacatcaccctagcacgtccttcataaatgctgtggccattctgtcttacttaggaaaaaagatacaggaaataaaaatcaaacaaaacaaaaggctgggggccaagagtattaatgctttaaaggaaaaagcgaagtctctcaatatagcttttaaaaatgtactactaccaagtactgactagatactggaaatacatacacatgtatacttttctcccaggaaacagataaaggcagactaaagtccatcatgaaagaggattaacggaagggaaaaaaagttcttgacacgtcagactataggcttgcgtcttgacaaagtacgttcctacttgacctgtggcttatagcatccctcaatccctcatcctcatctcactgtgcctgtgccccagccttacacacaaccatgctattccacagtcagaagaggtcattttatttatttgtttattattttgagacagggtctcactctcccaggctggagttcagtggcaccatcagggctcactgcagccttagactcccgggcccaagtgatcctcccacctcagcttcccaagtagttggaaatacaggtgtgcgccaccatgcctggctattttgtttttgtttttgttttttagagacagagttttgccatgttgcccaggctggtttcgaattcctgggctcaagcaattctcctgctcagcttcccaaagtgttgggaatataggtatgagccaccatgcccaatcagaaaagatcttctgaagacacagtatttcacagttggggaatgagacccagaaagccagaggaccttcccaagcttcccagccagtcgactttctctatgtagccagctggctttcatccagtattgctggatggcctgctgatttgtctagttctgcattctatctctgggagttgacctagtggacactatatgggaaaggggggtcagacatccctaacacttattaccatctagtaggacttcctaacttgagcataccccacttgcctctgcctcttcaaaaaccatatttaaacaaaaggaaacatgaaagaaaagcatacatctattaaaaatgttggaaaataaaagagtgccatcagccaaccaaaaaataattttgagaaatttttgtaacatagaaagcagaataggaaagagttgacagagaactagagcagagaagctgcaaccctctttagatacagccagctgttgggagatgagagcactccctgtattggaggacattccagccaggaatgaaacaggagcaggccagcacctgggcagttcattaacttccccaaaatgaggaaaattggggtgggagcttagggaaggagctttggaactatgagggatctccaagttattctggacttccatgagccataagaaggggatgcaaggaaaggctatggtacccagggatgaaagatgctacatctgtgccctgggggctcttctgatgtgggtcttcatgaggcctgcagataatttgcctgccacttgctcatatgccctaaatacaaacattgactgttatatgcagtctacgtacacagagcgcccccattcagatgggagggcaaggagaagagagatgggacaaagacagagcaaacctctggaagctactcattttcatcacctggtccttctttcccaaatgcaagtagaccaccagaaaccatgtagtccttgtttctaaaatgtgaagaaaccaccaaggatcatgagatatttgaagagccccaatagagacagacagacaccataatgaaaaactgacccacaaggaaacagcaaagtaaaatgagaacattctaataaaaacctttacaaagatttgaaaaagtattgcattcataaattatgaaaggctgacaggaaaaagaagtgatcagagaacaaaaaggcgttattggcaactaaaagcatgattgtcaaaatagattcgttagaaatgactcataatagaatgggcaaggctgtataataatagtaacagctaacatttagtgagtatttgcaactcttcagacactgttctaagtgtttcgcatgtaaatcagtttcatccttttaagaactatctgtccaggcatggtggcttacgcctataatcccagcacttttgaagttcgaggtgagtggatcacttgagcccagaagttcgagaccagcctgggcaacatggcgaaaccccatctctactaaaaatacaaaaattagctgggcatggtgtcgcacgcctgtagttcagctacttgggagactgaggtgggaggatcacatcagcccagaaggcagaggttgcagtgagccaagattgagccacttcactccagcctgggtggcagagtgagaccctttctcaaaaaactctatgagatagatactattatccccattttacagatgaagtaactgaggcacagagattaggaaattctcagggacatgcaatttcaaagaggcggaactagaatttagcccatgtggcttgattccaatgcccacactcaactgtattgaagatcaaattagtattgtaacaagcaggcaagctcccccaaaacagggaccgtctctgtctttgcagactgcagcagttactggcccatgtgtgccaagtcaatatttgcctggtgaatgaataaaataagtatctaaagaataaatatcaaactcttcacagaagttacctatgaggaaggagaccaaggttagactgtgaaagggaaattcactctttattctctataatgcctgtattatttgaatttttacaaagcgatatattactttaactatttaaaaagttttaatgacagactttttgttacctactaatttatcaaaactttacattaatctttacattaatctaaaacttcaaattaatctacattaatctatgtcatgtacaaaatcccacaatagataaaatggacatgaaaacagtttttaaaagttaaagccactagccaagtcttaagagtccttgttgttaagttgccatatcaatatttgttgttatttgttctaaacaaccctctccataccttattatatgggagacaactgtggagtccagagtcctcttctttttatttcccatatggctttgaccaaggtaatatatgtccatgaatcccagtttctcaatctgtaaaacctggatttaaatatcatacagttttgaagatcaaaagtaaatgaaggaactcctgcttcctgtcaagatggagtaacagggaccaaaccccttcatgccagaaagaaccccccaaaacagacaaaatacgtgaatcaatgtttttccaacagtggacatcaggcagtgaaggacagtgatctctgagagatagagatagaagagagactatttgagttctacattcgccccagtttgccccactgagaggcagagtctggggaggccacagcagccagagttcacaggacagagtaccagagacagcagagctgcaaggagagataaccccagagatctgctgagggctccatttactattcagcagagcatgtgcatttgaggaagctctctgaggctcagagggaacagtgttattcctactagcctgattaggaaaatcggaatacacgaggtgttgagtaaaacactcagaaaggtattgccctgttagtagggaataataagttgtggactgagatctgctctaaacccacctaacaaatgataaaaacaagacccaagaggattgaactgcttctaacttaactgtatcctagaacaaagcccaggaatataaatatacgccccccgccccatgatgaggagaatcatgatcaattagaactgacccaaagctgaaatacttgtcagaattagcaagcaagggcgttaatacagttatgaaaactgtattccatatgtttaaaaactatacggagacatgcaaatacttttaaaagatgcacacctgacttctaaagataaaaactacagggctgggcagggtggctcacacctgtaatctcagcattttaggaggctgaggcaggtggattacctgaggtcaagagttcaagaccagcctgaccaacatggtgaaaccctgtctctactaaaaatacaaaatcagctgggtgtggtggcacatgcttgtaatcccagctacttgggaggctgaggcaggagaatctcttgaaccagggaggcagaggttgcagtgagccaagatcacgcctttgcactccagcatgggcaacaagagcgaaactccatctcaaaaaaaaaaaaactacaatgcctgagacaaaaaaatacactggatgggattagcagcagattagacattgcagaagaaaaaaattagtaaacttaaagacacagcaataaaatgacctggcatgctggtgcacactttaggcctagctattcaggaggtgaaggcaggaggagctcaggagtttgagctcctgagctatgtgagctacagtgagctatgattgcactcctgtattccagcttggacgacagagcaaggccctgtctctgggggaaaaaaaagaaaaaacaataaaacttatcaaacatgggccgggtgcggtggctcatacctgtaatcccagcactttgggaggctgaggcgggtggatcacgaggtcaggagatcgagaccatctggctaacatggtgaaaccccgtctctactaaaaatacaaaaaattagccgggtgtggtggcaggcgcctgtagtcccagctacttgggaggctgaggcaggagaatggcatgaacttgggaggcggaggttgcagtgagccaagattgcgccactgcactccagcctgggcgacagagcgagactccatctcaaaaaaaaaaccttatcaaacgtgaagcgaagaaagaaaaaataattgtaaaaatgaaaagagctttagtgaactatgggacatcatccagcaattgggaatttcctcaacctgatgaagggcatctatgaaaagtctaaaactggtgtcatacttagtgatgaaagactgaatgctttccccttggtataaggaacaataaaagggtgtctattcctaccacttcttttcaacattatgccgaatgttctggccagcgccatcaagcaaaaaaaaaaaataaataaataaattaataaaaggcattcagaatagaaaggaagaagtaaaaaactgtctactcacaaatgacatgatcatctgcacagaaaatctgatggatctgcagaaactagaagtcgtcatttgcaggttgtctgtggctgcttttgcaccccagtgggaaagttgagtcattgtgacagagactatatggcccaaaagcctcaaatatttacgtccagccttttaataatattttgccaacccctgttctatagattcagtataatcccaataagaatctaagtaggcttttttttttttgtagaagttgatgaacttgcttctaaaattcatatggaaatgcaaaggacctagaatagccaaagcttttaaaaagaagaacacaattggaagactacttgatttcaaagcttattatacaggggggaatagtgtagattaacggagcagaatagagttcggtgataacctcacacatgtatgtactactgatttttgacaaaagtgcaaagaccatgcagtagagaatagtcttttcaataaacggttctggaacaattggatattcatgtgcaaaaaaatgaacatggacccacacatcataccaaaatggattatagacgtagatgtaaaatctaaaattctaaatcttccagaaaaaaagataaaatatttgagatcttacattaaaatatttgagaccttacattaggcaaagatttctcagctacaattcctaaagtatgatccataaacgtatgatccacaaatcgataaatgacacttcatcaaaatttaaaacttctgcccttccaaatcttgtcatctatataatgagaaagctaaaagaaaagcaggagaatctgctagaaaactttcctagggtcctctgattgttaaaaaactgataattaccctgataattacctgataataacattgattattaccatctctgggctggagatgaactgtattagagaattcagctacccaccctcttccctctcacctcagtcccccttaccttgtaccctttcttcactaggagaaaaagccaagcagcaaaagagtccagcaaaatcatagtttcctaaaataagaaaactttttacgaaaagccacataagagtggacctctcttgaataccagaagatatggaaatttaggcaattgggaagaaaagtggtttggagccaagcagcactcctagatttttaccctaagacctaagcttattagtggtaggaccttgcccatgtcagttactacatctgtaaatgggaacactgtgagaattagagatcagggcttcaaagtgcacccccacccctccacccggggcagctcaaggtggccttctcttaaccactgttgcgtttttcagttgtgccaagataggctgcttaggtttcttcactaccatgggaaatgattctgtaaaatgggaaaactaaatgcaagtgtaagggcgttgttgttgtcgttttcactgtttcctataaattctacatcttcttactggaagagaagatctaggctctaactctttagaggagattaaacattcctgtgcaggatggaaaaaattcaggaagggagccaggaaaacaaatatcctgaagaggcttagggtcaagaggtgagggtgggagaatttgacacaagggaaaaagaaaaatgcagagctactggtggtatatttatgacaggaaggttttcccatagaggatagagctggacttttcaaggggtggctgcctgccaggccttagtacaagaagaagagatcataggcaggtcacaggaaatgtgctgctgaccatgagaggtggtgatgcctgggggtagggaccagagggggacaacgtctaaggcccctcttccagggaggccaaacaggaaggatgttgtctcattagcacggatttccaagatgtgaaagcatatctaccaacacttatcaggcctaccagccaccctaaacttcccccaattctcatgcaaatgaagtgacagaaaaaaaaagttatgataccctgtgagtgttcacagccttttcccacccccaggggtgttcattctctcctagctcagttcctaggcttatgtatagggcagaaaaattaggggctgggcagcaggtagagggggtcttgaggtgccattgtcttgctctggaaaaggccaagatctggaaatggaggggttaggggtagagagagagaccaaagtctctgagcattggaggaggagattggaaaggggaaccttcatggtgtaggtaacaggagggttttgcttgcttgcttcccaacatcaccttttgtaacatcccagagttacaaaaggcaatgttgaaaactgggaaaagaataaaaaagaaatgaaaatatgtgcccatggtaaatgcaggagacatggagaccagtgtggctggagggaaagagaggagggctatggagagttggccagggatttgcaggaaggagccttgcacacagggctgttgcctttatcccaaaagcccaggaagccaccgaaggggcttgagcgtacgtgtatcatctttagatttatgtttaggttacatcaaaaaagacagattggggatgtggccagagagggtataagtaaaccagtaagaagatggttccaggagtttctgtgatggatttatgtgaaggtggtcaaaatgtagagaagtagacaaatttgagaaatgattaggagatcaagtcaatcaaaaccaatcttggttttccgaggctccagagccatgctctggggtgaatggctgtgcacttcacttgatggaaggatagccttgcttcggaagatgatcttgaatttagtgttgttaatttattaacatccaagggaaatatgaggtaggcattggttatgtgagtgtagaattcagaggaaagtctgggctggaataaagacatgtgcatgatctgcatgtagatgtggctgaggccatgggtgtgcatggtctctctcagggagagcacatagagcctcactgtccacagtagcctgtggccatctgtgcctatttggatttaaattagttcaaattaaatcagattaaaaattcagttcctcagttgcactaagcaaaatgaggaccaggaaatgcccccttggatttaacaatatggcggtcacgggtgaccctagagggagctattttagtggatgaacagggccaggagccaatgtggagtggtttggggagctagagttgaaaaagcaaccaggatagacaacttaaatgcatttggctggaaaagagaggagagaaatagaatgtcgactgaagagtgagcagggatgaggagtggagaagagggctttgtttgtaggtttaataagagaaactagtgtgtatgtttaatagccagtgggcaatagccgaattctaggaatttgtcccttagatttactcacatatatataaggggataaacacacgtgtgtgagcagcaatggtttaaaaacaacctaaatagcctggttcagagcactggttaaatgaattctcttgtccatacaatggaattattgcagccattctaaataaaaagagctttctacagttcctgatatgggatcatctccatgatttatcaggctgattttgcaagatgcagaacaggatatattattgccattctttgtattaaaaacaagaggatagatgttccagaggtatcctacactgatatttatttttttaaaccacacacactgaaagaatgatcaagaaaattgctgctaagatggggaactggggaataaaagtgtgggtaaatgtttttttcacagtatttttatactgcttgatttgactttttaaaaactatgtacttgtattttaacaataaaatttttttttaaagtcagtgagaaagattcagttgagagagagaagttaaataatcaggagacaggagggagagggcccacctcctgcctctctggtgaggaccctgtgatcctttattactccactgaccagaagctccatgaaatcaggtgtagttttacttaaaatgagtttttgtgatactagagtatcttagatctaggtagatatcacccatcccatattatctattgctaggtaacaaattacccccagacttcacagcttatgacaaacatttgctctctcacagtttctttgaatctacacatggcttacttcagtgcctctgactcaggatctctctcaaggccacagtcaaggtgatggctgaggctgcaggcatctcaaggctcaccttagggaggatccatttccaggctcactcccctggctgctggctgaagataccagttcctcaccactatgggacctctcctcagggccacccacaacatggcttccatcacagctagcaaatgagcgaaggtgcacccaagatggaaaccatagcctctgtaaactcagaagtgagcctgtcgcttttactgtattctgttggttagaaatgagtcactaggtgcaatccacactcaagagtaggggattccacaaaggagtgaatcccaggaggcacagggatccttggggccatttagaggctgcctactataaaccctaaattcagcaaagttgaatacttcttatatggtagtgttctgttccaactcatggaaataatttttgtttcatgaacaaaagaattcatgcattcatccttatatgtttttttcctcagaatagtcagttgcagctttattgttctgcagtaatactttagaacttcccgtctgtttttgatattttctgaattttatcattttgatacagtttgagaagtttgataaactaggaaactgattatcacttcacctttcaaaatcatttagggaacattctcctgtagtccttgttttagaaatatacgctgacatgagtggttgtaaaagggcataatgtctgcagcttaccctcagatagttcagaaaacatgctgcagagagagtgatcaagcaaatggggtgaatgtcagccattggtaaatctgagtgagggtattcaggactcctttttactatgcttataattttttctgtaagataatgtcaaagttaaaattttgaaaaagaaattcttatactcctccccagacctactaaatgagaattgcaagtgggacctgagaaacttatttttatccttagatccgttctgattactgatcagcaaggttaggaacacactgcgtgagaatacactcattctactcataaagttgtcttcatagagcatctgaaattgctagttgcacttttgagtctaattttgaagccaagggcagaagagacccctcaaagatctgtttgtggttactgtacataagtcctccccataagtcttctggctcacccccaattttgtgccacatctcagatatggggagaccaacaaacagggccatgtcagctcccacactgggtcctctgctcatggggtgcagcccagtgggaccacagaatggagcacctgtggcgggctaaggaggcttcatagaagatgtggcacatgaactgtgccttcaaagagtgataggaatgcatgggtttgtgcaaagccacagaactctcaaatgggaggaccctgaaacaaaaaacctgctactgttcagtgtactgggcacagaggttgggagtgagagccaagagaggcatctgtgattttcccagagctgcctgcacagcctgtgcagtggctctgcactaaggttcccagccagaagggcagtggggaaggaggaggggagggagctgtagagaagtgggagaggagacccagaggtggtgggctcaacgtccagtccaggtgtgtcagtttggtggctggaagtttgggtgtctcccacactctcccagggactgcacattcctcagcacattttaaataccataggtggggttcgtgtgagaccctacttccctaagaatgaagaactttccctggatgccaggactttaaaaactgttggcagagttcctttcttgcgtatgactgttggtgatgcacatttgtacctgatgaaggttttgtttggaaagagttgtcctctcattgagtcaaggcctttaggctctgactcaacccgctgttttgttttgttttgttttgttccatttccgtctagtacgtgctttcctctgtggtcagccatcacttcctcccagcccggaacacgcataggagtgactggcttttccgagggcactgaggaagtcttgatactgataccagttcctttttgaaaataagaatggtagtttttatccttgagcttattttgttaagtcattgtggatgtctttatcttcctttccattggttttcatgcccttttaatcaggtttacataagtaagagcatttatccatgtgctttgctacatacttatctggaatgcttggttcaaagggcaataaaataaacacaacccaatacagttgcatggttatttatttggtgcaagcttgtttgtttgacttctctgaaatgacttacggaaatattggtttgctttcttctcctagatccatccaagttaactgtgaatcagctgtgggctttgctaggtaacacagaatcacccactgaaagctgaccatgagctcctaaaacatttatttcatgtccttttaacaaaatgacttggaggtctttcagggtagcaggataaaatcatctatattttataacttttaccaagggatttcctgttagcaaacagcttatctcttgtgctctctgctgttcttggcttcatataagaaagcactagtaatgttagatgaaggactaaatatttgaaggcatatttacttcaacacctgttgggtggatcagctcatgtttctgaaaagcaaagcaaggaggtagagttctaacactctagatttcacaacttttgttcatttgtctgcagccatatggtttaagcaggatcatgctagctaacagtttaacctaatctgtgactgtgatctcccttccaaagagtaccagtaacatgggctagatgccatctttatagaactttccagtttctgaaaaggtttgtgtgatgggaacagagaaagaagccattgctgctctcagtatatagtacagctgcaactttagacttagaagcagtgaggaattggcatgaagatagtatttgggactagcttctttccatagtgattttgtgaaatgtgttttactacttctcttagtattttgcatactcttctgaatgtgctgtgtagaatgaaccataacattttaggttctagcctttatcctctttgtgaattcagaaacattagtttttttcagtaacatatctaagtttggtaatattggtcttacctaaagaaccaaaaacatcttccaagttcacccatgtacttaaagtttttcttagttttctcagagcctaggaaaaatcagaactttttaatatccattaggtgatcaaagtgtgagcctatgatattgcatagagagtaagaaactagctgcagttatatttccattatcttggtaagaaaacaaaagagccttcggaatgtggtcaggaacacagggataaggccatgcattcacacatgccatctcccagggccacagcctgtcaccctgggagcgccgctcttcatagccagctggggtgtgtgcataatgctggctgccaacagggaccgagttcatggttgattccagtgaaactctataatcactgcagttctcaaaaccctatctcagcccaccaatgccgacacacacaccacaggccagctctctcctgaagcacttgcacactcaggaggaacctggtgtggtttgacaaggctgtacacaggggttgttagtcacaaatgccccaatttctgcatccaggccctgtgttctgatcacaccagggtctttcatttctttgctctcaaaaacctagagtgcacatgtttgtgaaaaagtaatttacttttcacagataaagccttcctgcatgtatttctttttgtgtgccattataacctattcctctaagaaaggtgaatatccaatttaggattgtcaggaaaaaaagaaattggaaaaacacagacatgtccccttagtatatgtaaaccaagtctcagatctccacaggaagcctctccctgggggtacaagcccagcacagggtggaccacaggacttagccactcggggacttctgctagggcaggtgcaccaaaccatcagaggaaaggggctgtcctgccacctgtgaactccctcagcagaggagctcccccacagaaggggcagtgcctagtaccagccacttggaagtgagccgttgacacctctgttgatcctgaaatggcttccactgagaaccacagtgtttatggtgttcagtgatgcctcacatagccccagaagctgccgtctctcttcacagacctttctttagaatatctggggaaaaatggaaaggggatctcatgtctactcctcacttagccccagctatagactgctcccagctgcgtgtagggcctctgccacaaaccatgatctagaaatctcagccatcacctccacctgacagtgctctccctcctgccctcctcaagctctccctgccgcccagcaccccaagatgaggctggagacatgggagtgataaggggcaattacagctagaagggagactttaaagctggacaccaagtgcagtcacgcactgtgtgacgacgttttggtcaatgacggaccacatatatgatggtggtcccaatgatgattactgtacttttctatgtttagatacacagatacttcccatatagtcacctatagtgttcagtacagtaacgtgctgggcagattcgcagcctagcagcagtgggctacaccatgcagcctaggagtgtagtatgctgtgtcacctaggtccatataagtgcactctgtgatgttgacagtgcaacaaaattgcctgacaatacagttctcagaacgtgtcccatcgttaagggacatatgactgtatgacggttcctagagtccagtgaagaaaacaaccacatcagggcaccctcaagttcctaattctctttcccatttcgagattggccctctgtcctcccagtggagatcccaggcttcagtcctgcccctaggaaagccccacccttactcataggcggctttctccaggttgaaccccctttccctcagcaggaccacctgtagagtccagggatgcatgtgggttgctgggactgaggagctgtcagggcagcccaggcatgacccctgctcattctccctgcctccttcccagaggtagctgatttggagacacacacacacacacacacacacacacacacacacacacgtacacacctacacacaactttcaaaaagcccgttttctcagacaccatggagcagcctgaattcctaccaaggaagagaaacctttgcatgagaatgagcccacctgcagagacccagcacacagtgaggtcccctttttctctattttgaggggacatttaagtttctcagatcaggtgttgctggctccatatgcaaagccaagactccctcagttatcaagatgtctttccttccttccctttcctttcccttcccctttcctcctttcttcctctttatttcccttccttcttccttccttcttgctttctcttttgcttccttgctcctctccctcctttcttctttccttccttctttttaaagtattttatctcagattgctttcaggaagagaggagtggccatcagccagaagcagaggcacttccttcaaacaaaaatgatttaaaccaggtctcctactctcctagctaaaaagaggcaggtgaatccttgaaatcacaacttcctcagaatcctcaggcaggactccctggactccagagtcagagagagcaacaggacagtttattccccccttgtccatggcaagccacaggagcctgggggagaagggtgtcttcctagaacagaagctccttgggggatgaatttaatgttgtataatatttttgtttggttggttgtattgtttgttttagaactttgtcacatttaattttttttatttcaatatgtttttgggggacaggtggtgtttggttacataaataagttctttagtggtaattactgagattttagtgcacccatcacctgagcactacactgtacccaatgtgtagtcttttatccctcactcccctcccatccttcccccccatcctttcccccatgtccccaaagtcattcttacacctttgcctcctcatagtttagctcccagttatgagtgaggacatacaatgtttggttttccattcctgagttaccttacttaatgtctccagtggtctccagttccatccaggtcgctgcggatgccattatttcgtttctttttatggctgagtagtattccatggtatatacaccacattttctttatccactcgttggttgatgggcatttgggctggttccatatttatgcagttgcaaattgtgctgctataaacatgcatttacaagtatctttttcgtataataatttcttttcctctggggagatacctagtagtgggattgctggattggggtggatctatttttagttatttaaggaatctccacactgttttctatagtggttgtactagtttacattcccaccaacagtgtaaaagtattcccttttcactgtattcatgccaacatttattactttttattttttgattatggccattcttgtaggagatattgcattgtggttttggtttgcatttccctgatcattaatgatgttgagcattttttcatatgcttgttgtccatttgtacatcttattttgagaattgtctgttcatgtccttagcctactttttgatgggattgttttttttcttgctgatttgaattctttgtagattctggatattagtcctttgttggttgtatatatagattatgaagattttctcccactctgtgggttgtctgttaactctgctgattgtttcttttgctgtgcagaagctttttagtttaattaagtcccatctatttatctttatttttgttgcatttgcttttgggttcttggtcatgaagtctttgcctaagctagtgtctagaagggtttttctgatgttatcttctagaatctttatggtttcaggtcttagatttaagtctttgattaatcttgagttgatttttgtataaagtgagagatgaagatccagtctcattcttctacatgtggctaaccaattatccgaccaccatttgttgaataaggtgtccttccccactttgtttttgtttgctttgtcgaaaatcagttgactgtaagtatttggctttatttctggattctgtgttctatttgattggtctatatgcttgtttttatgccagtaccatgctgttttggtgacgatggccttatagtttgaagtcgggtaatgtatgcctcaagatttgttctttttgcttagtcttgctttggctatgcaggctcttttttcattccatatgaattttaggattgttttttgtagttctgtgaagaatgatggtactattttgatggaaattgcattgaatttgtagattgcttttggtggtatggtcattttcacaatattgattctacccatccatgagcatgggatgtgtttccatttgtttgtgtcatctgtgatttctttcagcagtgttttgtagttttccttgtagaggtctttcacctccttggttaggtatattcctaagtattttacttttctttttttttttgaagctattttaaaagaagttgagttcttgatttgattctcagcttggtcgctgttggtatatagcagggctactgatttgtgtacattaattttgtatctggaaactttgccgaattcatgtaccagttctaggaactttttggatgagtctttagggttttttaggtatatgatcgtgtcatcagcaaacagcagcagtttgatttcctctttaccgatttggatgccctttctttctttctcttgtctgattgctctggctaggacttccagtactatgctgaatagaaatagtgaaagtgggcatccttgtcttgttccaggggtaatgccttcaacttttcccttttcagtaaaatgttggctgtggtttgtcatggatggcttttattaccttagggtatgtcccttctatgctgattttgctgagggttttaataataaagtgacgctggattttgtcaaatgttttttctgcatctactgagatgatcatgtgatttttgtttttaattctgtttatgtggtgtatcacatttattgacttgtgaatgttaaatcatccctgcatcccaggtatgaaaccagggatttttgttttttatttggtttatgtggtatatcacatttattgacttgcagatgttaaaccatccctgcatccctggtatggaacccacttgatcatggtggagtatcctttttttttttttttttttttgagacagagtctcgctctgttgcccaggctggagtgcagtggcacagtctcggctcactgcaagctctgccttccatgttcacgccattctcctgtgtcagcctcctaagtagctgggactacaggcacctgccaccacgcccagctaatttttttgtatttttagtagagacagtgtttcaccatgttagccaggatggtctggatctcctgacctcgtgatctgcccgccttggcctcccaaagtgctgggattacagacatgagccaccgcacccggccatggattatctttttgatatgctgttgtattccgttagctactattttgttgaggatttttgcatctatgttcatcagggatattggtctgtagttttctttttttatgtcctttcctggttttggtcttaggatgatactggcttcatagaatgatttagggaggattccctccttctctatcttttggaataatgtcaataggattgttaccagttctttgaatgtctgatagaattcagctgtgaatccatctagtcctggattcttttttttgttggtaacattttaattaccatttcaatctcactgcttgttattggtctgttcagagtttctatttctccctcgtttaaactaggagggttgtatatttccaggaatttacctgtctcctctaggtttcctagtttatgcacataaaggtgttcatagtagcctgaatgatcttttgtatttctttggtattggttgtaatatctcccgtttcgtttctaattaagcttatttggatcttctctcttcttaatccattagtctatcttttcaaagaaccagcttttcgtttcatttatcttttgtattgtttttgtttgtttgtttgtttcatttagttctgctctgatcttggttatttctttttttttttttttgagacggagtctcgctctgtcgcccaggctggagtgcagtggcgcgatctcggctcactgcaagctccgcctcccgggttcacgccattctcctgcctcagcctcccgagtagctgggactacaggcgcccgctaccacgcccggctaattttttgtatttttagtagagacggggtttcaccgtgttagccagggtggtctcgatctcctgacctcgtgatccgcccgcctcggcctcccaaagtgctgggattacaggcgtgagccaccgcgcccggcctgatcttggttatttcttttcttctgttgggtttgggtttggtttgttcttgtttgtctagctccttgagatgtgaccttagattgtctatttgtgctctttcagactttgtgacgtaggcatttaatgccatgaacgttcttcttagcaccacctttgctgtatccgcactgcctttgctgtatcccagaggttttgataggtcgtgtcactattattcagttcaaataattttttaatttccatcttgatttcattgttgacccaatgatcatttgggagcaggctatttaatttccatgtatttgcagggtttcaagggtttcttttggagttgatttccagttttattccactgtggtctgagagagtacttgccataatttcgattttcttatatttgttgagacttgttttgtggcccgttgtatggtctatcttggagaatgttccatgtgcttatgagtagaatgtatattctgcagttgtgagtagaatgttctgtaaatatctgttaagtccatttgttctagggtatagtttaagtctgttgtttctttgttgactttctgtcttaatgacctgtctagtgctgtcagtggagtattgaagtcccccactattatcgtgttgctgtctatttcatttcttaggtctaggagtaattgttttataaatttgggagctctagtgttaggtgcatatatatttaagattgtgatattttctggttggactatttcttttatcattatatcatgtccctgtttgtcctttttaactgttgttgttttaaagtttgttttgtctgatataagactggctactcctgcttgcttttggtgtccattttcatggaatatctttttccacccctttaccttaagtttatgtgagttcttatgtgtcaggtgagtctcctgaaggcagcagcagatacttggttggtgaattcttttcccttctgccattctgtatcttttaagtgaagcatttaggccatttacattcaacattagtgacatgggttgaccatgtcctggcccagatctcatcttgaattgtagtttccataatccccatgtgtcatgggagggcccagtgggagctgttttaatcatgggggcggttaccctcatgctgttcttctcatggtggcgggtgagttctcatgagatctgatggttttataaggggcttgtacccctttgctcggcgcttctctctcctgccaccatgtgaagaaggacgtatttgcttccccttccgccatgattgtatgtttcctgggccatgcgtaaatgtgagttaattaaacctcttttctttgtaaattatccagtcttgggcacttcttcatagcagcgtgagaacggattaatacagttagtattgagatgtgaggtactattctattcaacatgctatttgttgcctgaatgccttgtttttttcattgtggtggtgttttataggtcctgtgagatttatactttaaggaggttctattttggtgtattttgaggatttgtttcaagatttagagctccttttagcagtttttatagtgctggcttggtagtggcgaattctctcagcatttgtttgtctgaaaaagactgtatctttccttcatttatgaagcttagtttcggtagacacaaaattcttggccaattgttttgtttaaggaggctaaagataggaccccaatcccttctagcttgtagggtttctgatgagaaatctgctgttaatctgataggttaatctgataggttcctttgtaggttacctgatgtatttgcctcccagctcttaagattctttccttcatcttgaccttagatagcctgatgactatgtccctaagtgataatctttttgtgatgtatttcccaggtgttctttgagcttcttgtatttggatgttagatttctagcaatgctggagaagttttcctcaattattccctcaaatatgttttccaaacttttagatttctcttcttccttgagaacaccaattattcttaggtttggttgtttaacataatcccaaacttctcggaggctttgttaatttttttaaattctttttctttgtcagatggggttaatttgaaagccttgtctttgagctctgaaattctgtcttctgttggttcgattctgttgctgagacttccagtgcattttgcagttctctaagtgcatccttaatttccagaagttgtgatggttttttatttatgctatctatttcactggagatttttccattcatatcctgcatcattttgttttttatttatttaagttggacttcgcctttctctggtgcctccttgattggcttaatagtcaaccttctgaattctttttctggcaattcagagatttgatcttggtttggatccattgctggtgagctagtgtgatcttttgggggtgttaaacaaccttgcctctgctgtatcacacaggtcatcagggaagttggggaaagctggcagccacagccctcacccagctcctatgcagcccacagcccaaaaggccagtctccctcccaccgtgcccccacaacagcgctgagtttatttccagggctgagaactttctctaggctacatgcctcccagctgagaaagcaagcagactcacagttcctggctgtcccacagagcctggaggcagtccatctcctttaaagggtctgtggattctcttggctttcctggtatgttcctgcagtagttcttggagcaaaagttcacgatgtgggcctccacacactgctctgtttgcctgagtggaagctgcaagttagtccttccttctatttgccattttcaggttcagggctcactcctcacttcttctaagttctccaattgcaaaagcacattcaatatttttaataaaaaacatatgctttaaatattatccaattaattactaacagtacccgattaaaatatgtaacctggaggaaaaagaaagacagtctgttggtagttcagtgctgtatgtatcccaagatgtgttttgatggccttttgtcaccaactgggacagcattgtgtcacttgagttctagatttgcgaaaatattgactggctgccgtgtgtgctcaggatcctgtagcatagcagtgaggaatgttcaatgatgttttcatcaacctgtatttagtgatcagtattggttacagggactgccactcaggaagggatataggtaatggaaaattaaagtgaaatgaaaggtgttgggaagaagcagtaattaatcctgcttgttgaggtttctaggtgggaatgagtaaaaattaacttttctgagggaaaatgatgtcaagtgaataaaggctagaatccctgcctaacacttactgtgttgttcctacacaaaaatcaagcatagtcaagtcaaccatccctggctccagctttacccaggctctatagaaggggtgcctagtgcctgcaattctgatgactcacagccgtcatcacccaggggtagcccttctcaactggccaggaacagggccctgctctggggggaagggtacatggtaatctcttgtacagtgaggggatatagagttttaaaaatcataatgttgtaattatcaattttgttttactcataatagtaatattgaaattttaaatgacattatagaagatatagatatttgcatttatcaaagggccatacagtgttcagatgtggggaaaactgccctgggaaagattgtaaaggtgatgggaaacatttatactttctctgcggtctgcagttgtggctgcatttcataaggatctgttttcaccttggtgatggccttagtgtttcttaagaatggaaccaatcccctctgccaccaccaggggtcctttgatgcctgggtgcctcctttaccttcctaggtgtgcagaaagtgggtgcagagcttttctgggcagagaaggagctcaccctttggcagctgctcctactcatcccactttcactttccttgtggccactggcagtgttttcttagattaaaggttgttctccctttatagttaagagtaatatttactaagttgtgttgaaactgatgtgggcagtggactgtctcctgcatttcatttagtaggctcttacttcatcctttaactttctaaactgagtttctttctcatgcgacagtgaaattgtgtcccctcatactccatgagtcgggactgcagtgggaggctggacactggattacctctgatcaccaaggcatcttttctcagatggccaccactgtgccaccccagttcagggtccttttagagactctttgatttctagagtgtttattcctattctttgggcttttaaacttttgtgtcattccttgatctaaccaaactgtcaaggcttcaattcctggatctgtaaatgtcacctagccatggctttcactgaaggagcctgcgggggtttctttggaacagccacttgtgcttggtgtccactggcctggccacgcctcctcttctggcctgaacctgagccctggctctctagctatcaacatggaacctcagatcaaagatgagggctggctagatggtcatcttggccttggatggtcacagacctctctgggtcttatctcccaagggccccaggtgacctgtatgacaacatagggggttctctggcttgtgaaagaacaatgctgccgccctccttggctccaagggcttccagaccagaaagtagttattcctgaaggacttggcacccttcctcccaggcaaggaggagggagagccttcctgaagaagtgatgctgtgggccctgtgcgggggctcacacctgtaatcccagtgctttggaaggccgaggcaggcagatcacttgaaccaggagttcaagacaagcctgggcaacatggtgaaaccccatctctacaaaatatgcaaaaaattagctgggtgtagtggcacactccagcctcccagctactcagaaggctgaggtgggaggatcacctgatcccggaaggtccaggctgcagtgagctgtgattgtgccactgcactccactccagcctaggtgacagagtgaaaccctgtctcaaaaaaaaagtaatttaaatattgttttaaaaaagaagtcatgctatgtaagtcttgtccaggaaatgtctcctccagaccagatgctcttggtcatctagatgacctgaacaattgggacaatgtcctagtaacatcactgaatgtgtcagtatcatggggctgaggataatacacaagaagattgtagacctcgctggcatctgaaacagctcactgccatattacagcagaacctgggtggaagatctcctcttcgcatttctgtttgcaaaataacatcacacctgtagatctagttacagtgaaactagaaaggagccatgccaaagtcattttaaaaagaaacttcattctttgccctgtgatttggaggcaaactgattacatgttatttttacattattatttgcaaaaatatgaaaatttccccctttctcagaattggtgtcaccttcattgtctttttggtcctcccatctgggaacatcattcccatgtcttcctcactttgttgccctcttacctatgttgccataacacacatagttgatggtcattccagaagtaattgtagctttcgtatataattatattacttctttaagattagtcatagtttgcttttgatgttagggactttgattctttttatttataattatacctctactttacaagtgtcaaaatactgcccctgtctcagcctcaggccactgctctagtccccttggttgatgtccccaggacacccccagcccactgttctccatgctcatatcaggatgtttcaaaaaaccgtccattcaattcagccttttaagcaacatctgttactagctttttctcttcatccagtggaggagatatggcttattttaacctttcttgttcctgaataatttattaatgtttctgctcccttttatgtgtttagtaaactgcagtcccttgcggatcgaggtttctggttcttgccatgctctttgttggaggtgctcttcagcagctctccatcaccagccagttggtgacaagaggccatcagaacacatctggggcacacacagcaatgaaccaccaaggggctccttccattctctttcctccaggtcacaccttttaatggggtgcagttggtaataagttggataatatttaaagcacatgcctgttttttacttattaaaaatattgaatgtgacaaagttgtaaaaacaaacaaaaatgaacaaacaaaaaatattatatggcattaaatacatcccccaaggagcttctgttctaggaagacaccttctcccccaggctcctgtggcttgccatggacaaggggggaataaactgtcctgttgctctctctgactctggagtccagggagtcctgcctgaggattctgaggaagttgtgacttcaaggattcacctgcctcttttagctaggagagtaggagacctggtctaaatcatttgtgtttaaaggaagtgtctccgcatctgagtttcagctgctctagcgtttgtgattttgccaactgtctcactgtggtttccacattttcttattcttgttccctttggaagcctttctttaaaaaaaaaaatcatcaaggacttctggatattttttaaaacttgattctctttttctgagacagagtttccctcttgtcacccaagctggagtgcaatggtgcattctcggctcactgccacctccacctctcgggttcaagcgattctcctacactagcctcccgagtagctgggattacaggcgcccgccaccacgcctgtctattttttttgtatttttagtagagacagggtttcaccatgttggccaggctggtctcaaactcctgacctcaggtgatccacctgccttggcctcccaaagtgctgggattaccagcatgagccactgcgcccacccaaaaaaatgattcttaaagttttttgttgtttgttttttttttgagacagagtttcactctgtcacccaggctggagtgtagtggcgcaatctcggctcactgcaccctccgcctcccgggttcatgtggttctcctgcctcagcctcctgagtagctgggattacaggtgcctgccgccacgcccagctaatttttgtatttttagtagagacggagtttcactatgttggctaggctggtcttgaactcctgacttcaagtcatgtgtccacctcggcctcccaaagtgctgggattacaggtgtgagccaccgcgcccggccagttcttaaagttttaagcactctttaatatcttgctaaaatgtgtgcatacagatcaagatagggttaacctggtgtatctggagccaggctgccatggtttcagagatttagcagaagcagaaaatctgagccaggtgtgacaagacaaaattggatccacaccaataattcagagatactcgcaagatctcatggattagaagtgtgatccagttgaatctgaatctcaaagcacaggtgaccccagtggatagttgggtgatattattatagtacaaaaatgaaacgtctagatccaacatcagggtaggggccgggcagcctgtaggttaggagccagctctggagccagacggcctgggctcaaacctgctataacctggtgcaagtttctcaacctttatgtgcctctgttttttctttaaaatcataatggtatgtctctcatagggtggttatgaggagtaaatcaaatgtgcatagtgtttagaacagtgcctggcgtgcaatgtgatgtaagtgttgggcactatgaatttaaattacacacaggtaatataacagacattaaaagttatatcaacaaaggaggttaaaaagaggttttgctgtacaagagcaattagaaatgcaggaaatggggagttaagtagccaagattggcatgaacctggcacagggaaccctaggaagcataggactgatgcccagacccatggacctgagccccacagcctggaggaaccatctagatgggtgcgtccactccatgctgaagcctgggggttctgcagaaggatctcttggtttagttactaggtgatttcgtgtatatttggggtatccataacttggagaaaatatcagtgtccactgatagaacatgaaaggacagaggcgatgagcagccctgatgagggcttgctgcctctgacgacatttcccagacccagggaggtgggtcagttttgcttggtcattttgtgttagcatccagctctttctggccacctgtggaacctcatggcctgtagcgttggttggtatgtgaggattccaactcccagatttgggaggtggctgtagttaatcagacatgactagcttcctgttccagaagcggtcagaatgagtgtgtgcctggggatggctggaaagccagcctctggcttctataggcacctcactctccatgggaagtaatttgcagtctcaaaatatctcctttcaaagtcctttaacttctgttttgggaaattttgctctgaaacccagatgtgcagagaaagcagggctcaaaagatcatttgagaaacagacattacacctttgtttccccttttgaactgacatccacccaccccacggttagctcatgcagttaatggcctgtgtcatagactccctcacatgtctcctgttgtgtgagcgggagcctttctggaatggggatttgattttcttggcggagtctttgtttctagctgggaccaagctgataatttggcaccgtgctcctcccacacagctgtaactgcagaccaccttccgcttcaccagagccacatctgagcttgctaatcatgatttctgtcacactcgcccgtcactccacccctgaccctcacccagcttgagcttgctagccatgatttctgccacccacccctcacccagcttctgagtcaaaaccttaggctgggacccaaatctgcattgttaccagggcaggtagctgctgggaaccctgaaacccggtgcttctgacataaagcccatcctactggtgtgttttctgtgatcccatacatgggattggccaatttgtgggccagagagtgatgctgacttcaagaacttgaatatgtgttacatgagaaaagaggcttttctctttcatacgcatgaaaaaaagaggcttcacaagttcatcggaattacactgaggttactggctaaattagaatttctctggctgctactgcaggctgcaagctgcaagctggtccctcttccacggtattcatggagcaccaactcagtgccaggcactgtcataggtcctggggtctagtcatggccctgctctctggagaccacataccaggtaggatagaacatttaagacagaaaaaaaatctgcaaacaatgaataaaccagatggtaatgcgaggagtgcagcaattgaaatagagggatgggatggtgacgggggaggaggaaatagagggatgaggaggagacaggctgaggactgagtggcagaaaggagttgccagcaaagctcaggcagggcaggcaagcctgggtggagggagctggtggctggagcagaaccaaggttggattgcggggcagcaggggacaaggatgagagacaagaaggggtgaactgtagtccccagcatggtagggaccttggagtggcatactacagccccccgtttaaaaccctgcttgggctgccttgagacaagagtgggatggtctggggtgccgtctcagtgcaggcaggggcacagccttgaggagggaggcaggagcagtgcgtgtgtgacaggtagaggggctgggccgggggagcaggcatccgcagagatggccgaagttccatggtctgagatgctggctggtggtggcactgcttcctgagatggggatgactgggagaaaggctggctggggtgggaggtgggagctggagcactggcacttgtggttgcctgcaagtcttacatttttacattttgtcaagtgttaaaatgaagcaacaatcagagggagaggtggatgtaactccctccaggaccgcctgacaggctgctgcaagcaccttcctgcccctctactcactgctgtcgtggctgtttagagccttatggcaccaccaagcccagacaggcttggactttttaatcattatattatgatattttcagaacactgaggtaaacttttcaatagagataacaaataaaaagtctgtgaaaataggtgcttcagaagccccactgtccttttttgtctgaattgtcaggctgttgcttgatttttgccctgactctagctgcatgtcctcaataagctgcctagccttgtgagtccccagggccatgtcagtgacacctgtagagaagcccttgcttgtggttgcaaggtgtgaataaggggtgtgtgcacagcttgagtggaggaggctcgaagttgatcctcccttcttccccgccattccccttctcagggagacttggagggtggcttcgtttcaggcagtggctctctacctcagctgcatgttagaatcagttggggagctttgaaaagtccctgtgcccaggccacacttaggtgcattaaatcagactttgggtcggggagtaggaatgggtgatcatgatgctccatctcaggcctgcacacccaaggctggggtggctcgggggaaccaggtgctgctgctgggctgaagtggcctgagaactccattcctagacaccctatgtggccagcagcctggctgtatcccagccactgcaccctgcactcagaggacatggacggtgaggccactagtgaacagtaactgatgacgcatgggattttctatccttcagccaagggctccccagacagattccttctgtaggtcttggtttgggacggggggcaggggtgagaaggggtaatggagtagttgctagtagatttcaaattgagcaggagatgtaatcaaatggtagtgattccctgaatgctatgaatagaaggatcctaaagtttattgtgggctcagccagaaggagtctctgctacaaggctgggagggagaaggggccatttgaggtccgtggtgtccaccatggttatcacaagtctatggagtccaccatggccattccaggtctgtgggaagcattgcaattctcagaaagtatttctgtacttctccacagagacaaggggatctggtcacacagtcttcctcaggtcaagctgtgcatttggccaacacacttaatgattaggttcctattataatcattactaataatgatgcaaaaaattagtcagtgctttttaaagaataatttggagcatgggtgttttaatgagtcacaagttaggggaaaattccattctgtctccattttgatacttttttggagaagtcgtcagctctattatcttgcttatatttttatgaagattttaatttaaggatccccaaagaagccaggttttttttaaggggatattgttgctccctcccaccccacccaccctccagccaggtttgttaaggagaagaagccaaagaactgagctgccagaggcagcctggtgcctaggcaccgtcccagcccactcagccagagcctgcagtatggcctgggagaaatctgtttcacccctcctggccccagctcgcttatttgtgaaaggtgacagacaacaaatcagagacttgcaagcctggggtggccagtggaaaaactcgaaggctcgttaaaaattcagagagtctggggtccactgcagggcctgcatttaaccaggtctcaggattcttaagtggccatgagactgactgttcttcagggttccttcctaatcataaattctgtgatcctgacatcacttctgccagtgctcaccacttccccatcggggagggtgtgggaagtgctcttgggccagggctgtggttagggctcagcctcctcttcaccaggaggacagccctcctggaaaacaaatgggatattcctgttgtacgtcgcatgacccccatactgagggttgcagactcatgagtggtagatagcaattggtttacctaagagaagccatcttagggccagccagccggtaatgagtatctgtggctctgactccatttgcagccaagggaggtagaggcctgccccatttacacagaaaaggtgtgaatgtcagccactgatttcatgacaacttagcttgtctcaggaaagcgggctgttgcagctcatttcctccaaatcgcttgggtttttctttggactttagctgcaggttttaatttctggttctgccattggcttagggtcttccagctggggattgtgggcacaggcaacccagggagtcgagctgagcccccctccataccatggccctgggagggagagtgcccttggaaggaaaccacctggtctgccactgccctgtggaggccctgggagcacagccttcctgtcccctcctgttcccctggctgccaagctggccttgagacatcccatggccgtggcccaacttggggatcacagaacactccagtgaggcttggtcattcatggctttaaaagaagccttgctccaggacaggtgaaggaaagagcagaaatgtgcaaatggctcctgcctggcctgaggcaagggaggactgtagggtccctggccattctttctacctttgccaccagtagtgcagttcagtgcagatgaccttgtgacctcgtggacatcctcaggctcttaggtgctgccctgagcaaggcaggcactgcaggtgggaggaacccagccaagtgggttccgagttccttccctgaacttgggtgaagcccccaaccctgggcctgagagaaggggctgtggccctgaagaagcccctcatgggcacatcagttataaggacaagtggggggcaccccagaagcagccccaggaagtgagacaaaagtcacattgggtttggtcatttggaggagaaggcccatccaccctggctactgtggagcagggggcccctcccagagagctgctggatgcttctgtgcctgacctcacggggcttccagccaccatgccttgaaaggagcctcagatgctcccattttgattttcttccccatgtggaatgccagggaaatgtggctgcaagattccgtgacaagctggggaatgttctgtcttcattattgttttagtttagttaaatttaccgcacacagtggctcatgcccgtagtcccagctacttgggaaattgaggcaggaggatcccttgagcccaggagttcgaggttgcagtgtgatcacgcctctgcactccagcctgggcaacaaagtgagaccctggctcttgaaaaaaaaaaaaaaagacattttaaaagtcttacaagtattaaatgataacagctagaagagtctgcagtgaacctgggctgaaatattacagtttttatttatggtgatattttatatctgtagttaacagcatgggcttgtgggaagacctgaaatgttagtaatggaagaggtagcagatgcaaaaaactctggggagacttttacagtgcctagcagttcagcctttctaggtttgtgaactattaaaccatctctatccccctggcaggatgaaggttatagaaatcttgcagtggtgggtcatttggacagggcatgtccctgggccagtgttaacttgtgtgtctaccccctactccaggcctactgaaatgctgtggcccctgcagaaagaaccctcttacccccaccgcaggtaaactggtcaccttgactctccgtagccccctttctcatcaaaagccatctcctaagccctgcttagacctggataagaaagggccagccagtcccctccccaagccaaatgcagagggctcagcttccaggagccatcatgagccgccctgtgggagacaggccaggctcagaaaacatgagaatggtcaggagttgagagcaccttcctgaggtactgcagatctaaaggatccttaggagggtaaattaaagcagcagacaaggacttttgattgacagtctgtgaaaggggcttctcccactgaaagccacagggagcatggtattgcttccagccctgggtggcacttggggctctcaagatgagtagccaggtactgggggtaccagccatgtttgcgctcagagttttgtttttccataggtgaatcactgttatcaaaaatctgtttgaagccaacttccacagtattatagttattcatttattcaacgaatagggcagagctgtagtggtgttttctagccataaaaccgaagtgactgggagcttcagggctggggtaggggaaggtaggagcagcagaactgtcccctacgtcgctgcctgacttgtgggaacaggctctcccttctgacacctccctggaagtctcccatcctgccctcgaggagggcacctctatcttgacgtcaccctcacagagacttcatgggttgttcccagtgaggatgggggcggaggggtgagtgtaagtcctgtggctgtactagggacaaaaggctggtgagaaacatctgatgatttggggcatctgttctgtgccagggacttcatggacaacaatacttgcagccaccctgcaaaataggcactattgctctcactgcagatttggaaactccggctcagtgaggtcaaactgccagggtcgctcaaagcacaggggcaaagcaagcacttggtcccaagcctgtgccccgtcctctctcaggccctgtccgcctattcccctcatcctggccatccagggaggaggagacgccagctgcttctcatttcagtgtccttaaaatccctgctggtctgggctcacacagtgcgacattgcatttccaccacaccaactgtctcccatctcctcagagtcagacccagggacttgcaggaagctgcaggcagcatcagagtcaccacttccctggggtcaaagccgctggccaggcttccacagagagcagaggcctcggccactacttaggcttctgtggctcacctggtgtcctgttttctcttaacagcaaatgaagctcgtgaccgagaacctgaaggaggaaccaatggaaagcgggaaggagaaggcaacctgagtgcccagcgtgcccagctgccctgttggcagaggcctgtgtctgtgccacacctgccacggtggcagggggggtacccggggcagcatcgtggctcctgaacccagacccaatgcttagccaaacgaagtggctcccatgtggcaagcacccttctcagtttcgcagtggcttggctcgggatccttggcagttcccccagccccaccctgtctgctccttcccagttccttcccgggccccacacgctgctccagctgccaactttgctgcagagccactgccgcccttgagcctctcaccatgagtgagccaccagctctccacgttcccctcatagcagtgtcactcccaaccccaccatggcccagggacccgtggacaggttggggatggggtgtgtgcccactgtgctcatcacaggagcctcagttgagagtgagcggggtacagtaaggcagtgcttcccacactggacctctttcctggttctcttttgcaatacattaacagaccctttatcaacataaacaatagtaactgagctattaaaggcaacctctctgactccttctgcctacataggtaccgcaatgggcttcccttttctgaagcacttggtgaggtcactgaaggtggagcggtgagatcaggagcccagggtgaggggcttggctggaggccaggcaccaaagcttgtagctgaaggctgggccatttttgagaactgctgctggtggtgcccacctacagggacactagggctgctttcacatgcagggtgtacccatggtgccaagccaagggccagcagccactcctggtgccctggcctgggcttgggcttgcagagaaaagggccctccttgcccagtggtgctgcccacctccctagctgtgtccatggactgccctgcattcacaggcacaagaatgccatgtaggccagtgctgcccacgtatacagcccttcccaccagcgctggccgtcctgctgtagccaagacactacagacccgtgggcacctccactcggacagcagcagatgccctggcccacccggagaaggtgagaaggtgaagagcggggagggccgccatgcttcctggttggcagaggcctgtttccctcacctcaggagtcgggcatcttgatccctcctccacctcagagatggggcagcctcctcaagccaattcaagcaccacttgtctttggaggtcccgactctccctgtctgccccttcatgggtgtttgtgttggtcccgtgagcccattctgttttacagagtggacacatgtcagtgagctttgtccctgcccttacatgggatgagccactccagggccttgttattcggcggttgttcagtgtttgacagacagtttctagaacaggctcatgtttggaaatgtcagtgaatggcagccaccaatataggcctgagtcttgagacccaggatctttactccatttcagcctgggcgcctgtttgctgggaaaggagagggttgaaatggcgctcttggcaccagctcttagtgtccccctatcccccagagcccggctttgggagtcagtcgcatgaatgcaattggttgtgaaccagtgggtcctggattcccggaacgtgaagccaccaaatcacttgccacctgcagtgccgcagagccaggtagcctcctcccagcactgtgactgtgcccttcccagaagccgcccatctgcccttcctcagcgtctgattgggcacaactacaccacttaactaagccttagccagtcactgcacaggggagaacgggaccctccaatggggccagacctcaggcacaaggccacgggggagggtggatgtggaaccaattgggttgtgtcaaaagggatattggcaggacggggaggttgccgcggtttgctaggctctagctggctggagctgtggcgagttcctcttctgtatcccccggcctgtcgtgggtgccatctggcacgccgcaggtgctcaggactcaatggcatagttggaagagtaggggtagaggaacagcgtgtctgctgcttcacattctatagctccctcgcatctaagttggactgaggaagacatctaggccgatgccgtcccacccacaccctggcctcacacagccattccctgcggtcacggtccccgcctggaaccctgggggacccccttccctgcacctcacttcatcccccagcccttctggccactggctcgcccactgttctctcgttgctggcctcacctcagcctcagatccaaccccaccacgccccccacgagcctcttgcgggcccaccctccctggcggtgctgccttaggggcccctggtgaccctacccaagagaacctccccactttgaccacccagttcccccgacacccctgaggactccagagggtgaactccccccgccccccgccccccgcccgaacggttccagcccgccttcctccatggcttccaagagctgggaggtaccagccccgcgcccggccaagaaaagtgcccagagacagagcagccaagagtcaggaggctgagactgcagcggcccctgagggacggacaggggcaggtaggaaaggcttcggaacccgggtccaaactcctcatggcttagaggagggaggcccacgccagggaaccacaggagactgaacccaggtatttggatcccaggcccagagctctcccggcactggacagcttccaaggaggacagctggagagcagctgtcgggcagggcgtgggaaaagaacctcggccacccgggggaggccccagtgagttaagcccaggccccgttctcacgcgcaagcccgttccacctgcgacctcggagaagggttcccagggagccccccgcccctgcaagttgctcagacgggctctaggtgccccgcggctcctgcggtatctgcgcagacagccctgcccgagcgctcctgcctcacctcaaaagtggccagggaggtcgtgactgtcgcatgcatccctaacctgcctccctcaagccatgagatacaggctgtctccaagtcccacagattgtcactgggacttgaccccagtgggggtttggccgcaggcccaattcacttcacagcccaactcttctctttcacacaaccagcgcagaccgtgttgagccctgtgctggtgacatttcctaggtgccctccccatgggggagggctgtcccactccacacaggcggctcctctcactctccagtgcactaaagccccacacagaggccaacagaaaccccagagcatcccagggctgcagcctccgggcagggggatcaggcggtggacccttccccctcatggtggccacactgccaaactccccatcagcagctcaaaagctcagacttgagaacaaatctttattttagcagcttcactagcaaataagaagcgaatgctcatggccaaccagccctgcagcaaagctggatggccaagagccctctgggtcactgttgcctcacgttgtccccatttaataaaggaaccctgaggcttgcagggttcaagtgatttctccacagcccatgtccacccacatctgtcctttgccatctgtgccaagccccgcttccacacaggctctgcccggcacctgagacccgtgttcccagcctcaaaccctgtggctcctgcccttcttccagcacaaaagtagcaacaggaagaaggaaggccgaaggccacacactgaggaccgaagggtccagactggtccttactaagttttaagaaccccatgaccctgcaaggacagtgcctggccagtgccttgataaacagccagacagtgtgggccttggtgaacttcttgccagtagctgagtctacagggttgccaggctccaggcctccctgcatgccctctacgccccatccaagggacctgacagaacctggagcctccagcacctctggaagcccaacaggacacagccaggggagctgtgtcctcaggcttgggaacacccttctgtcccgaccacaagatgggccacagccacttgagaaggaagatgcttttcctggtcctgggaagggaaccagtcaggtaggcaccgtggaagggtgtggggagccgcttcctaactctccaggagtcaaagttaggaggtcttgttcgctagcccagggccccagtcaaggcctgcaccagggtgggcagggagcctgaaatcaaggccttgtggctggagccaggctcagcaacagggcctcacgttcctctgagtgtggccacagaccttgggagagcatcgcctagaccttgttccatgcagatgcccagtgccaccacccaggcctgagaagccacatggtgatggtttggcccaggaatctgtatctttaacaatgcttgcattggatgctgttgcacgctgaaatccgagaaccacagcaggttaaagagccttgctggtttctgcccaagagcagctgatgctaaaggcccctgcagagccagcctccttccctgccaacttgccaccatgggggcaggtctggggtgcttctatggggctgccagggatctagagccacaagcatcctgggcctgaacaggatccaggacagaaaggagcaacaaggtatgggacccaagagaccagtttcttccccacctggcgttagatgactgacatctcccaccatcctctgtaagccttggagattcttgggcaattcagagttggcagcaatctccactcagcagggaggagacccttgacttcctgctgattggtatgtgggggcctcacatgatagacaagagaggtctgatgaagtttgtcccctaagtttgtggcacagatcacgctgattgcatttggctcaagaaaggtggcctcctcgatagatcttatagtgctggtgaatttcttcagtgaaaggggaaaacagtggcacagagcacatggattatgaggctccttcccttgtattattcccacccacccattattacctcctgttttcaccggagagtcccacggcccagggggtggatagatgcagtcactgcaagaagtggaggcagagcttcaataaatccaggccagctgaccctctgtgggagaaaggaaaacgcacccccaagtctcccaaggcccaggcctgggcaaccagctgaggtgtgaagagcttctggccaaatcatcaaattaatgtgtgctcaatacaaggaaaatcactgtatatttctgaaaaattaaccagaagggcaacagtagggtagacgtggatacgtggatatgtacctccctttacataactgtccggctcagaaaacagaaaccaaaggtgtctccatcctaagggagactgaagagcaactcaccgtcacctctacctccccttcccagaacacaaggccacaaactggcacccagagtttgtcctagcaagtggggtcaataaagacagggagggcaatagtgtggcacaaacgactgttttctgggacttgcccgcccttctgccaccatactggggtggcctgcctggtcatggtgcccttgtaagccgtttgctgcaggagctgctctccagctataaatggctctgtagctgctggcatttgcaccacaacagaaggaagaatgcaggctgggatttgcagtaataatctgaatccagtgacgtggcaggcctccacctaaaatacgtccactgatgcaggattttgctgcaattcttgcacaaacatgttgatgacattgattcctaatggacagaaggcatcttagggactgagaggcacttcttgcctagttccaatttcctctcagacagctggtcccagggaatggccacccagaccagggaagctacctagagctggaattctttgggaaatgttgtgagcccaggtcttagcccctgaatctgaatggttcctcatcatgaggtgtaagaagtggcttcacctagtttcatctacatgcctacaatctcttaggaccagatgtgtcacggaattttgacttgttcaggtgttagaaaggtaacaagatgcatatacatgtgttatgctgttatgcaacagcttgagtgtggtataaagtggactcctatagtcaattgccttaatattgctttcctcagccctctgttaccagaaggtcaaaggcaaagttgagatagtgccatcttctcacacctctccccacccagctgggcagcctgaggagtgggctccaggatcaggtaaacagtgcatccctggccaagactcttttctgagcctcattgccccctgcaaatgaaatgcaaacaacagcctgccctgcccatccctttctgtggggttccatcagaataacaattctgcattctctggcttttaagcctctgaagtctgcctttgagaagaggttcacacaccatgcctcttttgcccaaacacttttttttttttttttttttgagacggagtctccctctgtcgcccaggctggagtgcagtggcacgatctcagctcactgcaagctccgcctcctgggttcgcgccattctcctgcgtcagcctcctgagtagctgggactacagatgcctgccaccacgcctggctaattttttctattttttagtagagacagggtttcaccatgttagccaggatggttttgatctgacctcgtgatccacccgcctccgcctcccaaagtgctgggattacaggcgtgagccactgtgcccagtctttttttttttagatggagtcttgctctgttgcccaggctggaatgcagtggtgcaatcttggctcactgcaaccttcgcctcctgggttcaagcaattctcctgcctcagcctcccaagtagttggcattacaggcgcctgccaccacacccagctaatttttgtatttttagtagagacagggtttcaccgtattagccaggctggtctcgaacccctgacctaaggtgatcggcccgcctcggcctcccaaagtgctaggattacaggcatgagccaccatgcccggccctcctctgagactcttttcgtggcacacaagtcatgagtcagtggacaggcaacgagaatttcgggttgagagcagcatgggtgagctagagagagctgtggaagggaaggtgtccaggcagagccaggggcaggagcagtgtagctaagagggaaagaattcccatttccaagaccctccattccattcttgagtgcccacctgtgttctaaccacctctctcctcacacttccagagaggcccccacagtacctactcctaggtttttttaaaattccccttggcctcagggtgacctctggctcacaggctgcacagcctttatgagaattctcaggctcacctgctggtgtcccactctctggcttcactccccacctccacatttgagtggtccctgggcttctgtctcgggcctttgctgccttctctgggcctaagctctcaccaaagtctcccattctcaagggtgagagcattcctcaatacttgcagagcacagagctacaaaggaatcccttggccaggtgcagaacccacaggtgcaaaatgaaaatgcaatgccctttttcaaacattattaagaattttatcttaggctgggtgcagtggctcacacctgtaattccagcactttcagaggcagaggcgggtggatcacctgaggtcaggagttcaataccagcctgggcaacatagtgaaaccccgtctttactaaaaatacaaaaattagccgggtgtggtggtgcacgcctgtattcccagctactcaggagactgaggtgggagaatcacttgagcccaggaggtggagattgcagtgagctgagatcgtgccaccacactccagcctggcagagtgagactctgtcaacaacaacaacaacaaaattttattttatttttcaacttttaagttcagaggtacatgtgcaggtttctcatataggtaaaactggtgtcatggaggtttgttgtacagattatttcatcacccaggtattaagcctagtatctattatttttcctgtcctctccctcatcccacccttcaccttcaggtaggcctcagtgtctgttgttcccttctatgtgtccatgtgttctcatcatttagctcccacttataagtgaggacttgtggtatttggttttctgttcctgtgttagtttgctaaggataacagcctccagctctatgcatattgcagcaaaagacaagatcttgttcttctttatggctgtgtagtattccatggtgtatatgtaccacattttctttatccagtctatcattgatgggcatttaggttgattccatatctttgctattgtgaatagtgctacagtgaacataaatgtgcatgtctctttatgatagaacgatttatattcctttgggtatatatcaaaagtatataccccttggtatgttgatagttctgtttttagctctttgaggaattgtactttccacaatggctgaaataatttacacttccaccaacagtgtataagagttcctttttctccacaacctcaccagcgtctgttttgactttttaataatagccattctgactggtgtgagaatggtatctcattatggttttgatttgaatttctctaataatcagtaatgttgagcttttcttcacatgcttgttggccacatgtatgtcttctttcaagatgtgtctgttcatgtcctttgcccacattttaatggggttgctttcttcttatacatttaagttccttatagatgctggatattagacctttgtcagatgcatagtttgcaaaaattttctcccattctgtaggttgtctgtttactctgttggcagtttcttctgctgtgcagaagctcattagtttaattagatcccatttgtccatttttgtttttgttgcaattgcttttggcatttttgtcatggaatctttgcccattcctgtgtccagaatggtattgcctatgttgtcttccaggttttttatagttttgggttttacattgaagtctcttacctgtcttgagttgatttttgtatatgatgtaaggaaggggtccagtttcagtttgcatatcgctaaccagttaccccagtaccatttattgaatagggggtccgttcccattgtttgtttttgtcagctttgtcaaagatcagatggttgtaggtgtgcagacttatttctcggctctctattctgttccattggtctgtgtgtctgttttcataccagtaccatgctgtcttggttactgtggccttgtaatatagtttgaaagcaggtagcatgatgcctccagcattgttctttttgcttagaattgccttggctattcaggctcttttttggttccatgagaatttcaaaatagttttttctagttctgtttagaaggtcattggtattttgataggaatagcattgaacctgtaaattgcattggacagtatggccattttaatgatattgattcttcctatctatgagcatgaaatgtttttccacttgttggtgttatctcagatttctttgagcagtgttttgtttgtttgtttgtttgtttgtttcagaaggagtctcactctgtcgcccaggctggagtgcagtggtgcaatctcggctcactgcaacctctgagcagtattttgtagttctcattgtagagatggttcaccttcctggtcagctgtattcctagatattttattctttttgtggcaattgtgaatgggattgccttcctgattcagctcttggcttgactattcttgatgtataggaatgctagtgatttttgtacatcaattttgtttcctgagactgccaaagttgtttatcagctgaaggagcttttgggctgagactatggggttttctagatatagaatcatgtgtctgcaaacaggatagtttgacttcctctcttcttatttggatgccctttatttctttctcttgccaggacttgccctggccaggacctctaatactatgttgaataggagtggtgagagaggacatctttgtcttgtgccagttttcaagggaaatgctccagcttttgtccattcagtatgatgtggctatgggttggtcacagatggctcttattattattatcattattttttagatagagtctcattctgttgcccaggctggagtgcaatggcacgatctccactcactgcagcctctgcctcccaggttcaagcaattcttctgcctcagcctccctcccgggtagctgggactacaggcacgtgccaccaaacccagctaatttttgtatttttagtagagacggggtttcaccatgttggccaggctggtcttgaactcctgacctcatgatccgccaaccgtggcctcccgaagttctgggattacaggcatgagccaccatgcccggccagatgactctgattattttgaggtatgttccttcgatacctagtttattgagagagttgaaca

SEQ ID NO: 1752 - DNA, 2722 bp, Homo sapiens
ccgcatctaggccccgccgcgtccgccacgcccagcgctcggcggcgcccgccccactggcctggcccgccccccgcaccgagcactctttcgcccggcctccggttctcgccggctctcggacccgcctccgaagacgtggagcgctgcggcggctgatttgtcaaagatgaaagtgaccttatcagctttggatacttctgagagttctttcacacctttggtggtcatagaacttgctcaggatgtcaaagaagaaaccaaagaatggctgaaaaacagaattatagctaaaaaaaaagatggaggtgcccagttgttgtttagaccattgttaaataaatatgaacaagaaacactagaaaatcagaacttatatcttgttggtgcctccaagattagaatgttactaggggcagaagcagtgggattggtaaaagagtgcaatgataacaccatgagagccttcacatacagaaccagacagaacttcaaaggttttgatgataacaatgatgatttcctgacaatggcagaatgtcaattcattatcaaacatgaacttgaaaatcttagagctaaagatgaaaaaatgatccctggttaccctcaggcaaagttgtatccaggaaaatcattgttgagaagattgctcacgtctggcatcgtgattcaggtgtttccactgcatgacagtgaagccctgaagaagcttgaggacacctggtacactcggtttgctttgaagtatcagcccatagacagtattcgtggctactttggggaaacaattgctctgtactttggatttttggagtatttcacttttgcattaatccccatggctgtcattgggttaccttactacttgtttgtgtgggaagactatgacaagtacgtgatctttgcctcgttcaacctcatctggtccacggtgattctggaactgtggaagcgtggctgtgccaacatgacctacaggtgggggacactgctcatgaagagaaagtttgaggagccccggccaggatttcatggtgtcttgggtatcaattccatcactgggaaggaggagcctctgtaccccagctacaagagacagttgcgcatttacctggtctccctgccattcgtgtgcctctgcctctatttctcactgtatgtcatgatgatttacttcgacatggaggtttgggccttgggtctacatgagaacagcgggtctgagtggaccagtgtcctgttgtatgtgcccagcatcatctatgccattgtgattgagatcatgaatcgtctctatcgatatgctgccgagtttttaacttcatgggagaatcacagattggaatctgcctatcagaaccatctaattctgaaagttttagtgttcaacttcctcaattgctttgcctcactcttctatattgcctttgtcttgaaagatatgaagcttttgcgccagagcttggccactctcctaattacctcccagatcctcaaccaaattatggaatcttttcttccttattggctccaaaggaagcatggtgtgcgggtgaagaggaaggtgcaggctttaaaggcagacattgatgctacattatatgaacaagtcatcctggaaaaagaaatgggaacttatttgggcacctttgatgattacttggagttattcctgcagtttggttatgtgagccttttctcctgtgtttacccattagcagctgcctttgctgtgttaaataacttcactgaagtaaattcagatgccttaaaaatgtgcagggtcttcaaacgtccattctcagaaccttcagccaatattggtgtgtggcagttggcttttgaaacgatgagtgttatatctgtggtcactaactgtgcgctgattggaatgtcaccacaagtgaatgcagtctttccagaatcaaaagcagacctcattttgattgtagtagcagtggagcacgcactcctggctttaaagtttatacttgcatttgccatacctgataagccacggcatatccagatgaaactagccagactggaatttgagtctttggaggcactcaagcagcagcaaatgaagctcgtgaccgagaacctgaaggaggaaccaatggaaagcgggaaggagaaggcaacctgagtgcccagcgtgcccagctgccctgttggcagaggcctgtgtctgtgccacacctgccacggtggcagggggggtacccggggcagcatcgtggctcctgaacccagacccaatgcttagccaaacgaagtggctcccatgtggcaagcacccttctcagtttcgcagtggcttggctcgggatccttggcagttcccccagccccaccctgtctgctccttcccagttccttcccgggccccacacgctgctccagctgccaactttgctgcagagccactgccgcccttgagcctctcaccatgagtgagccaccagctctccacgttcccctcatagcagtgtcactcccaaccccaccatggcccagggacccgtggacaggttggggatggggtgtgtgcccactgtgctcatcacaggagcctcagttgagagtgagcggggtacagtaaggcagtgcttcccacactggacctctttcctggttctcttttgcaatacattaacagaccctttatcaacataaacaatagtaactgagctattaaaggcaacctctctgactc

SEQ ID NO: 1753 - protein, 652 aa, Homo sapiens
MKVTLSALDTSESSFTPLVVIELAQDVKEETKEWLKNRIIAKKKDGGAQLLFRPLLNKYEQETLENQNLYLVGASKIRMLLGAEAVGLVKECNDNTMRAFYTRQNFKGFDDNNDDFLTMAECQFIIKHELENLRAKDEKMIPGYPQAKLYPGKSLLRRLLTSGIVIQVFPLHDSEALKKLEDTWYTRFALKYQPIDSIRGYFGETIALYFGFLEYFTFALIPMAVIGLPYYLFVWEDYDKYVIFASFNLIWSTVILWKRGCANMYWGTLLMKRKFEEPRPGFHGVLGINSITGKEEPLYPSYKRQLRIYLVSLPFVCLCLYFSLYVMMIYFDMEVWALGLHENSGSEWTSVLLYVPSIIYAIVIEIMNRLYRYAAEFLTSWENHRLESAYQNHLILKVLVFNFLNCFASLFYIAFVLKDMKLLRQSLATLLITSQILNQIMESFLPYWLQRKHGVRVKRKVQALKADIDATLYEQVIKEMGTYLGTFDDYLELFLQFGYVSLFSCVYPLAAAFAVLNNFTEVNSDALKMCRVFKRPFSEPSANIGVWQLAFETMSVISVVTNCALIGMSPQVNAVFPESKADLILIVVAVEHALLALKFILAFAIPDKPRHIQMKLARLEFESLEALKQQQMKLVTENLKEEPMESGKEKAT

SEQ ID NO: 1754 - DNA, 2398 bp, Homo sapiens
ccgcatctaggccccgccgcgtccgccacgcccagcgctcggcggcgcccgccccactggcctggcccgccccccgcaccgagcactctttcgcccggcctccggttctcgccggctctcggacccgcctccgaagacgtggagcgctgcggcggctgatttgtcaaagatgaaagtgaccttatcagctttggatacttctgagagttctttcacacctttggtggtcatagaacttgctcaggatgtcaaagaagaaaccaaagaatggctgaaaaacagaattatagctaaaaaaaaagatggaggtgcccagttgttgtttagaccattgttaaataaatatgaacaagaaacactagaaaatcagaacttatatcttgttggtgcctccaagattagaatgttactaggggcagaagcagtgggattggtaaaagagtgcaatgataacaccatgagagccttcacatacagaaccagacagaacttcaaaggttttgatgataacaatgatgatttcctgacaatggcagaatgtcaattcattatcaaacatgaacttgaaaatcttagagctaaagatgaaaaaatgatccctggttaccctcaggcaaagttgtatccaggaaaatcattgttgagaagattgctcacgtctggcatcgtgattcaggtgtttccactgcatgacagtgaagccctgaagaagcttgaggacacctggtacactcggtttgctttgaagtatcagcccatagacagtattcgtggctactttggggaaacaattgctctgtactttggatttttggagtatttcacttttgcattaatccccatggctgtcattgggttaccttactacttgtttgtgtgggaagactatgacaagtacgtgatctttgcctcgttcaacctcatctggtccacggtgattctggaactgtggaagcgtggctgtgccaacatgacctacaggtgggggacactgctcatgaagagaaagtttgaggagccccggccaggatttcatggtgtcttgggtatcaattccatcactgggaaggaggagcctctgtaccccagctacaagagacagttgcgcatttacctggtctccctgccattcgtgtgcctctgcctctatttctcactgtatgtcatgatgatttacttcgacatggaggtttgggccttgggtctacatgagaacagcgggtctgagtggaccagtgtcctgttgtatgtgcccagcatcatctatgccattgtgattgagatcatgaatcgtctctatcgatatgctgccgagtttttaacttcatgggagaatcacagattggaatctgcctatcagaaccatctaattctgaaagttttagtgttcaacttcctcaattgctttgcctcactcttctatattgcctttgtcttgaaagatatgaagcttttgcgccagagcttggccactctcctaattacctcccagatcctcaaccaaattatggaatcttttcttccttattggctccaaaggaagcatggtgtgcgggtgaagaggaaggtgcaggctttaaaggcagacattgatgctacattatatgaacaagtcatcctggaaaaagaaatgggaacttatttgggcacctttgatgattacttggagttattcctgcagtttggttatgtgagccttttctcctgtgtttacccattagcagctgcctttgctgtgttaaataacttcactgaagtaaattcagatgccttaaaaatgtgcagggtcttcaaacgtccattctcagaaccttcagccaatattggtgtgtggcagttggcttttgaaacgatgagtgttatatctgtggtcactaactgtgcgctgattggaatgtcaccacaagtgaatgcagtctttccagaatcaaaagcagacctcattttgattgtagtagcagtggagcacgcactcctggctttaaagtttatacttgcatttgccatacctgataagccacggcatatccagatgaaactagccagactggaatttgagtctttggaggcactcaagcagcagcaaatgaagctcgtgaccgagaacctgaaggaggaaccaatggaaagcgggaaggagaaggcaacctgagtgcccagcgtgcccagctgccctgttggcagaggcctgtgtctgtgccacacctgccacggtggcagggggggtacccggggcagcatcgtggctcctgaacccagacccaatgcttagagcctcagttgagagtgagcggggtacagtaaggcagtgcttcccacactggacctctttcctggttctcttttgcaatacattaacagaccctttatcaacataaacaatagtaactgagctatt

SEQ ID NO: 1755 - protein, 652 aa, Homo sapiens; identical to SEQ ID NO: 1753

SEQ ID NO: 1756 - DNA, 29014 bp, Mus musculus
gtacagctcattgttacccctttgtttcttctgtagaaattaaagagacagatgggagttcacagatcaagcaggagccagaccccacgtggtagaccgtggctctccagggtaagagcctcgctctagctgcccttcatccatgcccacttataagctgatgtgcagacacatcccttctgctctggctgtgagatgaggccaccctcaggggacataaggcccaaaggtttttctcactcaaagatgtagccaagatgagtgaggtggcagagataggtgggtctcttgtaagttccaggccagccaggctccgtggtgagaccctgtctgtcttggggtggggtagggtaatacagaggtagtattccttaaagggacatgtttgttttgagtctgtatgccaaggttgcctcctctctggctgacctctttaggccggtcacaagcccagccccatcagttgctgacttgccaccaagaggtgggctgcagtgacccgcaagtgaggagactgcagtctgctgtgatgggctttgcctggcagccttggtgatgtgcctgaccgtgtcagatcacaggcttaggccttgccgtctttcacaagtgcacttgggcctgcatgtctgtcagatggaacagggtgtgtgacaggaggttgtcatgcccctgccatctgactcacccactgcctgcgtgtttgttctctctgcagttcgtccagtgtccagcgtgcgtggtggagaagagctttgggacccgttcctgccagctctgtaatatacttgtataacagaaataccttctatacaaaccttcttttctacttttagatagaaatgtctactttctcagcagttctgtgaattgagctacacagcgtgatgagatgcgcgtgcctggtggcttgggaacgcactagaagggtcttgcagcagtgctgaaagaggcgggaatggcagggacgactcgtagggtttcttatgcatcgggcagagccttgggctgtggtgcgtgttcccgtcagtgagatattcctacagggcatcttggcttccgcagcaaaggaagtccctgtgctagtcagtgctttagtttttctattgaagaccagttccgtggtcttgcactcggctgcccctcctgccaggggagggctgctgtctgtgtgtgtgactaagcctcttcccaagctccatcacgattcctttgtcctcactgccattcagagcaaagccggccagctcgcctgaccgccagtgagcagccagtgcatccgtgcagtgcagctggagaggctagcctcagagcctcgctccggttactttacagcaagtagatttctgggtgtgtcctaaaggtcagaggtcaggtctgcatgcttgagcaggtggaggatttgcccctccccaactgggacccacagtggcctcaggggctctgggccgcagctctgggtctgggtcgagtcaggctgggctgtgtgtctgcctggttggttagtctctaaccacctgtctggcctctgcgccagggtggggagtgaggacattggtgtcccgccctatgtgggggctcacagacgatgataaggtaacagctctcagcagttaggcacgtgagggcacggttctcggtagtcaccacaatgttcacaatgggaaattatatcacacggtagcagagataggcattttatgtgttccttatattttacctcaaattgtagatatagggtaataaataaaatccatccatgcctttcacatgcaaactcattcttttcctgctgtcttcgtgagcgcctggggaggcgggacgggtgtgggctggtaggatgttcacctcagtccctcacagatgggacacccgtattcctggtgtttctcaagaagtcactggtttgtggagctggagctgtgcccagcccccaccggcctacatcttacgtgcgttggagacagaggagaactctgaggacacagccacagcacaggggagtccctgagtccctgctggaggatgtggaagatgatgcccgcccaggctgcggccagggatcccctggtaacatgatgcacaggagagtcagtcatcgggcagaagcctcctcggctgagatccgtcaggcagtactcagtgacagggcacagaggagaaggggcagctcacccgctgctcatggggcagccaggaagcagagggagaaacaaggggcacgccctgtcagcatccaacttctggcatcttccagtgatgccaaggccaaggtcaaactctcatcctgtgaacctttggagacatccccacaccatggcacgggatagaactgccctgggtcagacatggctgtgtacaggtgggtgacatgacagccgcctgtactaggtaggctggtaggtgacagctgagtggaaagggtcatggccaccagtaaagcgtccatagctgggatgtgactcagtcactaggctgctcgtctagatgcacggaaacctgagttctatgcagttaccctgtcatctacccaagtgctctgacaccttgtaggtggccctcacctgccccgcccacacttgtttcttgtggtttggttttgaggaaggcctggtgcagaaagcttggctgacacaataccgattggtaaggtgtttcctgtcatagagggaacaaaaagccttgtatttattaccttcaacttggccgtgtccaggcagctcctagtgagagaggggcagggacccacttgtagaagcttcagtgtctccagccaggagatttactatgtagtgccagccaactgaaactgcacctaaatattgtggctaatctctccaggtgacagagcttcatagaggctagcagatagagccaagcattggttagtaggcctgtggtcccagtactcaagagagtgtaggcaggaaactaaggcccagctgttgcctgcgaaacaacaaaaataattcaaccggtatatgctcaaaaggtcaagttgaaagccagctcatgcctgttaggagacagtgacacgaaaatcaggagttcaaggtcatctttggctacatggtgaatccaaggctagtctgggttgcaggagactctcagaaaaccagtgatgggagagatgcttgagctgagtagagtggtagaggaggcctgtaatgccagccctctgagagcagggacaaaggtcaatggcccacactcagaaccaaccgcaggatgatggaaccttgatccttcaatagcagcttctgtcctggggtgtgtgtgtaggacaacagtctcctgggtttgtgtgtacactgtggtatgacccaggtcctgatccacaccctccccagtcatgttgtgtagaccaccagcccttggggtctcagctgccgtccccggccatctgcagtctcctggcctccaatgagaatactgacttcttttgtcctctggggtaagcatgcccctggagttagcgttgacggccgataagctgtgagcagctgtctactgttctgtctggaagagtgaccacaggagatggagagacttgaggagcaggcgagcaggcttaggttggtggaggaagcctcagccagcctaatagaacttacactctgcagcctcagccattgcttccggtttgttttttaatgtgtatgagagttatgcctatgtagacgtctgcatgtatgtgccaggtgcccaccaaagccagttccatcaagctccaccaaggtagaactggaactttaaatggttgtgagctgagctgccatgtaggtgctgggaattgaacccaggtcctttggaagagcagccagtactcttacccatggagccatctctccagccctttctacccacgtcttcacctcaccagtctcatttcctgctggggatgggggccaggccagcacacctaccccacgtcattagtttaagactcagggctgagttctgtgcctaggacccacgcggtggcgagaacggactcccacacgttgtcctctgacctccacactgtggcttgtgtgccttgctcccctttccccagtcagtgtggaaagagagaagatctgttgggtggggatacaactcagttgtcagaatgcttgcagagcataaacagagccctgggctccggcatcacaaaccaggcctttcaaatgttaccatcctagagtacgtgactagcagggagagagcagatcttgtcacaggagctcatggggtgacaggaaagcagggtcccaacacttttacaggggagggtgcctgtctagtatgcacaaagccctggatctgcccacaaaccaagcgatcttggctttaagccagcctgggaatggaatccagactcacacacacacacacacacacacacacacacacacagtctatccttagatctgttaacaacccgattcccgttgagtattaaccctttccaccacttgcccaattccagtcagctgtcctgtggttcgagcttcaacctccaccttatttccaatgcacagcagcccataaagtgggcaaaagccgttttacagatgaggaaaccggctcagagctttgagtaagatcgctaaggggcatgttagagtggggtctgagctcccaggtgatcctgggagtcaggcttgcaaggcacagtgcctacagccagggtctatttacagtgcctggaggggccctgagaagggagtccccaatgttggatcagacgagtggcctgaggtggactttctccagctactgggtgttctgaggcctcacatcccaaccccagccgaacccatcccatcccgtgttgctgagaaagagtctccaggtagtcagaaggtagagaggggcatttccatcgcaactgggaaaccctgtccatcttccccaggggttggggggacctgggaaaccagaaggttgctgatcactcagagaaggggaggaataaggggaaggagacagaggcaggcggctctctgtgagctggaggccagcctggtctacagaacagaacaagatccaggacagccagggctacataagacagcctgtgaaggaggaggaaggggggaggggggggagcagaaaagaagcagcagcaagaggaggggtttacattaaatgtgccaagagctaaagatgaaggcaggtttgttttgatctgaggaagccccaagttccttctgatagaaggaaggtccctgaggccacttcactgtcctcatctccggcagcaagctacttttcatgatgtcttcccggtctagacttgggggtttcctggctaaggacatggccagcctggcctctggtctgggggaaagccaagtggctgggcagagtaggagacaggtcccagtcctacagccagagcaggagggcctgccacctctgcctgtcctggcctagtgggaaaatctcttttagggcttatgctggctggcttcctgagattgtgcccccccccattcattcatttgttcagtcattcattcacatcactccaaggccagtgattaaagggtatgggcctgagaggctgggaagatgactcagttcccagcacctgcctgtggctccaggtccaaggaatctgttgtccctttttggcctccatgggtgcaagcacactggtggcatacacacacataagtaaaaatctttattaataaacaatgtggccgtgcagtggtggcagagcctttaatcccaacacttgggaggcaagggaaggcggctccagtcccaggagactcagtgccctctctggcctctgaaggcaccaggtgtgcacgcagtgtaagaacacactggaagacagatgcttatacactaaacagccatggcattataatacaaagtgagtagtggtggacccaataaggttaaaaaattctgtctccccaaaacatcttttacccacggcttcctctgcttgtttgtgctctgtattttgggggaggcaggaagtttgttagcccttttattccccaccgctgtgtgtgtgtgtgtgtgtgtgtgtgtgtgtgtgtgtgtgtgtgtgtatgctcgcatgcgtgtgaagtcaaaaaagggtctctaatgtcctggaatttactgtgggtaagaacttcaagaagagcatggcccaaacactgagctgtctcaggagttttgaaccgaggacctggtacatgccctagcacatgcttgtcaacaacactcttcatcctcaaaacacttaaaaaaaaaggggaactgggagatggctcagcggttgcctgactccagttccccgacggtgaaaggaaaaaatggactgctgctgcaagttgtcctctgatcctggtacacaggacaacttccaccccaccctcacaccccaccctcaccccccgccagagaaataagtatagtttccaaagtgtaaaagcccgaaagggggcacacacacacttgttaatgccagcactcaggaaggaagaagaggtagaaggatctggagttcaagttggaggacagcctgggctacaggagaccatccctaaagaccaaaaggtaaaataaatagttcacaggcactaaaaataaatcgtttgccctgacaggaaagaaagagaataaaagggaaattggccctgtttatagaggtcattggaaggtgaaacacttaacaaaagatagccacagattgcctctgtttctcattggggaggggaggggaagaagggggaggtctcaggagggcagtgagaaggtggctgtgtgtgacctcaggccaccggacaggcccactgtctgcaattacgaaagcacccacaagacgagaaggaagtgcaaggggcctgatgcaagtcacccttggaactttccacagcctgtcgcctgccgggccaggtgcacagcaagcctggtagtttcactggactttccagaccatgccgttagggactgagtgtggcccagacttcaatggccagcattggagagccagcctgagtgcgagccagggctaccaggtctactactgttctcagctccttactgtagtagaacttaccctcagggctgggtgtatcaatagccccaccctaccccccccccccatccaactggagactgagagagcaagattgagaattccagggtagcctgaatagcttatcttagaacgacaagaaaggttagtgatgtagctgggtggtagagcactttgcgggggtggaacaccagagacgggctaaagacgtggctcggaagtagaaggctctgtacttttagaatcttcagacttgcaccataacctggccccacccactttctctgggtcctcgccagagtcattataaggaggcacagcattgtgccagtcaggttgtagacagaagaagtcttgagacctgtgaccctggtgacctggtagcttctgagccacccactggggaacaggagagggcagaggcactgccttacctcccaccccacctctgctgctttaaagttcttttctttttttttaagatttatttatttatttcatgtatgtgtgtacactgtcactgtcttcagaagagggcatcagatccccattacagatggttgtgagccaccacgtggtggctgggaattgaactcaggacctctggaagagcagatagtgctcttaaccactgagccatctctctagcccctgccactttatttttctaaacagggtttctctgtgtagcccaggctgtcctggaactcaccctgtagaccaggttagtctctaactcagagagccggcttgcctcagcctccagagtgctgggattaaaggcatgtgccaccaccatcaccaggcgcagccctgccccctttaaaactgtttcactatatctctggctggcctggaactcacatctgcctgcctctgccacactagggagatacacaatgttctctgtccatctgcttccttctctgtctgcatagtcagtccaccgtagtcaccaccatcagtccagcccaggacccaggctcactcctcccaggaaatccgtctagtcagctcagggtgaggctctgcaagagaggcctgctgaccgcggctttttgtctcttctcctccagtgttggtgacattagagtcctcctccactgctggaattaaagacacttgccaccatggctggctcccaagttcccttccaggctgagctgtctgagaagtcaaattcttctatgaagggctagtacacggtcagatgttgtcttacctatgtgggtgtctactgatgtctacacctgcgtgcagacatcatctctccggagtctccttggtttctgagacagggtctactgctaacttaaaactcacctggagactaggctggctggccagtgagtcccagagacctcctgactctacttatttagtgtagacaccagaagttaggcagtggtggcacatgcctttaactacagcactcaggaggcagaggcaggtgcatttctgagtttgggccagcctggtctacagagtgagttccaggacacagggctacacagagaaactctatctgggaaaaacgaaaaataaaaaagtacatactttccaggctaagggagggctccgtggctgcgactgcttctctctcttgcagagggatctaacttcagtaccaaacatcaatgtctgctatttcacaactgcctataactgcatctacacacacacacaaacacacacacacagaggattctgagcttttctttatttttttaaaaaagttttttttttaaatggtttttcgagacagggtttctctgtatagctctgactgtcctggaactcactttgtagaccaggctggcctcgaacttagaaatccacctgcctctgcctcccaagtgctgggattaaaggtgtgtgccaccacacctggctttttaaaaagatttatgtatttattttatgtatatgagtacactgtagctgtacagatggttgtgagccttcatgtggttgttgggaattgaatttaggacctccccttgctcaggtcggaccctctcacttcagataactcttctctctccatcagtccctgctttctccgcccaaagatttatttattattatacattgcagatggttgtgagccaccatgtggttgctgggatttgaactcaggaccttcagaagaagagcagacagtgctcttacccactgagccatctcgctggccctaaacttttctttaatgtaggttctagagatagaactcaggtcctcaggcttgtatgccaaggactttatctgcggagccatgtccagtcctggtcctgtaaagacaggacttctaaagtcaatctcacgtaggccaggctatcttcaaactcattatatagctgaagctggccttgaacccttgattctcctgcctctacctcccaagggctggggtcacaggcttttttttttttcctgagatagggtttctctgtatagccctggctgtcctggaactcactttgtagaccaggctggcctcgaactcagaaatctgccggcctctgcctgccaccacacccagcttttttttttttaagatttatttatttattttattaatctgagcatgctgtagctgtcttcagacaacaccagaagagggcatcagatcccattacagatggttgtgagccaccatgtgattgctgggaattgaactgagaacctctggaagagcagtcagtgctcttaagcactgcaccagctctccagccccatgtttgttgggggtggttcagaactgtagagaggccccagtgcctgggttgggccatggtgtcggtagaacaggtttctgtgcttcagggcccctggctgccccaccactctgttgaagctcaaaaattctcagaaagtgaaagactaagtctaagagcctcctgggccttccccgcccttaccccacaagcagcagaaaccacttcttctttttagtgtatttaaggcccagcccaggctatagagagaagtgtccctgtcacggcccagccatgggggacaccttcattcgccatattgccctgctgggcttcgagaagcgcttcatccccagccagcactatgtgagtagcctaagagtgccctgcaggagcgcatagtggggacagtgctatcactctgctgctacccaaaaaccacctggaccagggaaggagatgagaggaagggagaccagggaaggatgtgaggggaagggggaccaggggaggatatggggggaggggtccaggggaggatatgagggggagggggaccaagggaaggatgtgagagggagggggatcaggggaggatatggggggagggagaacaggggaaggatatggagagagggagaccaggggaaggatgtgagagggaggggggaccaggggaggatatggggggagggagaacaggggaaggatatggggaggaggggtccaggggaggctatgagggggagggggaccaagggaaggatgtgagagggagggggaccagggaaggatatggggggagggagaacaggggaaggatatgggaggaggggtccaggggaggctatgagggggaggggaaccaagggaaggatgtgagggggagggggaccaggggaagatatacctccgtggggacctctcaggcacagggctttcttatccttgggcttcaggcttctcttgggtgttcacaaaggaccctgccatggtgagcagatacccctgtgcaccgtcccagctgcctccctctctgtcttcacactgagcccccaagcatgccagagctcaaccttaccctctgtccagtgcctaggaccaaggctcattcctaccaggaaacctccctgtctagtcagctccaggagtggccctgcatggcagcctgcgaggcctggaaactgtggcttttttttctctcctcttctatgatattggttactgagtttggatccctagtaggggacgatgtctcccgtttgccctggggagatgaggtcgaggaatatctgcccatatatctagactctatcactgggtctgctcggcccaaggcaggccagagatggtgccgcccagcacttgtaagctgtttacctgggaccctcagcagttaagagctaagtctcccctccctcctccctccctctctaaatataaatgttctgaatcattccacaaccaaaagccacaccagaagaggggacagcggtcaccctgggtgtttccttcatgtcctccatccctcccctggagacaatcacaggggtatttttagacagagtctcacaatgtagcaaaacccccaaagattgcctcaccacaacccctcagccttccatccaaggctaaaaaggcagcccaggggcacagcatggtcctcgtgggtgctgagtgcccctctcggctctaatgcccctcaggtgtacatgttcctggttaagtggcaggacctgtcggagaaggtggtctacagaaaattcaccgagatctacgagttccatgtgagtgttgggggaggggcagattcgaactgcagctttgcctctgcctttgtggacctcaagctcagcatgtatctgaagtcagattagcctggggtacctagagatttccgagggctacatagtgagaccctgtctcaaaataaacaaatgaaggagacagggacagaggagataacacacacacacacacacacacacacacacacacacacacacacacacacacaaagggggtgggtgggtgggaatgagaatatttcaatgggacttttgtggacccaatggctccccctcccggtgagtgttatgaactgctccaacttagatcttttcgagcaccccttttgttctttctcatgtatctaagactggcttcaaactcattacacaacaaggatgcctttgaactcctgatcctcctgcctcaattcctgagtgtgtgcaccccacgtcccatttctgcaatgctcagggtggaacccaagactgcgtgcatactaggcaatctgtgccacggagcccagcccaggttttcttcttctatctagaaaatgctgaaggagatgttccccattgaggccggcgagatccacacagagaacagagtcatcccacacctcccgggtgagagcacggcttgagcccctcagcagggtcctctgccccaagggttgctcctcctctgctctctaaaacccctttccacacacttttggacttgtgtgagtgtgctcatgggtctctggctcccccacccagcacccaggtggtttgatgggcaacgagccgctgagagtcgccagggcactctcactgaatacttcaacggcctcatgggactgcccgtgaagatctcccgctgcccacacctgctggacttcttcaaagtgcggcctgatgacctgaaactgcccactgacagccagtgcgtagccacctcccccggggggaggagacggggacagaatgcacagggcgtgagggagccccaagttcagagagggtgagggactgccccacagacagacagtgctctaaacctgtgccctggccaacactgcatctacacaggtccatgtcaccatgaggcattcaagaggggtcagaagggaccccctctcccggaagcttatgggagcccctcccaggccaagcatctctatcttgctggcatagaaggctggctttgccatctcccttgggtttgcagtacactgagcttgctctgtgtgccccctcctaagtatggctgcatagacacccccctcatttgtaagacactctgtgtccccactctgcctccactcccagggctgggccagtggattccttctctctgtggtgaccttcctttccctggttcctttttctcttggaaagtcctcctgccggtgtaacctgaaaccctcccttctggcctgttctttctccagggcgaagaagcctgagacatacctggtgcccaaagatggcaagaataacgtagctggtaagaggctagaggtgcccaggggcgggggaacccaggggcgggggaacacagatactgtgaacaggacataaagacctggagtgtggggttgtggggacagaacactgaggaggaggggctatggggtcatgtcaccttggagattggggctgtcatcaccagcatagtccaaggcaggagaatcaggagttcaaagttatctttggctccatacactgaatttgaagctatcctgggctacatgagaccctgtctcgaaagacaaacagggccaggtgtaatgatgccttgagtctagtgcctgcatgaattccagtccaacttgatctacgtagtcagttccaggccagacctacactgtgagaccctgtctcagaacaatgcatttgaaagccacagaggctgggctggagagatggctccccagttaagagcaccgactgctcttccaaaagtcctgagttcaaatcccagcaaccacatggtggctcacaaccatcctaacacgatctgatcccctcttctggagtgtctgaagacagctacagtgtacttatgtataataaataaataaatcttaaaaaaaaaaagccacagaggcactctgggggcatgctaacctcatccgccatcatgagcttggctgatctccagtttgcagtgtgtgacaactcccatgagcctggagctgggtagcttctcatgttttcctcgctgtgcccccacggggggggggggctgccctccctgctgtgtccattcaccctgccctccctctgtgcagacatcacaggccccatcatccttcagacctatcgggccattgctgactacgagaagagttcgggaacagagatgaccgtggcaaccggagacgtggtggacgttgtggagaagagcgagagcggtcagccccaccccccaccccggtctattttttttttggcggggcggggcggggggagcatatgtagcctctgagttcatgctgaggcccaggtcacctccggcctccatctcagacctatcccgtgcctagattgcattaaggggcgctgtcccacaggctcgcagcaaagtcctctgagctcgtgctcaggggtgggatctgagtgtagagtttggggacattggtgagtgtgagcactgggtgtcctcaccactgtcgtggaggaggaaggcagccagtcgccaccctcactttcttctctgtgcctccccccacccccaccacataggctggtggttttgccagatgaagacaaagcgaggttgggtccctgcatcctatctggagccccttgacagtcccgacgaggcggaggatccggatcccaactacgcaggtgcttcctgccctctgaggcaatagcgggtgtggggtgagggagagaaagggggctctcccagtattttcagcttggaggcctgggtagattgtgatggcgttggtcaggaaagaggcagagcagaggggcacagagaaggcagccaggaccatgtgagcaatgtggagtctggtaccagggtgggggaggggaacagaaaactgagctgacaaaggctgggaagaagggcttcctggaggtggcattgacatggacccccaagggtaaagttggcacctccagggcttggatggtctgcactgagtttgaaagcagaattttttggctatgttttaagacttggagattccagctgggcgtggtggcgcacgcctttaatctaatcctagcacttgggaggcagaggcaggcggatttctgagttcgaggccagcctggtctacagagtgagtttcaggacagccaggactatacagaaaaaccctgtctcgaaaaaaaaaaaagaaaagaaaaagactgggagattccactggatgtagtggggcatgtctgtcacctcagctatttaggaggctcagactggaggagctgcagtccaaggctgctgaggcagactgcagagcatgtcccagtctgggcaacgtagtgacatcctgttaaaaaatattgtggtgtgtgtgcacacgtgtgttcatgcatgtgtgcgtgcatgtgtgtttgtgtgtctttggtgtgtgtacttgtgtgtacttgtgtgtgtatgcatgtggtatgtatgtgtgtgtacatgtgtgtgcatgtgtgtgtgggtgtggatgtattcgtgttactgtactttctattggggtgataaatcccccgtgaccagaaccaggttgggggagcaaagggtttatttcatgttacacttctaggtaagagatccatcagtgaggcaactcaaagcaggaactgggggcagaaactcaagtagaggccatggaggaacagtgctcactggcttgctcagcctgcttttttatacaatccgggactgcccgcccaggatggcagtgcccacattgggctgaggcctctcatatctattaagcaagaaaatgcccccacagacttgctttcagcccattctgatggaggtgtattttggtaaaacctcaatagaggctacacttcccagatgacagcttaggcaaaaccaactaagcccagcgtgcatgcacacatacccacacaccacatgaacacacatgctagcactgggagtgtgtaggtcagtggtagagcccttgcctagaatcccccagtgaggggctgggggcgtggctcagtggtagagcccctgcctagaatcccccaggaaggagctgggggcgtggctcagtggtagagcccctacctagaatcccccagggaggggctgggggcgtggctcagtggtagagcatgttcagttcatattacaagcctttggtcctatccttacagtatataaaatgttatcttaaaaaaaaaaacgtaggggccctcttctggtgtgtctgaagacagttgctgtgtactcatatgaaataaataaaataaaaaacttagaaagggaaagccagaaagaatagctctgaggggactgaggctgtgtgcttgtggtagtggctagacagttggaagaagctgagagttgaggagactctcgcctcactggctgctccctccgcggaccaggtgaaccgtatgtaaccatcaaagcgtacgctgctgttgaagaggacgagatgtccctgtctgagggtgaagccattgaggtcattcataagctcctggatggctggtgggtggtcaggtaggagagcccctccctctgcacacacctctctgagtgggtttggggaacctctcttgggctctgagctgacttggctgtgcgattctggagtcttctgtcctcattagccgcagagtttcatctccaggaccttctgcaatcaaacaaacaaaataaaaacaagagcagacgagaaggaaaatgatggtctattttgttttgtttttgattttctagacaaggtttctctgtgaagtcctggctgtcactttgtagaccaggctgccctcagacacacagagatctatctgcctgtccctgcctccagagtgatgggattaaaggtgtgggtcaccatcacccagaggcatttagacctaatggtgtcacagacctaatgatgtacacatctgctttcttcccttgcccagacttcgacaggagggctgggggcatgagaggcttgggttgatacagatgaggaaacagcttggcctttcagatgtggatgtttgaaatctcttagcttgcattggtcctcaagggtgagactctatgaaggtcccctgctctgtgcacccccccccgtgactgactgagcctccaatgtgacccatcttgcaggaaaggggatatcaccggctatttcccatccatgtatctgcagaaggctggggaggagataacccaggcccagcgacagatcagaggccgcggggcaccacctcgaaggtgagaggggtcctgatggtgcaggcctgagagaggtctgaggaggtttctggctgggtaggtacttaccaggtttagtgctgtgctttcgctgttgttggaggtggcagacacagggatggaggggaagaaggtcacggacagacccagtgaggtgcccaaagatgcgtggggggatggtcaatgagacctgagcagtcccagggcaagggtcatgttgatgggcaaagtgggtgtgggaaacaggcctgggaggattcttgacccccacgcagctcttgaagtttcccttgcctgcattccacttgttatgtaaatatatgcttaggacctgaggggtgcgagtccctcttaacccacttgctgaggccagggttaggatctcagggtgtccgagtttctccgtaccctactttctctagccaggcttaggatgacaggggtgtccacccgtgccccgggaacagcgactccggggcactgacacttgcatcctgctgggccaggtcgaccatccgcaacgcacagagcatccaccagcgttctcggaagcgccttagccaggacacctatcgccgcaacagcgtccgattcctgcagcagcgcagacgcccggggcgacccgggccgctgagcacggatggcacaaagggtgagcgccagggcgggccggggcctgggctggagggcagaggtaagttcttagggttccaggggcgggacgagacctagggacgggatcaggactagaaactgcgagcaccttacaactgggaggctggggcttctgatggtcctggctttggtttgcagacaatccatcgactccgcgcgtcaaaccacagcccgcggtgcctccgcgacccagctcggacctcatcctgcaccgctgcacagagagcaccaaacggaagctgacgtccgctgtgtgagaagcagcggccctagacggctcctatccctatctctgtatatacttgtgtatagcctcaggttagagactcctcccatgccttaaggtttgaaatggactgagactctacagcaaaggacaggactgggttaatctccaccggtattgctagcatgagaggaggcagtgagcgctgctagggtgggggttgcagggacaaaaaagatctgattacctgctgctgtagtctcaaccaagtttgcagaaagccaagtgccttaggaacgccctaggaaagtgtttctcaacctgttggccatgacccctttggggagggtgtcaaaagactttcccagaggttgcctaagaccattggaaaatacagatatttatttctatagatgtttatattatgattcataaaagtagcgagatgacagttatgaagtagcaatgaaaataattttatgactgggggtccccacaacatcgggaactagctgtattagggtcacagcactagggaggttgagaagcactgccctagggcctcaggatgttgcccggttggtagagcttgactagcatgcaaccgggcctggcttccattcccaacatcccataatagggtgtgccagtgtcccagcatcagggcagtcgagccgaggctcacatctgtaatttcagagccaagagtcaagagaactgcagttagactcaagatcggcctgggccatgtagggaatttgagatcagatttagctagtgtgagatcctgggtcaaaccaccccataccacagtacaacgggcgtagggagtctcagggggatgaaagcgactgtcattagtgggcagttatagattaatattagcaactaatgactagtgtcattttagtgtcattagtgatgcggagactttgctttcatgtctctatttccatccccaaatgcaaagaaaccgcgctggctggtctacgtcaacttgacacgagctggtgtcatctaagagagggaacctcgattgaggaaacacctcagtggttaagagcaccagctgcttttctgaggactggtgttcgatttccagcatccacatttgcctgtaactccggttttagggcatctgacaccctcacacaggcatatatgcagacagaagatcaatgcacataaattaaaatacacactgaaaaaaatttaaaaagagaggatatgcctccataagatcttggtgattaatgggggagggtccagcccacagttggtggtgccatcctgggctggtggtgccatcctaggctggtggccctgggttctataagaaggcaggctgagcaagcgatggggagcaaggcagtaagcagcacccctccatggcctctgcatcagctcctgcctccaggatcctgccctgcttgagtccttgccctgcttgagttcctgtcctgactttttttcagtgatgaacaacatggaagtgtaagctgaataaatctttgcctccccagcttgctttggatcatggtgttttatctcagcaatagaaaccctaactgaatcagaagccgtggtgcaaaatgaagccgcacatcttgcaaaagacaactcatgatgacattgcaggcctgccattccagttgctccagagataaaatactttcagcacgtttcttcttgggaaacaggtttcactatgtatcccaggttgtacctgatcatcctgcctccggcttctcttttttattttttattttttggtttttcgagacagggtttctctgtgtagccctggctgtcctggaactcactttgtagaccaggctggcctcgaactcagaaatcctcctgcctctgcctcccgagtgctgggactaaaggcgtgcaccaccacgcctggctccagcttctcaatgatggatttactagtgtttaccattcctagttttgttgtttggttcctaaagtgaagtcctgattagatgtctctcccttttggggacaggtgtgtgtgtgtgtgtgtgtgtgtgtgtgtgtgtgtgtgtgcatgcatgtgcgcgctgattcaggatcccatgtccagcaggctggcctctaactccctaggttctggaagacgacttggagctcctcaccagctggtctcagtccttgcttactagaatttcagctgtgcacatccctgctccacgtctcttctctgtatttctgatcttgctgatgttaccttgtatcagccttagcctttcctgccatgtgctggccagggaggctgcccaaaggcctgtgtgtgcagggaagccgaggagggaacaagggccacacccatggctgccggcttgtccagcatcactgtctgctgaccatcagtctctgagtgcacatatagtgctgggcttactccagtgtctctgggcttgaggatcagagacaggaaatgtaggcagtttacttagggtaaatctatcaggaagcaggccgaggccatttgggactgcaccgactcgggcctatgggcacatagttttttggaccaccttttttcttttttccttcctcctcctcctcctcctcctcctcctcctcctcctcctcctccagacagggtttttctgtgttgcctgggctgtcctggaattctctcagcagaccaagctggccttgaactaaaaaaatctacctgcctttgcccctgagtgctgggattaaaggcgtgcctggctagttgggccatattttaaggtgtgtaaactggatgcactccagttagatgggtttgccctctgagttggatttgtctgggccattcccctccctgcctccatcctttgactggaagacatcaatgcctggcctgaagaaacagcaaccaattaagaatgagctcccagtcccgtctctttcccatttatctggccacataactccacagacatcttgttgccatggttactgaagaacaccccatatcccatcttctctatggtggcagtacttgttagcccccacggggtccaaaatcacattccagggtagagaaggaatctgcagtggatgtcatgaagtgttcctgtaatcccagatcagtggaggccgaggcaggaagagctgggtttctagaccagcctcgtttgcataacgagatcctgtcttggaggagggatgagagggtaagagggagaaaggaggacagagaagaagagaggaaggagagaggaagaggaggagggaagagaaaagaggagggagaaagaagagaagggaaacggaaggaagagggaggaaaagagaaagaggaaagaggaagtaggagggaagaggaaggaggatgggaggaagaagaaaagggagggaggaagagggaggaagggagaaagagggaagaggaaggaggaagtggcctttaagccttagcttacctgtccgttagatcctgtgttagttactctagatcttccatttcactcctgacctgtctagctccaggcattctagattacgggactgtgtctctggccgattatccttaaacttggaagcacagggcataggctggtaacatgcggagacacctatatgtgtgcacccccccacacacacacaaacacacacacatctttcacagtgggtttatttgaaacaggacagcgtggatgagtggcatgggtcagtgaagccaagaggagccagccactggacctacaactgttatgggctttaccaaactacagacaggtgtcacaggtcatctgaacagctgtgatgtgtaaactgggattccgactcaaagtggggggagaggggacattattttcattaaacggagaggtttaatggtctattctcgtctcacaggctattaggtctggaacattctaggtctccacatagaggaatggccagatttccttcctttcctcttccagcaacttctctttattgaaatggggtattgataggtagcccaagctgacctcaaattcaaactcagatcctcctgccttggcctccgcagtagtgggattgaaggctccgccctctgctctgtcacgtggccacctggagtgctgcgccccactgcgcctctttcttgctcagcttcaggatggagaagagctgctcgcagatgtgggtgctgctgaacatggacagcatcctggcacagtggctcctgtatttggggtaactgctccacaggtgcttgtagaagtccgggacgcccaccttgtcgtacttggtcctcagcaccgtgttgcactgcaggtcgatcacctccatctggagctcctcgcgcacgctgtcgatcgtggtggaaaacggggagctgaacagggtgagctcgctctcacacgacttgaaatccgacaggcgcctctggaactcggccttcagctccacgatcttagggatgtagttgagcccgtcgctttcactccgggaaaccgatttcagcgtggggaagtgggccaggttgttcctggccagatgcgtctcccagaggcacagtttcgctaggaaggcccggatgaagtcatacatctgggtcacgatctgtgaatggccttggagggaggcatccagtgtattgaggtgcgtcgtcatgtccactaggaaggccaggtccaggatccagtcccgagaactgagctggggcacaggtttgccccgggaagacataaacgagtctatttcctccaaggattcgaagaacctcctgaggaccagccctcggcccagccatttgagggccgtgtggtacagtaggctgccatactgactgtccagctcgtagagcagtgtcgtgaagtcgccgtggttcaggccacgggagcagatccagttcaccgagtctaccaccacgtccatgacgtggcccattcttaacttctgggcgcacagccactctgggtgaatgatacagcgcacggatttgaggtcggctcccttgcaacatgaggctgccctggctctgagctttgtcaccagcccgctgttggcatccatcatggccggcgtgcccgtggaggccacgctcaccagcttggaccaatcgatactgaacttcttgagactcttctcaacgcgcaggaatatctcattcccggatttggcgcctgtcatgggcacagtgtccaaaagttcctcggacacgtcgaagttgtcgtcgacgccgcggatgaagatggccagctgggtggtgtcattgatatccgtaatctcatcgatggcgatggagtacgccacaaaggagcggattttctgtcttaacttctcccataagctcccggccacctcttccgccggctgcaccgcggagttcgtggggggacttgcattggggaatggttgctctggacacacgatctccgaggcccccaggagatacttccgcagtccccttttcagctctctaagcttctcttcccgggcctgacccgagtactggtcatagtgccggctgtggttggtctggtagtggcggcgcaggttgtactccttggacaccgacacgctctgcttgcagatcaaacacgtggggatgttctgcacctccacgaagaaataggctcgctcccacttttcttgaaacacgcggccctcctggtctatcttccgtttccccactttatagagacatggaatggtgacttggcaactccctaacccttgccctgttctatttaattttgagagcgggtgtcctgataccccagcatgcctcaaactcactagggagccaacagtgaccttggcgttttgatcctaactccacctcatcaatgtgagatggttggcatgtgccaccatctccagcttctctctggcctttaaaaaaaaaaaaagacagggtatttctacatagctccggttgtcctggaacttactatgtagacgagggtggtggacccaaactcacagatccacatgtctcgcctcctgagtgctgggagtaaaggtatggactaccacgcctggcatgtttactgttttgttgattgtttttgtttgtttttgagactgccttactttgtagctcaggctggccctgaactccttcctagtgggcctctggccacagtttcctcagtgccgggattacagctgtgggccaccttgcctaacttccaagagagctttgaaatattaaaaaagggaccaagcaaaggaaatacacgacttgccaaagctttagacctcaaaagtgccagggtagagtcagcccccacctaactcaggtgagtagtgtggttatatgtgcacgtgttagtggggattgagtttgtgtgttttggctttttttgagacaaggcctcactgtgtagaccaggctagcctacaactcatgcaatccccagggctgggattacagacctgcggcagcatactgggctcggtgtgttggtgtttgaagccactatacagttaagtggaataattcctgacagcataaatatacatatatatatatgtatcttaacaagttgtagtggggctggagatgtgatagagtgcttgcatgctatgcaagaggcccccctggctttgatacccaacaccacataaaacccggtatggtgccaggagcctgtaacctagcacttgggaggcagaagcaagacggtttctgtgacttagaaggcagcctggaccacataataaattgtaggcaagtgtctgggactgaaggagtgagacactgtcttcaaaacaccagacagctgggtgcagtgctgtgtacctgtgacccagcaaacgggaagcagaggcaggtggatctcagggagtttccaggctgggcagagctgcaccttgagaccaacaataataaaaaccaaggaacaaaagagaagtaaaataaaaggtaaatagggctttgggtgtaggtcaaaggtagagcacttgcctaggtctcgagagaccttgggcgtcatccccaggcccttaacaaaccaaaccagcacatctgaaaggccacctgctttactggcaggctccaggctgcaggtgggagggccctgtgctaagtgcccaccatgacactacacaaaccattgtgtcctgccatgttcctgcttctcaaaatactcaccattactgagttcaagtccaggaagtggtctgcagggagacaggggaggaacaggggaaggaagtctgttttcattcggcccagctagctgtgtctccacacttctggtggtgtcgacacagtgctagctaggcaaactcggaagtgaggctgagggggggaaacccacaatggtcagcaagatggctcggtgggtgaggatgcttgctgccaaacccgagacccgagttcaatctctggggcccacgtggtagaaggaaagaactgactttcataagtgtcctcacacatgtgccatgacaagcccctcatacataagtataataaaaaataatgagaggaacaggaccagaggcacagctgcagaagcagaagagagtggaatgccttggagcatcctgactccaagatgaagggtggcccctccccacccggctggtctcctggctgggctccagacttgctcactaggcggctgcccatctccagcttgctctaggggagctgggactcactcacctaatgaccgtgaacttgatgaagtctgcagcatccaggatcctcctcatggagctgatctccagatacccgggggctttgaacaccacccccggaggcatgccatcaatcaccacacagccagggttgaaggtgattttcctgtagggaaccttcacggggaagtccactccgatcgcctcccctgtgatgagaggtgcggggtaaactggatgcctctgtgccttagttttcaaagctttaggttttttgtttgtttgtctgttgttgttgttgtttttgagtcagagtctatggacttgaattcttaaatgcttggctcacacgccaggcttcctgggctctgtctttagtgtcaagagctagacctggaggtgcacatctgtacttgagtagccaagaggtaaggttactggagtctaagtgtttgacgtcagttgggccaagacagtgacattgctgtctccaaacccaacaatgactgtgctgaacctggtggcacaggcctaggatcccagctattcagggggctaaaatcaggagaatcaaaagttcaagaactgcctactccctggagatttttgaactacccaaaaacagcacagggcagtaattccggcacttttcaagaatatcttgattgaattcaagactggcctatgtcatacagtcacagcctatctcaaaaataaataactagaaaagaaatttcggccagtgattatagcaggactagagtactttcaatgttcagtactccattaaggggtggggtgggtaaagtctataaatgttggaggtggagagatggctcagcagttaagatcacttgctgctcttccaaaggactgcgtttgttactagcacccatgttgggcagctcacaggtgcctgtaactccagcactaagggctctgacgccttcttctggtctccaaggacagtgtcttcgtgtgtgcatgccctccaacacacacttaagtgtaatggatgtgtgccaacaacagaaacttaccaaacttgcggctgaagaggtcgtttacttgttctcgcagttgcttaattttttcgaggcctgagagcctctccttctcattatctacaaataataggaagacacaaaccaggctcattcatacacttttttcctcttcaagacagatattagcagaaatgcctgtttacctgtcttattggttagctacctgagcacagtaagtgagcatttgggaaatacacaaaacggaagctgttacagatgataattttgacaatcccatagaaacataccccataatacttaaaaaatgttttaaaaatgtatttatttaatatgagtacactgtagctgtcttcagacactccagaagagggcatcagatttcattatagatggttgtgagccactgtgtagatgctgggaattgaactcaggacctctggaagagcagtcagtgctctcaactgctgagccatctctccagccctactttaatttgtgtttttttttatttgtgtttatgtgtgtgccacacgcatgcaagcgcccatggagattagacaaagatgtggggtcccctggagcttcaggtggttatgagcgggggtgagatgggaacagaacctgggtccctctgcacgaacagtaaaccctctcagccctgacctgtctccagccactgcgcatgctgttcttgaggaacatgttcagtgctgagcaggacaagggtggtatctccatcgctgccttcaatactgtaatgcaaacctcagcccatcccacaggacaagaagtgaagaaaaacgaggctagggctcagaggggatatctttcaatactttaaaattattatttttttttaattaaaattttgtttggtttggttccttgctttttttgtttggttgggtttttttgtttgtttgttttttgttttgtttgtttgtttgttttcgagacagggtttctctgtgtagccctggctgtcctggaactcactttgtagaccaggctggcctcgaactcagaaatttgcctgcctctgcctcccgagtgctgggattaaaggcgtgcgccaccacgcctggtggtttcctgctttttcaagacaaggtttctctgtgcagccctggctgtgctggaacttgatctgtagaccagggtgagatctgcctgcctctgcctcccgagtgctggggtttaatgcatgcaccaccatatccagctctaattaaaaacattcttttaaaagcttggtgtggtggtccatacctctcagcactcaggaagcagaagcaggcagatctctgtattagaggccagcctgtctacacagtgagttccaggccagccagggatacagagtgggaccctgtcttaaaacttaaataagtaatctttaaagagtggctcagggggcctctgaagagctggctcagtagctaagagcacttgctgctcttgcaaaggtcctgtttcctttccagcgcatgcatcttacccttccaatctgaacttgatgggcactaggcactgcatagtgcacacacacacacacagacaaaactcatacccaggaaacaaagtaaatcacgacaaattaaaaataaatacagctgggtggtggtgcatgtctcgaatcccagcactcgggaggcagaggcaggccaatctctgagttcaaggccagcctggtctgcagagccagtttcagggcagcttcaagggatcttgtgccctcttctgggtaccacactcacagcactcacatggcagacgcttggacacacatacacacctaaataaaggaaaacaaactttacaaaaaagaaaactgtgattcaaatgatgaagacattaagtggatgtccccacctgcgactgtcacctgtatgatcctaaggtcttcaacacctgctgcagagtttacaaggttggatggacttgcatttccttgagagcaaacagaaagagtcagagtgaccagaaaatctgcaagtctctaaaatatacccaagtgttacataaggagaagtgcagcctggatactgcctccctatccccacccctgtgtgcggtgttgaaagatggttgaccttcaaggtcaatctggctggacatgtctgtgagggtgcttccagagtgtacactgaggagagaagtctcaacctgatgttggggctccaccccatgctctgggggcccagactgaacaaaaagaagaaagaaagttgagcaccagcatcaatctgtctgcttcctgactgtggatacaatgtgatcagctgcctccagctctggctaccgtgcagtgtctgctacgctgggaaagactgtctcccctcctcttttaagttgctgatgttcttagaaaaaaatgtcttttcatttatgtgtatgagtgtgtgtctatgttgggatgcaagcatgtaagcacacagaggccagaagaagctggagttagaggcagttgggagccacacgagatgggagctggctgggaactaaatttgggtcctccagaagatcaacaacattgttctcaatggctaagccatttcttcag

SEQ ID NO: 1757 - DNA, 2409 bp, Mus musculus
caggctatagagagaagtgtccctgtcacggcccagccatgggggacaccttcattcgccatattgccctgctgggcttcgagaagcgcttcatccccagccagcactatgtgtacatgttcctggttaagtggcaggacctgtcggagaaggtggtctacagaaaattcaccgagatctacgagttccataaaatgctgaaggagatgttccccattgaggccggcgagatccacacagagaacagagtcatcccacacctcccggcacccaggtggtttgatgggcaacgagccgctgagagtcgccagggcactctcactgaatacttcaacggcctcatgggactgcccgtgaagatctcccgctgcccacacctgctggacttcttcaaagtgcggcctgatgacctgaaactgcccactgacagccaggcgaagaagcctgagacatacctggtgcccaaagatggcaagaataacgtagctgacatcacaggccccatcatccttcagacctatcgggccattgctgactacgagaagagttcgggaacagagatgaccgtggcaaccggagacgtggtggacgttgtggagaagagcgagagcggctggtggttttgccagatgaagacaaagcgaggttgggtccctgcatcctatctggagccccttgacagtcccgacgaggcggaggatccggatcccaactacgcaggtgaaccgtatgtaaccatcaaagcgtacgctgctgttgaagaggacgagatgtccctgtctgagggtgaagccattgaggtcattcataagctcctggatggctggtgggtggtcaggaaaggggatatcaccggctatttcccatccatgtatctgcagaaggctggggaggagataacccaggcccagcgacagatcagaggccgcggggcaccacctcgaaggtcgaccatccgcaacgcacagagcatccaccagcgttctcggaagcgccttagccaggacacctatcgccgcaacagcgtccgattcctgcagcagcgcagacgcccggggcgacccgggccgctgagcacggatggcacaaagggtgagcgccagggcgggccggggcctgggctggagggcagagacaatccatcgactccgcgcgtcaaaccacagcccgcggtgcctccgcgacccagctcggacctcatcctgcaccgctgcacagagagcaccaaacggaagctgacgtccgctgtgtgagaagcagcggccctagacggctcctatccctatctctgtatatacttgtgtatagcctcaggttagagactcctcccatgccttaaggtttgaaatggactgagactctacagcaaaggacaggactgggttaatctccaccggtattgctagcatgagaggaggcagtgagcgctgctagggtgggggttgcagggacaaaaaagatctgattacctgctgctgtagtctcaaccaagtttgcagaaagccaagtgccttaggaacgccctaggaaagtgtttctcaacctgttggccatgacccctttggggagggtgtcaaaagactttcccagaggttgcctaagaccattggaaaatacagatatttatttctatagatgtttatattatgattcataaaagtagcgagatgacagttatgaagtagcaatgaaaataattttatgactgggggtccccacaacatcgggaactagctgtattagggtcacagcactagggaggttgagaagcactgccctagggcctcaggatgttgcccggttggtagagcttgactagcatgcaaccgggcctggcttccattcccaacatcccataatagggtgtgccagtgtcccagcatcagggcagtcgagccgaggctcacatctgtaatttcagagccaagagtcaagagaactgcagttagactcaagatcggcctgggccatgtagggaatttgagatcagatttagctagtgtgagatcctgggtcaaaccaccccataccacagtacaacgggcgtagggagtctcagggggatgaaagcgactgtcattagtgggcagttatagattaatattagcaactaatgactagtgtcattttagtgtcattagtgatgcggagactttgctttcatgtctctatttccatccccaaatgcaaagaaaccgcgctggctggtctacgtcaacttgacacgagctggtgtcatctaagagagggaacctcgattgaggaaacacctcagtggttaagagcaccagctgcttttctgaggactggtgttcgatttccagcatccacatttgcctgtaactccggttttagggcatctgacaccctcacacaggcatatatgcagacagaagatcaatgcacata

SEQ ID NO: 1758 - protein, 412 aa, Mus musculus
GYREKCPCHGPAMGDTFIRHIALLGFEKRFIPSQHYVYMFLVKWQDLSEKVVYRKFTEIYEFHKMLKEMFPIEAGEIHTENRVIPHLPAPRWFDGQRAAESRQGTLTEYFNGLMGLPVKISRCPHLLDFFKVRPDDLKLPTDSQAKKPETYLVPKDGKNNVADITGPIILQYAIADYEKSSGTEMTVATGDVVDVVEKSESGWWFCQMKTKRGWVPASYLEPLDSPDEAEDPDPNYAGEPYVTIKAYAAVEEDEMSLSEGEAIEVIHKLLDGWWVVRKGDITGYFPSMYLQKAGEEITQAQRQIRGRGAPPRRSTIRNAQSIHQRSRKRLSQDYRNSVRFLQQRRRPGRPGPLSTDGTKGERQGGPGPGLEGRDNPSTPRVKPQPAVPPRPSSDLILHRCTESTKRKLTSAV

SEQ ID NO: 1759 - DNA, 37844 bp, Mus musculus
  misc_feature (1)...(37844): n = A, C, G or T/U
caaaaaaccaaaaagctagctaagaacaaagataaggaagacaataactatttttcatcaactattttgcaatcgagaagatggtggaaaatgcacacactggctcattcagccttcagaaggctcaagttccaggctaacttaagatatacatcaagatcttgtctcagagcaggcaggtagggaaatagagggaaatactttataacgagaagttccagagccaagtcaacaagcacagggcttaccaagaaaggaaccaggctggtctggtatcctagcatccacacagtttgcttcaagtacataaaagagtgaaaaaaggcaaaggctaggctcaacagtatagcacctgcctagaatcccccagtgagggctgggggtgtggctcagtggtagagcccctgcctagaatccctcagtgaggggctgggggcgtggctcagtggtagagcccctgcctagaatcccccagtgaggagctgggggcgtggctcagtggtagagcccctgcctagaatccctcagtgaggggctggggtgtggctcagtggtagagcccctgtctagaatcccccggggaggggctgggatatagctcagctttaagagcccttgcctatcaagtacaaggcattgggctccgtctccattaccacacaactgatgaacactggagaagaggaaggagggctgtggttaggctgaactacttccatgtggcaagcagagcttctgcactgtgatggagagctagccacactcttgcagtcaaggaagaagactgctatatgtcttcagtctgaaaaagctaaggtcctctctctccagcagccgagcaagatgcccaaagggaagaaggccaagggtggccccggcccccgccatcgtcaagaagcaggaagccaagaaggtggtcaaccctctgttcgagaagaggctcaagaacttcagcattggacaggacatccagcccaaaagagatctaacacgcttcgtcaaatggccccgctacatcaggctgcagcagcaaagagccatcctctacaagcggctcaaagtcccacctgccattaaccagttcacccaggtgctggacaggcagacagctactcagctgcttaagcttgcccacaagcacaggccagagacaaagcaagagaagaagcaaaggctactggcccgtgctgagaagaaagctgatgcaaaggcgacatcccaactaagagaccacctgtcctccgagcaggagtcaatacagtcaccaccttggtagagaacaagaaggctcagctggtggtgactgcccatgatgtagaccccattgagctggtggttttcctacctgccccgtgtcgaaagatggaggtgccctactgcatcatcaagggaaaggccagtctggggcacctagtccacaggaagacatgcaccactgttgccttcacacaggttaactcggaagacaaaggtgctctggctaagctggtggaagctattaggaccaattataatgacagatatgacgagatccatcgccactgggaaggcaacgtcctgggtcctaagtctgtggctcgcattgccaagctggaaaaagcaaaggttaaagaacttgccactaagttgggttaaatatacacttaagttttctgtacctaaatataattacaaaattaaaaaaaaaaaaaagctaaggtcacctgtgaattcaggatacaaagagctgcactgaaacggccatcctgaggattcccactgggtcccatcacgagaagttcctcagagagatctagtatggcatccctgaaggatagggaaactcctggcaagtgagggagtcagctctagtatgtgaggggccaaggaaggttccatcttacacctcctcctgcaacttccctcctgcccctgctgcagtcggtggagatgctgggaaagaggggaagtgtaaagtcttcacccctgaaagggaaacggttccccatgcaccctgcccagcatacaagtctctgcactgcccttgcaggtggacgttaatcatggagacctgaggctaggcagagtgctctggcttttctggagagcagaaaacctctgagcatcctcctctcttccaggaaagctgagaagaggcagggtcccattcctctctctcattctgaggcagggcctcctgtagcctaagttgatcttgaactcactatgtgtgtgaggatgacctcgaacttcaaatgcttctgcctctacctccccagtgctgggttactgctgtggctacccccacccccagttctccatcttcctcctgaccggtcctgctgcagatcttccttctgcccttatgtaaataacaaacagcctgaatctaaaaagagctgtttatttcaccatcagccaaatctgtgggttttgctggacactcttggctgactctgagtctcaagtgcatctgagggttgggtgtggtggtgcacctatgtaaccctagcacttaggaggctggggcaacagggtcatgggttccagaccagcctgagctacattaaatacaaaatgacggaggacacaaattccccatctgttgtgacatggtgtctgccctggggcaccgtcaacatgaaggccatcatcagatgtctctagacctctcaactccccaactatgaaccatgaagtttcctccctcctgcctgtacccaccattccctctctctttctttttgatatagtgcagtaattgtcaatttgtgggtcacaacccctttggggattgcatggctttttcacaggggtcacctacgaccataggaaaacaaagatatatacgagtcataacagcggcaaaattgcagttatgaagcagcaatgaaatgattttatggttggggtcaccacagcatgaggaactgtgttaaagggtgtcagcattaagaaggttgagaaccactgatctagggtaccatatcggctgccctcatgtagcatatggaccttaaactacccatcctttgcctacacatcctaaatgcttggatcacagctgcgtgctaccatgcctgggggatgaacctaggaccctaggcatactaaaccattatgctaacagctgaggtactaggctaggtatttggttgtttggggggggggtatgctgtaggtcttctttttgttttgtttttgctttttaaagacaaggtctcactatgtccccttagttgtcctggaacttgctctgtagaccaggctggccttgaactcacagagatctgcctgcctctgcctcttcattactgggattagaggcctaagtcatgtcaacatgtccagcttacttgattttgaaaaaaggtctcatagccacaggctggctttgaactcctgatcctcctgtttaaacctcctcagtgctgggattaaataacatgccaattttcttttttttttttcttttaacttttaaaattacatgtatggtgtgtgtgtgtgtgtgtgtgagagagagagagagagagagagagagagagagagagagaacacagaagacaacatcaggtctctcctcccacagtagacagcctggaagtttaacagtcatgtcagcaagtacttttaggcaatttgctggctccttctttgctttataaagttattttctttattccttccttccttcctttctttcttgcacaggattgtgtgcctgaaactgcaacaatctagactaaaatggaataatgacaacaataaatgaaaacatcaaatgtagctcagggtaatgaaaagaaaacgatcagtcaatgcccctagggatacactgcaaacctcccgaccagcactgctccatgctgtccaaggcattcctatccaggactgtctgagagaccaccagggctaagaagcactcaaggttactgcaatgaacttttgggcagtgttctgatgacatatcaggtcagaatgtctgtcagagttcacatagattagatggcacctagggtggctggttcactgtggtccattcataaactctgatgtgaatctttataatgtcttaatcgcgttctcacgcccggccaggaaagacgcaacaaaccaaaatcttctgcggcaaaactttattgcttacatctttgggaaccaggagggcaagcacccagcgcccagccccaaaaacgaaagccccttcaattacatctttaggagccagagctccggcgcgcgcgctctattgtttacatctttaggcagcgagcgagcgcagggcgcgcagagccagagagatgccagcgagagagaatggcggaaacaccccgtccccttttttaggagcgttatatttcgcctaggacgcatcactccctgattggctgcagcccatggccgagctgacgtttacgggaaaggtagagtacaagtagtcgtaatacccttggctcatgcgcagattatttgtttaccacttagaacacaggatgtcagcgccatcttgtgacggcgaatgtgggggcggctcccaacaataatgtccattctcctcctgttttctttgcagtactaggaatggaacccaaggtcttgcatgtagtacacaagcactctaccactgagccacgcccacagctcctcactgggggattctaggcaggggctctaccactgggccacaccccagcccctcactgggggattctaggcaggggctctaccactgaaccacgcccccagcccctccctgggggattctaggcagggactctaccattgagccacgcccccagcccctcactgggggattctaggcaggtgctctaacactgagccacaaccagcccctcactggaggattctagacaggtgctttggtaaagtctgggtgtgtggttcagtgttatagcacagggcatgcctatagctcagtggtagagcacctgcttggtatcctacattttggaaatgggagtgcagtgtggtttgtgaataacatctgtgagactctgggttcaacctctggtattgacaaaccctcctccccccccacacacacatacctcttcacagctccaacaatagaacagagaagatgtcccacctggccccatctcatcatatcccgatcacacgtgaacttccgctttctgcccctggggagagacctgtatgaggctgaatgacaagagtggagatcaaagacacacaaaaggctcatgtttgcccctgggacactcgagaaaggagagatgaaggcagctgcaagggaggcagtagaacccaccacacaaagtgcagcaaaggtgtaggactcccttgtgacatgagaacaccgcgaatgagacctaggcaggaggactgcagagaggactcagcagggacactcatgggctactcttggagaggacccaagttcacttccaagtagccatgtcaggaggctcacaactgcctgtgcgtctagccttagggaatccgccacctgtgacctctgctggtatactcatgtgtgcatctccatccacacacacagtcacataattaacgagagccatacacacacacacacacacacacacacacacacattaaagttttatgtgtgaagatgttttgcctctatatatgtttatgggtcagaaaagggcactgtatcccctgcaactggagttacagatagatgattgtgtcaacatataggtgcttagactggaacctgggtcctctggaagagtagttagtgctcttaacagctgagccatctccccagccccgatcagttgtttttttttttttttttttttttttaagactttttattattatatctaagtacactgtagctgacttcagacacaccagaagagggcgtcagatctcattacagatggttgtgagccaccatgtggttggtgggatttgaactcaggacctttggaagagcagtcggtgctcttaaccactgagccatctctccagctcccctgatcagttttaaatactttttcaactgatggttccatcttttggttcttgggacccagactactactactactactactacttcttcttcttgttcttttcttctttcttcttcttcttcttcttcttcttcttcttcttcttcttcttcttcttcttcttccttcttctccttctcctccttcttcttctttggtttttcgagacagggtttctctatgtagccctggctgtcctggaactcactctgtagaccaggctggctttgaactcagaaatccacctgcctctgcctcccaagtgctgggattaaaggcgtgcaccaccatgcccggcccattgatacttcttgatggacagctatacagctaggcaggcctcagagtagaaaaccctggaaggcagtgtcaagagacatacaagccttgcagccatgcagagctgaaatgttcattgctagtcacctccaccatgaggtattccaggcctgcacacgacttctggctactcctattttattttttaagacaggctctcatgtagtccaggatggcctgaagctcactttgcagccgaggttggccccgagtgccgtgattacaggtgtgcaccaatacaatactctttggtctcctgcctttggagcttgttcactggggtcccagtctgggtttccagccaggaagataaagcagcactatggatggagttccagggcccgtggggcctgagtggtacattgctgccctctggtggtagtatgtagtactctaggtccaaagcctgggaagagagtccagagatgaaagaaaagtgggatctgggtgctgccttgaggaggcaccatgtaaactgtcctgccaggatgtcatccccacccaccacgacttttgccatgactcacgtctgcgaagatttggggacagaccactgggcgtcagtctgtgtgatcctgaggcaagcagcatgggtgtcaggttttttctctctctaataagagagggnnnnnnnnnnnnnnnnnnnnnnnnnnnnnnnnnnnnnnnnnnnnnnnnnnnnnnnnnnnnnnnnnnnnnnnnnnnnnnnnnnnnnnnnnnnnnnnnnnnnnnnnnnnnnnnnnnnnnnnnnnnnnnnnnnnnnnnnnnnnnnnnnnnnnnnnnnnnnnnnnnnnnnnnnnnnnnnnnnnnnnnnnnnnnnnnnnnnnnnnnnnnnnnnnnnnnnnnnnnnnnnnnnnnnnnnnnnnnnnnnnnnnnnnnnnnnnnnnnnnnnnnnnnnnnnnnnnnnnnnnnnnnnnnnnnnnnnnnnnnnnnnnnnnnnnnnnnnnnnnnnnnnnnnnnnnnnnnnnnnnnnnnnnnnngtatcacgggaggggaggaggaggaggaggaagaggaggaggaggggggggagagggaacctaacagcagtgaaagccaccaaatgcacaccccacacagaacaagtgcaatcatggctgtctgcagaaatcaggtattagaaagggttgttatggggttgcagcttctagaaagtgatttggcataggatttaagtaaacacgcttttacttaggacaagatgttattaggaatcaattcgctgattatatatttaaataataatgttattatgtacagtacagggatcggaagccgggacccgtacatgctggaaccggtacctgtacatgctgggcaaatatggccatcgtcagtgacctcactggtggactctgggcacgtctctaccacggagcagagcaagccctcagttccttttgtcctggctgtgttttgagatagaacattactatgtagtcctggctgccctaaacttgatatgcagaccaggctggccttgaactcatagagttctgccacccaagcactggaattaaaggttcctagcatcatgactggtgcccttaatttttttttttcagacaaggtcttgtgatatagccccagcttgttttgaaatctctgtccctctgcctcctaaatactaagatcacatgtatgtgctactgcactcctctggatagttttctttctatctttctttcttttctttctttctttctttctttctttctttctttcttttcttcttctttcttcttctccttctccttctccttctccttcttctacaggcttgtgcctttaggccatctcccatagcctgagtcaggcatacctgccagcagctctctctggggtagagttcagaatcagtcagtggtgtgatctagcagctctctgtttatggcatcttgcccttctgtgttttgtgtcatattcactgtgctgaactaaaccatatggtgagaaactttgtgctgcccctaaagagttaccaaaaaagccccttcctatgttctgggaatttggtcactcctgggtgtgggggggggggattgctgcaagattatcctggatttctgaagaggctcctctgtaccccacacactacctcttctgacttctctcctttctcttcttcacagttttgtttttttcttttttctttttttccagacagtgtttctctgtgtagccctggctgtcctggaactcactctgtagaccaggctggcctcaaactcagaaatctgcctgcctctgcctccggagtgctgggagtaaaggcgtgtgccaccactgcccggccttccttccagttttaatgaagctcctctccaggttccaaagggaagcctcttgctccctttaaggccccaccacgttcagagatccatatactgtactgtctattgttctccctccatctccagcaacagtcagctttgaggccctttcattctaataagcttcttctaataaaggacttgtttcagtttccttgcctacaagatgttactgttaccatcttgggtttttgttgttgcttgttttgttgttgcttgtttttttgttgtttgttttttgagactggctttctctgtgtagttctggctgtcctggaactctctctctacagaccaggatggccttgaactcagggatccatctgcctgtaactccctgggtgctgagattacaggcctgcaccaccactgctggctcttaacatcttttactatagggagctacttcagtgcctcacgcatggtcaacaaaacactccaccaccagaaggccgcagttccatcattctccattactttcaccttcaagtgaaagacttgaagttaattcctcgtcaggtagattggaatggcaacttcctttattctaaaacagactcacatactcaggctcgactggtggcgctgtactttcagcgtggccaaggagatcgggtctgtcttaagagttcagttacaaaggagattataagattattataggaatcggggtgtgagaggctggcggatctccgagagttcgaagacagcctggtctacaaaccaagttccaggacagagatatacagagaaactctgtgttgaaaaacaagacaaacaaacaaaaaaacaaaaaaaaaaaaaaaaaaaaaaaaaaaaggaaaggaaaggaaggaaggaaaagagggagggaaggagacgatatggagagggcggagaaggggagagaagaggaggaggaggaagagagagtggggtagggagaaagtagaatagataaaaaagaaacggaaaaaaaagacaaagcccaggagcgagcgaaactgggagggacgtgccaagagtcccagagcaagctgtgcgaagtccttggggacctgagacgtcgcctggggccagcccactcatcatcactaaaggccgtctcttcctctccggatgtgagaatcaggcagccctgatttgttttgaaacaggaaatgaaattaaagtgctatgatcaaaataaaccacactgacctcgcgttcatgaatattcaagcaagctgcttaggactgcctcgtacctccgaggagagagtgcgcatgcgcctcaggagagcgcccctccccccgggggtttgagagtgcgcgtgcgcggttggcgcgctcttctgtcgtcatcaatacgagcggccgccggcagctttcgtaaaggagtaggagagcggctatggcgagtcctgctgccgcttctgtgagaccgcccaggcccaagaaagagccgcagacgctggtcatccccaagaatgcggccgaggagcagaagctcaagctggagcggctcatgaagaacccggtgagtggaagtgggccgaggcgcagtcccttcaccccgccgccagaccgagcaaggctacattcagtccccctagagcaaccctggggcggagagggcggccccgtggagggagcctcgctcctgttcttgtcctacagcgtagctgcacgaaggcgctgcccagccctccacaccctcctttttcttagtttgctgtttgcggtatcatggcgttgctcgtgctgtccacgttccgtaccgaatcggctttgtaagataggcagacctcgcatccgggctcctcgcatcccggctcctcttaccttatcttccctacgagctgggatgacagccctgcgctactattcagtattgcttcacagccctttctattttaatatatgaaccaaagcggtgggagctgggtatggtggtgcacacctgctatcccagcactctggtggctgaccccagaagtttgctacaaattcgaggcgagcgtggtctacgtagtgagtttcagatcagctagacagtgagacctatctcagaaaccaacaaaacccagaatcgatgtcttagcaaaagtgtacaactccaaatagcagccattattaaagaagcattggacgccaaatttggaccacatcactctttacctcttcaatgggcctcgtaaaacagacagctcatatctttgactagaagaggttggctcgtctcttagtgacgtagattccagacttgtttagcgcaggagaactttggcccacgttagaccccatggtgtagtggatgaagtaaggccagggcagcagaactacactcagtcagctccagatttgagaagcgtgctcagttgagatcgtcaaacgggatgtaccttcctcagcaagtgtatgttcatagatgcttttctgtttaactgttccaggacaaagcagttccaattccagagaaaatgaatgaatgggctcctcgagcgcctccagaatttgtccgagatgtcatgggtaatgtctcttatgggtgtcaggggtttatagtttttgttttgttttttttttaaagatttatttattatatgtaagtacactgtcgctgtcttcagacactccagaagagagagtcagatcttgttaaggannnnnnnnnnnnnnnnnnnncagtcgggtgctcttacccactgaggctatctcaccagccccgggtttatagtttttaaggggaaatatgaaacactattttcttttcttgtcaactagatctttgataggaaaattagtctggggctggagaggtggctaagtggttaggaacactgctcttccataggtcctgagttcaattcccagcaaccacatagtggctcacaaccatctgtaaagcgatcaggtgccctctattatatatatggaaaactattttgtctttacaggagacagcactccttgctattttatggtttgacagtagataatggtttcccagttatgcttttggttttgttttgtttcttgtggttaaaccattttattcagaggctttaaaagctgctaaagtgtcacatgatcagacaaacggactgggcagggaagagctccaggccccctcttcaatacgatgttttgtttttgaggtagggtctcactgtgtggaccaggctgtgcttgaactcatactcctcatgcctctgccccctaagtgctggcatcagaaacatccaccgttgtcctagttagggtttctattgctgtgatgaaacaccatgtcccacagcaacttggggaggaaagggctcccatatcacagtccatcattggaggaagtcaagacaggaacctggaggcaggagctgatgcagaggccatggtgggtgtcttactggcttgattagcctgctttcttatagaacccggaccaccagcccagggatggcaccacccacaatgggctgggccctcctcaacaatcactaattaagaaaatgccctacaggcagatctcctggaggtatgatccgcctatgactttagcttgtgtcaaattgacataaaactagccagcagaaccattgtacctgattttctcattctttgaaatgacatcttatgctttttaaagattttatttgtgtgtgcttgtgcacatgtgcttgtgcacgccgtggtgcctgtggaggtcagaggagtcagttcttttccaccatggaattcaggtttggcagcaagtgcctttatccactgaaccatctcaccagcctccatttttaatttttcctaagtgaaaacacacttgttatatagtagatttaggttaacatatactaagtagaagcaaatagtacagcttcagagatagagagctggctcagcaggtaaagtgcttgccaccaaacctgacgcccagagttctatcccttgggtccaagtggaaagaaagaactaactcctgtaggttgtctatgacctctgtattcatgctgtggtatttatttcctgctctacaaataaacagatgcataaatgtcaggtttttaaaaaaaatgtcaggcatagtgaatgcacttaaatacaaactctcagaagttagggccgtggatctcttttggtttgaggccttcttgatctatatatagagttctaggccagctaggactacatagtgagtccctatttcaataaaaggtagaactaagaagatgagttagcattgaagagtgtgtacttgcagagaactctagtctaattcccagcatccatattggccagctcctggcagctccagctgcctgtaactcaagctctggaggatctcgtggactcggtgagcacgccatgggcgcctgcatgcatgtgcacaaacctacaggcaaacatacctaaacactttttagaaaagagccacctgctgggtgggaattacacatgctttaatctcagtactcaggaggctgaggcaggtggatctctgtgagttcaagtatgcagagcaaatttcaggacatcgagggctacacagagaaaccctatctctagaagcctaaataaataagcaaaccacttgacattccatcattccacataaaatattctactacaacctcgtgaacctctctgtagtcaaaaccatttgttcaagaaaaactgttgctacccacttcttttcacctgcagtatcagaagtttgtcaaccattaggggtctagcaggtcacttgtgaaatcatggagggatgctgagagcccttcttaaactaaagtctgcgcattttatgtctttttttttttttttgtcccgacccatcggccagttgaacggggacttgagcggccacctggaagagaatgggggaacaagaaacacaaaaaatggacagcaagtctgatgatcaagctgacaaatttttatttttcccacacagattatatactcataggagtaggaaggagggtggagggtgggggtcactttgtctctggataatacacctgtttccaggaacaggatattgactgggtaaacagttcagcaggaagatcagaacagagtgggttattagacacatatccacaagatttatagctgtttgttctccgctgacttcaggatctgtctatttgtactcagctgggctagtgctttcccacagaggccaggactttatgccagcaagcactgaggtcagtaaatgttcaaacaaggtctctcctaacaatatatttttttaatgatttgtttattttatgtgtgtgagtacactgacacggtcttcagacacaccagaagagggcattggatccccattacatgtggttgctgggaattgaactcaggacctctagaagagcactcagtgctctttaaccgctgaaccatctcttcagtcctgaactgaagtctgctcctctcgtggtcactgtcacatagagcagaaatttcctttttgttttgacccatgggtttgctgtgcagctcaagttggccctgaactctcagtcctcctgcctcggcctctcagtgctaggattgtggacctgtgcccccattgctagcttagggtgggacttcagtgacttcatagtcaatatgtctaatagcacctatgttgggccacacactgtccttacaagcagaagatccagcacaggtgtaccttccgttagaggtcttatctagtccctttgggttaagtgcagcttgtgtcagtgactgcgttcatcttttttcccttcctcctcttttgtggtcctgaagattaaactcagggcctgtgcctgccgggcaagtgctctgccagtgtgctctatccctggcctcctcactgagtctcacctagaactctggactgttgtggctataggttccagtgctggggctggcagtggagagttccacgtgtataggcacctacggcggagagagtaccagcggcaggactacatggatgccatggctgagaaggtaagtgaccgaccaagtcaggcttggcactgcaggatgttcacactgcaagagtgatgtgtaggactttccatgtgtatggaaggacactgcagagtcccttctctctaggccatttgccatgtaaagggacagcaagagggggcttcacgcggttggggatttcctcctcttctctgttggactgagtgcagttcagtgtggttgacgtaataatgttgcatgttcagtgtctgcttctcagaggatttgccagatgatgatttattatgttaataataagagtttaagaattgctttagaattgtactttaagaaacattaagagtgccaggtgcagccaggcggaggtgacacacatctttaatcccagaactgcagaggcaggtagttctctaaatttgagactagccagatctacagagtgagttctaggatagtcagagctacacagaaaaaccctgtctcgaagaaacaaaaaacaaaaaagaccaggtgtggtggctcatgcctttaatcccagcactcaggaggcagaagcaggagggtctctgtgagttccaggccacctaggactactaactagagactctgactcaaaaaataaacaataaataaataaaatgaacctttgggcagattaacatgaacctgtattcccagctttttttgaaggctcggattagagaatttttagaaccctgtagttcaaggtaagcctgggcgatagagtaaaagcctgtctcatagcaagaggaaaactgagagacaggtaaggaaagtgcttgtcttgcactgacctcagtctacagaacccaggtggtcttggtgaaagcagccaggtgttgtggtgtgtccttataatccatccccaaggaatggcttcaggcagatgcttgagcatgactgagaacctcaggtcccaagaaacaagtcaaaaagcttcctaggagtgacacctgaagtcatgtgcacacgtgtgctctcacatatatgccgtgctaaacacacacataagcaggtgttgtaggtgtggcttggtggtaaagctcttcctagcatgtgtgaggacttggatttagccctcagcactgcagagtcacagagaaccatagagcagaacatcaatgaccatgctgggtgtgctttgttctggtgtttgtgtgtatgggtttaactgagctgccttcactaggctagagcttgagcttcaggctattcatctgtctacctttcctctaaccttatgagcaccaagattatatagatcacccctcatgcccttctgtttcaagaatttctgagttagatgggtctaggcaatgtctactcctccctccaaggtcccaataacaaactgaagttttccctggggaaccaatgagttcctagtgcttattcacagagcatggtgaggggttactgatgggagtaagggggacccaaaggcactgcactgcaaagtcttcatccagcatgaaagatggtttccccatagcagcggagagagagcctcttcctagtctttcccagcctatatcctgtagccccttcccaagacctcgagcctgtgtgcagttacggcagaactttgtaagcaggtcgggaaggatggctggatactcagatgagggtcctgtgctagtgagcaggcccagctgtggagatcttttacagcaggcacaggtgactcaggggcagcagctggttggccagtgctgtacagcacattgcaagtgcttggtccactgagccacctccccattcttaccgttctgcttaataacttactcctgggctttggtcctcttgttctttctgctgagctctgctacgagggtgtcagagctgtccctgtcctcacagagtctcctggctcattctcattcctattcattctttccctttctcctcctacccctcccctttctccctctcccctctcacttctttccctccccctctctccctctccttgccccccccaaccctgctttcctctctgtccttgtcttgctttctccctcccatttactgaatgcacccacaccagctcccgtcctagtttctcttgcaggcttcatcttacttaagtgctgtctctgtgaacagtgttattttgccatctagagctgtgtattgattacctgtcccgcctggggcaatcttttaaggttaaagtggctctggggacctgggtggtacatggcacccctagtggtatgcctgtggaatttgaactcttaaacttcttaaagcctgtctagcccagggtatgtctgagtgatggggcggcggtttgttttttcagcaaaaactggatgcagagtttcagaagagactagaaaagaataaaattgctgcagaggagcagactgcaaagcgccggaaaaagcggtgagaactttgtcctgtaatgactgaagctacaggctggcaatggggaagtggagagtggataataaaccaagtccttataggcagaagctcactggcaactggtgttagggttggagcatgtagtcccagctactaggtagggcaaggcaggaggattgtttgagctaggagttcaatttctagaacctaaatggttcttaaaagctgtcctcaagctgggcatggtagcacatgcttttaacccctgcagggaagaggcagaggaaaatctctagagtctgaggctatcctggtctacagagttgagttacaggagagccagggctacacagaaaccctgtcttgaaggagaggaagggacggagggaaatagactagtggctaataagatgcctcagtagttaagagttcgctacttaatcctgaaggccagagttcagatcccagagtctgtgcaacaacacatcaagcgttgcaagtacctgcaactacagctccaaggaatcaaacgcccttttcttacttctgtgtgtatacaagtgcatgcacacacacatacacacacacacacacacacacacacacacacacataaatcacatcacatgagaagtttccttaaaagagtttcatggtggtggtggggtggctaggagatggctcagtggttaagaacacgtgactgctcttccagaggtcctgagttcaattcccagaaactgcatggtggcctacaattgtctataatgggatctgatgccctcttctggtatgtctgaagacagctacagtgtactcatatacattgaatgagtaaatctttttaaaaaaaggttttataaaatcaatgttcagatgtaggaagggaaccaaggcaggaggaatgaagttcatgagggcaacctaagctacacagcaagactgcctcagaaggcagacaaagcaaaatgcagaaatgaggggagacacaaaaacccacacagtcaccaaaggtctagtttgtatctgtgagagatctgtaacagactgaaggacaataagggatatgtggcttctgaagtaacgtaagaaatcactcctctcagccttgttcatcttggggctcacctacccatagcccctgcaggacatataactgaactttgtggtatctgttttgagagtgagcttgcttgctttctctctctctctctctctctctctctctctctctctctctttccttccttctttctttttttttaaaaagtttttttagatgactagtgttaaacacaaaatcacatcctaggagagtttctttttttagagatttattttactttttgtttggttggttggtttggtggtttttgttgttgttttttgagacagggtttctctgtgtagccctgactgtcctggaactcactctgtagaccaggccggcctcgaactcagaaatccacctgcctctgcctcccgagtgctgggattaaaggcgtgagccaccacacccagcttattttactttttaattatgtgtgtgagtgggtatgtgcccatgagtgcaatgtccatggaagccaggagagagcatcagatcctctggggctacaagttacaagtggtgtgagcacccaacatcataggtgtgtgatctctgggtttgtctgggttaatgtgcatgattttgtgtgtggggagtgggggaagaatacaaagaaggagggagactgggactggcacatgtgtggaggtcagaagacacctttaatttttagtgtttctgttttgttttcttttggttttgtttttttgaatgtgtggggttttttatgttttgtttgtttgtttgctttttgagatgggggtttctctgtgtagccctgagtgtcctggaacttactctgaggaccaggtttgaactcagaaatcctcctgagtgctgtgattaaaggcgtgcaccaccaccacctggctccacttgtctatttttttaaggcagggtttcactatgtgtcacaggctggccttgaaaaggttgttttatttttatatgtatgtgtggatttgtgcatctgaacgtgagttctcatcggggccagaagaggagcaggagttataggcagtttgagttacctgacacagatgctgggaactgaacttgagtcctctgttgagccatctctttcagctcctgttactgtagcatttgtgttgttataaagatagcataaatagatgttcttttttcaaaacagccactaagacaaccactgtctttgtctcccacgtgtagccagaagttaaaagagaagaagttactggcaaagaagatgaaacttgaacagaagaaacagaaggaaggtgagttgtgcccacatttctctcagtgccagtcaccaccgctgaggtggcagtgccagtaacctgtggtagtgaagagttaacgttgttaactgcatgtgtcagaaagccacatgatggggctggtgagatggctcagcgggtaagagcactgacagctcttctgaaggtcctgagttcaaatcccagcaaccacatggtggctcacaaccacccataatgagatctgatgccctcttctggtggtctgaagtcagctacagtgatcttatgtataataataaataaatctttaaaaaaaaaaaagaaagaaagaaagccacatgatggagtcaggcatggtagcacatgcctttaattccagcgcttgtgaggcagaagctggcggatctccaggtttgaggccagcctggtctacacaatgagttccaggacagccagggctacacagagaaaccctgtctcgatagaaccaaaaaagaaagaaagaaagctggactggcttaagtggagaggaaagctgctggctcaaagtaggctaggggaggagcttgctggaattcgggttaccaatgtcgtcctctgccctgtcctcactgcccgctcctcagctgccctcaagttgttctttaccttgcctcttttttcccccccgggaggaaggattgaagggctctcccatcatttgggcaggagccatttgttgtgttatgtgcactacgtgtgtgttgtacatgtgtgcacatgcccatggacgccgaaggccagtgtctgcttcttctttaagttgttcttgcttagcctggagctgactgatttggctaggctggctgctagcaagccttggggagcctcctttctcggtctccctggagctgggattacaagcacacattgccatgctcgttttttccattggtactggggatccaaactcagtactggctgctccatttcctgatcttgattgatcctcttggtttttagtttttgtgacaggctccatgcagccatcctggcttggtcttaactatgtagtgaaggctgattgtgaactgaccctccagcttccacctcctaagagcaggtgctgggtcttgccttctaccatgtgtgagtttcaaggatcaggtcgtcaggtgtgatagcaagagccctcacccactgagcatcttaccagccctatgtattagggtcttatttatgttttattatttgttgttttgttttgcttgatgtagtctcacgtagccaaggctggccttacactcctgaccctcctacctctacttccaagtgtgattacagacctgcacacctatggtttttagctccatgctgtttcctagactttatgttgctgctctgtggactctgtacacatgctgctttcacagtccactcagtgtctcaaaaccgccttcaacaggatgtggggtgtcctttcggggaggtttcttcactcttgcatagattttgtcaaattgggtggaaaaaattgtttctgttcatttgtagtttctaattgtctacccacaggttgcctcttcccccatgatatctccattttgtggttgatcctatcttgtgaattttgtttcagtgacatataatataaggaagatctaaaagcttccattggattctaatgtatgcttttcacacctttactgcagtttctaccttcccattaatttttttttttttttttttttaaagatttatttatttattatatggaagtacattgtagctgtcttcagacactccagaagagggcgtcagatctcgttacggatggttgtgagccaccatgtggttgctgggatttgaactctggaccttcggaagagcagtcgggtgctcttacccactgagccatctcaccagcccccattaattttttaaaatatttttttgtttctgttatatttttgagacacggtctttctgtgtagccctggctttcctggaactcattatatacaccaggctggctttgagctcacagagatcagtctgtgtgctaggattaaaggaggagtataccagcatcaccatgcctgatggatctctgtgagttcaagggcagcctggtctacagagcaagttccaggacagccagagctacgcaaagaaaccctgtcttggggggagaaaaagaccttgcctcagttgactgggctggtgatgtagctcagttgtagagtgcttgtctaatgtacaaggagtctggctttcatccccagaagtgcataaaaactgttccctggttacaggaatctatagtcccaggactcatgagttagaagcagggtctgaagttcagaattatcctcagaactgcattgaataaatgtcatcattggcactatgcacggaccacctgtgcatctcaagaaatgcctcattgtgtatgcttggtgttgatgacagaggaggagtaagtctgcaggtcttcatcagtggcgtacatgcctgtcttcccacctttctgattatatcctcattgtcattttgtaaaagaataagattttcttgatacctggttgaaatgaatagaagttaatgtagtgctgcccgagtgtgccacaaggtggccccagcacaccgtggagctcctgtaggttggcagtaacgcatctgaagttatctggttcttcttaaaaggggattgagagcttagcaggaagggcagctgcctaaggctgtgtttgtgctgtgtagtaactcagcaccctgcagtgtgggacatgggtttgagtgacagcacctggctggctatgagccagtttggaatctttttttctttttttctttttttttggtttttcaagacagggtttctctgtgtagccctggctgtcttggaactcactctgtagaccaggctgcccttgaactcagaaatccacttgcctctacctcccaagtgctgggattaaatacgtgtgccaccactgctccgccagtttgaattcttctgagtccctgagcaccgcaatgatttatctgaaccacagtcttgcttccctaacacagctgcctcccaagggggtctggggtgactttaaggctctctgtcactggacacaactagagcactttgctaggctcagtgctagctacatcttggcctcggtttctctttgtctggagggctcagctgctgcctagttcatcagaagcggccatctcctcttgattattgctttacaggtatctcctggcactgctaggtgtcccctaatcagaatgacacagaattccctttaagttagtgatgttctctagaggcagtctgtctagatggctctagcgtgtgctttggaccaacattcagagccacaggattaagtgtaatggactggaaagctgccctgttctttgtcctttgatcatgaagccattgtattcccggctcaggaatctttagagtacattgaagcggtgtggagaacgatagtgacctataacccttacttacaacaatagctaacggattgctgtttctcccttgctttcagtttcttcatgcacgtgccctgttcttgttaacactgcactgttaccgcagaacttgaatcgcacgcaggccatctccctcaaccttgcagttccatagttctaggggattttgttttgctctgatttggggtgcgggatgttttgttttgttgttgcccatggggaacaaaaacaaaaactgtgttatcatcagttgtactcagtggtatgtctgtaagctgaataaaatttccaaatgggctgcactgtggctcagaggataaaggtgcttaccaacaaggcagaggacctaagttcaatcctcaggccctcagggaaggaggaaaggactcactctgacccccacacatgtctcatagcatacatgcatacataaaaatatataaatataatataataaatctttgacttgtggctttaaagtactgtgtaaactaaatagtaaagagtagtgcaaggtgaggctggtcagttagatggcttagtgggtaaatgacttgccaccaagcctgacaaccaagttcagtacccagaacccacatagtagaggaaagaactgactcctgacttcatgtgtgctttggcacacacccatacacttacacagtagagaagttaatatttaagaaagtaatgagaggaaataactaaaaaggaaatatcagagcaagtttggtactgtggttccagcacccagggattgcctggagtttgaggaaagtgtagattgttagaaaatcctgtctcaaatatatccccgatgccaaaataccttcctccaaaagattactataccttctttatgttttgggggagtaagttttcttagcaggatcacctgtggtgatttgaattagaatggctgacaaaggctcatgtatgtgaatgcttagccatcagttggtatggtttgaaaagttaggcctgaccttgttgggtaggtgtgttccgagaggaggtgtatttgttgctgggggtggacattgagatttaaaaagcctaagccaggcccagtgttgtctctctgcccactgcctgaagatcaggatgaaagtgctcagtgcttcccagcaccacccttgcctgcctgctatcctgctccatgccctgatgggtaggatgaagcccggaaactctaagcaagcctccatttaaatgctgtcctttgtaagagttgacttggtcatggagtctctccacagcaatagaacactgagactaggtctttgtagccctggctggccttgaactcacagtagtctgcctgcctctggttcctaacactggaattaaatgcatgtgccaccatgctctgatgatgatgatgttgttgttgttattgttgttgttgtgtttgtttgtttggttggttggtttggtttggttttgagacagggtttctctgtgtagacctgtctttcctggaattcactctgtagtccagactggccttgaactcagatatacctgtttctgcttcccaagtgctggaattaaaggccaccaccacctggccagattttttttttttttttaagcttcagtctgatttcagattcactgtgtagatgaggatggctttgaacttctgatcctctttcctccacatcctgagtggagtggtgggattacaggtgtgtgtttcagggttttgtgtacatatatggtttgggggttgtttgcttcaggcaggggtaagctccagcttttttttttttttttaaagagaggggggggggctggagagatggctcagcggttaagagcactgactgctattccgaaggtcctgagttcaaattccagcaaccacatgattgctcacaaccatccataatgagatctgacgccctcttctggtgcgtctgaagacagctacaatgtactcatatacataaaataaataaatcttgagagagagagagagagagagagagagtgtgtgtgtgtgtgtgtgtgtgtgtgtgtgtgtgtggtgtgtgtgtgtgtatggggggttactgtttgtaaatacgtacatatgagtgtaggagcccacagaggccaggagagggctctcctttccttggagctggagttagagttgtgaatcatctctgtgagtgctaggaaatgaattaagggtagagtagtaagtgtgcttagctgctgcgccgtctctccagcccctcgaacactttacataggctttgctttatgttttgctagtcttgaacctagggatttgcgcatgcttggcaagccgtgtaccactgagctgcgtgtctggtgagtgcatgcctgccactctccagcccctacaatggttttagagtcacagaaacctgtctcatctcgttacagttagtagctggtttccctcccttacccaaggcccttcccttcccttccctctattgcagaattcagcacagagccccacagtgctcagtcagcatctggctgtatgcgcctttgactgagacagctgctcagacttactgggccagtgtctgtacagcatcccccaccagggtttgactgatgtctcatgtcatgagctggagctgcatcaccagcttactgctgttggtgctgatgttggctgccccacagaggcagtagttatcaggtatgctcaccaaaactcactgctcttcctccaggaacttactttggaaagaagtcttccatgtgcagcccatacaaaggattaaggtctagtcaggcgcctccaacctgaagtcagggatctacaagttaggaggtggtctctccatctgcaaaagtgtttgtgacaacagacctatgtgtgtgacccagttttctttcccttgttggaattgtctgttgtccctgtgcctgcctaccacaagtttccagcacttccttattttctgtactatcagataccccaggctcatcttgggggtttcctgccctcgacctagcattggatgagggtccaagataacttatcttgtgttggcgcaagatcatgggggtgagagtagaaggaatcattcatctttgactggcagttctgttgtgcaagtgccgtagagtgtgtgcctattggtgactgtgacattgctaggtgatgtaacctagtgggcccaccatcataacgatagactcctcagctgataggaatggctgtgcagcatatggaggtgtgtgtcctgagcaatgcctagatacatccatgggtactagttggtaaccatctgttcacaggaagttaatcatgagtttgtactgacatgtccagctctcctgcgtcatcagtgggtcattctggctttgtccgccttactgcttatcgcacatccatcactattcactcccagcacatggtatacttactgcttgagagtcactgctccctgtgggaaaagcagcttacaccagaacacagaggccctttttcttgattacatttttcagttttatatgagtgttctgtctacatgtatgtatgtgaactacatgtatgtctggtgcccacaagggtccaaaaagtgggccagatcatttggaactggagttacatatagttgcaaaccaccatgtgggggctgggaacccaacctgagttatctacaagaatgtctggtgctctgaagtacaccgtctctccagccccattgcatggatcttgtccaatgcatggtatcatgagtccaccagtcaaatatacaaagtagtttcactgtcctgaaaagtccctggggagtcagctgatgcccctgcgctgaagacctcccccgcctttttccagccagctcccgcctactctcctactctcagaacaagaggaggggctggggacacgttgtctatgctgttctctgggccagcttagctgtgccatagtgctagcagcagtgtttgagtatgctagaagtttaagagctaccataaggtatcaggagaggagtccctacgccatttgaggacaaccaggaagctggcattggcattgttggtacagccccttgcttcctgggcttttgtttgtacatagctttgaaggtcctctttccatctacagtgagaacctgaggctcaggcaggggacgttagcaactcagtgggagatgtgaaaggcccatgtacatattgatagggatgatgggacatacactcacagacctggtgttgggctctgatgttatagccagggctttttggtcagatggggtgctcctcgagagcagtgcagattgcttttgtggtggaccttccacacagtggcattggacactcactggtaaacacaaaggccacctctctctggctctgggcggctggtgccaaggagcaattggactctcggctctccttctctatttgagacagggtttgctgcccaagctagcctcaaactcactatatagctgaagataaccttctatctcctgcctccattttgaaagtgtcgggattataggtatagcttcaatatatagacgctcttcctcatttaaaatccctttatctctctgttaaatgtgtctgcttatgacttgaatgttgtgtgcttacagaacccagtcagtgccaggaacagcatgccagcagctctgacgaggcatctgaaacagaggaggaggaagaggagcccagcgtcgtcatcatggggcgatgaggagtttcagcagtcgtgagcccagctcattctgtgaccagcctcagaagagaaatggctgtgtgtgaccagctgctagactggctgtgttgggagaaggcaggcacctcctgcagccctgcctgcctggggagcagagggagcagaccttagacatttgcagattgcattctgtatcctgccctgctcttgctgaaggggagtgagtgcttcaccttccccgggtgccgttcccttctgcttgaacagcagtgagctctgcgctggtttctgtgaagggaatatttatttagtaaagaacagaaaacctgtaggtcttgtccacacgtgcgagatgttgattaccaaagcctcagcgaagccatcaaatgacagacactgggccttgaaatgtggcaggtcctgttgtgcttcactctgggaaaggcttgcacttgaggtacacagccctgccatttacggaccaggagaattcagagctgcagatttgtgcccacccaaccgttctcaaaacgagtatgagccaatggggccttcagcaggcagaaggagagcggtcccagggaaatgcaagtgatgaaagaaagcaggagtgtcccagagtgggaggcggacactgatactggccaaagccttagacaggggagaggaactggaaagagtggaactcttaggtgtggaaagtcctcctgtcaccaggatttggaggcagccagtcttgcacttagtgtccttgagtgactggttcaagcctgctgtgtgtagtggcccagagggcaagcaacacccacagaatactgaggaccaggcatcatgccagggagaagaaaggtgacccaggactgccttggtcctcagagccatcgtgtcagtggggcggcaggcagtttctagtttgggggtctggagtgtctccagcttccaagtgcgttgtgtgtcttttagggatgttggtagcattttgagtgaaaggaaagctaagaatatatctttttaagttttgtgggttttttcgacagctcataaatgtttacagtgtatttgactgagtttacgcccattctcttaccctcccccactgagcctttctcccacagaccctcctcctctttgatgccttgtttttggcatggcctgctgagtttctttaggtttgctgaatgagcttaggtgaaacacggggacctttccagtggcgctgccactaaagaaagtgactccccctctcctttttcttccatagcacagattccatggtccctgagccatgtgacatctgtgataacctgtctctttagcagtttgagtcacatgagatgttcgtgtctattaggactggtgttgtggttttgtgacttgcttgtaattctccctttacccatctgtgtcaaggttcttgctttgaacctgaagcctagacctcatgggcttttgttcctgttggatggggctgctaagcagcaaggctgggcctgaaacattatcctctgctgcctcagagctccggacaagcccctccctgcctctgccggtgtgcccggcccagaactgcatccggatacataaaccaaacagactgcaggctgactgctgatgctgagaaggaagcttctggggagaggtttctggccaaggggttatctgtgttccaggttagctgactcttggtctgtcttcagactctttgttaaggaaatggagcaattaggtggcgtcactgaggtgggtgggtgataatgccagccacctcaaagccacaaagaggaggatcatgcacttatgtttgttgagggctcatgggtagagagaatcctggcagcaagcctcaagccctatatatcatagctgtctcagaaagcctcatgaatatggccatcacacccagtctctccagacctcagaagctgagcatgcttgtcctcaggaggagggccgctgagggtcctggttacccttttcattcgctttctcaacagacctttgacagcctggtcatttagtattgaatgttctttacctttctgttagatttctcatggagtttcccaaataaggtttctcttgttacagatagtggtgctggggttgaaccaaccattgtgactaagactgtcataggtgtgctgtcctggggagcttgctggtagcatcacttcagcaggagagggtgcctggcactgcccaggccttcctttcatgagtacatggtgtgtgtatgtgtgtgagtgatgattgtttcataaaagattgtttttttgtgtgattgtgtgtggttcatgagatccacctacctcccaagtgctgagattgaaggaatgcaccacaaatgcagggtttttgttgttgttgttgttgttgttgttgtttggtttagtttggtttggtttttcgagacagggtttctctgtgcagccctggctgtcctggaactcactctgtagaccaggttggcctcgaactcagaaatctgcctgcctctgcctcccaagtgctgggattaaaggcatgcgccaccacacccagcttctctcacaaatgtagttttaaaagtaagtatggagccctcaaacaaccacactcgcaaaggtattttctgtcatgcccccatgccttgcagctctaactccacagctcagtggccacagcacagcccggtctgcctgcctctccaacttgtacgttacctgggtggttttggagcacctctatcccttaggccttcggtgcgacctgccttttcagcagccatttcttcaggtgtgtagagcacagaaaccttcagcctcccatgcttcccaccagcccactccagctgggtgtggttccatcctgtgtactaaacatctgtctgctgcttcagccagcataggaactctggtgcaaacaggaaacagcaaggaccctgtgtccatgagcccctaagcctgccccatatcctctctttaaggccaactcccagtgtcctggtttttaccctgtcaacttgatacaatgacatacccggggagaagaagctaaactggggggggggggttgcccccatcacattggcctagggacatttacctgtgacacattctcttgactcatatgggagggcctagtccactgtgggcagtgtcatccccaggcaggtgggcctgggctgtataagaaaagcggcaaatgagccagtttgcagtgtcacttccaaggtctctgcttcagtgcctgcctgccttcccttgatggactaagctgcaagccaaataaaccctttctatcccaagtcacttttggttagtgtttgatcaaacaaggacacaccccttctcctcatcccatgtcagtgtccactgggctcttccttcccaagctggcccctcgatgaccttgttcagtcatggacagtcagcattcctgaaaaatacttgcctgttcctgtcttgttttccttactcaagcgcctgagagttgggtgacccagctctccactgtccacaccaggaaggccccaagagagcctgtcttatttttggatgtcgagttaactggtacagtctgaggtctcatccccagattcagccctgtgcatctgtgttccaagatcacttaatggtttctcaggggtgtatggcggatacttcaagcctagtgtaagagagaagggattttagcttgggcatgttctttcccccttcttcctgtgcacacactaacttgggaatgaatcagagtcacccttggtccttccccacacctggacctgaacctgcttgctcctgtaggctctgcttcacgttcccatctacatgaggatctgcagcctgagggctaacatggcctccgagcatcatagcctgccaatcctcccatcagaaacaactatctcacatactcagtccccttcctccacagcctcaaaccctcagctttcgagagccagagccttggtggtgcctgtgatccctggtgcccgagagaagttcaggacatgatattatatgcctgggaaatggttaaggaaatcagagactgaaagccgacagggacctcttcaagcttgaaaggaatgtgttagcatgcttggctgcaggatgctaccagaaagttgacccagatgcagtaactctggaagagcccttcagaatccattgagatggctcagtgggtaaaaatacctgctgccaggcgtgatgacctgagtttgaccccagaatccacatggaggaaggtgacaacctctgaaagctgttcgtcttagcacacctctctttacacaacgtaacaaattctaggtcctggggttgtccagtgcttgtccaggctacatgaagttctgggtttgagacccagttctgcatacattggggatcattggacagggcatggtggcaaacacctttaatcccaatactcaggaggcaggggcaggcaaatctcttgagtttgaggccagtatggtctacagtgcaagttccaagacagccaaggctacacagagaagccatatcatgaaaaaacaaataagaaattaggggagccctgtctcaaaaaatgaatgaataaataagtaagtggggggagggggttcatggcacttgggaggtagagggaggaagatcaggagttcaaagtcatcctcggccacatagcaagtcaaggccagcatgggttacaagagaccttgtatcaaaaaagccagtaaggctgggcgtggtggcacacgcctttagtcccagcgcttgggaggcagaggcaggcagatttctgagttcaaggccagcctgctctacagaatgagttccaggacagccaaggctacacagagaaaccctgtctcaaaaacaaaacaaaacaatccagtaaatatccagactctctagtgataacctcaaattttgaactcattactgttcgttctagtcgtggcagcaggggaagtggggagagttcagtaacttgcatcaggagaattagactggccagaaaggacatttgattctacttccacctaccttagaaatgctggattgaatcaagtagcagggtttctctgtgtagccctggctgtcctggaactcactctgtagaccaggctggcctcaaactcagaaatccgcctgctgttgtctcccaagtgctgggattaaaggcgtgtgccaccactgcccagaggttttgtttttttggggggttttttgtttgtttgtttgtttgtttcctttttgagacagggtctcgctgtgttgccctggctggcctaaaactcactttgtagaccaggctggcctaaaactcacatctgcctgcctctgcctcccaagtgctgggattaaaggcattttctacctttgccatgcaaagagccatgagtattttaaatttacctgtttacaaccttaatcttatagaaaatatatcaaattgagttaaaggggtgttttagttttatttcagatattaaaacctggtggtggcgcacacctttagtcccagcacacgggagtcagaggcaggcagatttctgagtttgaggccaacctggtctacaaagtgagttccaggtcagccagggctatacagaaaccctgtctcgaaaaaacaaaacaacaaaaacaaaacaaaaaaacctgacaaaaaataacttaggcatggaaggttcttggttttggtttttagctacaacttagctgttacagtccaacagtgtggccttcaaggcaggaacttaaaatagtcacatcatgtctacactcaagagcagagaagttaacgcatctttgctaactagtgctgagctcagttcctccactctcagttcaggaccccttgcctaaggaatggtgccactcacagtgggctgggtcttcccacatcagttaagacagtttgggactggagggatggctcaacagctaagagcactggctgctcttccagaggtcttgggttcaattttcagcaactacatgttgactcacgactgtctgtgactctagttccagagaatctgacatctggtgtctggcatggcacatacacggtgcacagacatatattcaggcaagcactaaaaacaaattgtggcttgaataaaaatgacccctataagctcatatatttggatgtacggctctcagttggtggactgtttaggaaggattaagaggtgtggccttgctgagtagtggtagtgtacacttttaatcctagcacttgggaggcagaggcaggtggacttctgagtttgaggccagcctggtctccagagtgagttccaggacagccagggctacacagagagaccctgtctcaaaatacaaacaaaaaagaggtgtggcctcgttggaggagatatgtcacagggtttcaaaaagccacaacattcccaactatgctttcactgcccctatcttgtggataagatgtaagctctcagctactgctccagcatcctgcctccgagcctgcctgcctgcctgcctccgagcctgcctgcctgccttgcttccctccatgatggccatacactacccctctgaaactataagcaagctcccaagtaagtactttcttttataacttgcctttgtcatggtatctcttcacagcaaaaggacagtatctaagcccacatttaaaaagtaaattaaaaaaaaaaaaagaatttcccacatgtgtgccaacaggccaacccaaggtaaaccctcattcaaatttcctggtgattctaagttgtgtcaaactgacagactttttttagtttttttttttttatgtgtatgttttacctgatgtatctatgtgtaccacatgaccagcgcccatggaaccagaggaggtcactgggtcacctggaactggagttacagatggttgtgagccaccatgcaggtgtagggaacagaactccggtccttaagtgttcttaaccactgagccagctctccagccctaacaattcaaacaaaaactcacaaggaatggcacttctccttggcagtctgagcctgtctttgcaggaccagggacttggcggcttcccaggagcctgtgcagagactgtttccctcctggcccaggaaccaggcaggctcttccctccttccgaacctaatttctgtttactctctggcatcctccactaaagggagctgtcattaccatatattagcatgtatttccataaagagcacactcttagaaatcaacctggagggaatccagagaggccctttccagcttcctcgttccatagaacatagtaaacgtttactgagagccgagcaagtgctcaccctgggattccagagtccacgagagagagcctggggtatggtggagaccagaggctgggagctctgaggcttctcgaggcaatctttcacggtggagtgtggactagaggggttaagaggaaggccctgccctggcagtgatgcatccagaggggtgaacatcctgacgtagaagcaggtgggagcagaggaaatggggggaggccaaagacttcctacagcaggactgggcttccaggaaggatgggagcctggggtgatagaaatgggttgtaatggctggccagatggctcagtggttaacagccattgctactcttgcagaggatagagtttgagtgtcagcacccacatcaagcagttctcagctgcctgtgactccagcttcaggggacccaacttcctcttctggcttctgcaggcatccttatacacaaacacacacacacacacacacacacacacagatctttaaatgggctggagagatggttcagtggttaagagcacttattcttgcaaaggacgtgggttcaattctcagcacccacataacggctcacaaccatctgcaaccccaactgcagagaatccaacaggcacatgtacatgcatgcaaacaaaatattcatacacaaagtaaataaataacattttaaaaaagtctttaaaagcaaaaccctgtacataaaaaggacaaccatagataggaagaacaaagggtcggagagagacttacttggtagatagaatgcttgcctacatgaagccctaggctccatccccaacaccgaataaaccagccacagcagggcatgcctggcattcgagaagaggagggtccagaactcgaagtcatcctttaactacacagcgagtttgaggctagcttgggttacatgagagaacctgtctcaaaaaaaaaaaaaaaaaaaaaaaaaaaaaaaaagctatatgacagcaccgagccaccttccggttctgaacaccttacaggtggactgctgaggggcgggggcgggggagtagaagtgagggcatctccgataagtgaggtggggaagggagaggccaaaggttgacaagatggctggaaggtctccatcctggagaagggtgggtctcagcaaggaagagaaaggggcttggtgggctgtaaagtgaaccagaaaggtcagagtaagacataagactctgttcccccaggaccttctgagcacttcttaaattaacagcagcatgacaaaggtgaggagataaatccacctgtgtgatcagggtagggactttggaaagtgattaggtcactagggtggggctgccatcactgaatcctgttggctttataaggaagagagagaccacagtgaaatgggtacacccccacccccaccgcgtaagggagtcaggggaggggggctctcaccgtactactaaacctttgcttccataaatggaagccaaaataaactgtgtgtctttataatgtagcttcaggtgttttgttacactacagaagtctgagcaatgtgtcagggtatttggtattcagtttttacagtggactgtggtagaggaacgtactaggtaggccatgcatgaatagctaaggggacagagtgaggagccagtgggctggacaagctgaccacacaaactgtgagagcgtgctagatagtaaggtttgggtgtcatagaaaagcaaggaacgaggctcctgtgtgagtaggctatgcacattcattatgtgtattcaagaactgatgttcaaggacaggctcctcgagcttctaggaaaatcaaaaaaccgaccagcaagatggctcagtagctaaaaagcgctcactgccaagcctgacaggctgagttccagccacttggtaggagagaaccaactgccacaagttgtcctctgacctccacacatgtattgtggtgcacaccaccaccccactaaataaataaaatgtagttaattttttttttttttaagtaaaggaagtaacttgccaagaccaaccaacttcaggcagacagcccagacagcaatgcagtgccctcaggagagactgctctggacctgaaccttctgggtaacccctagtcagctccctgggatcctaagagggggcaggggttgtggatcctccaacctccgaccctccttccaacaggacagataccatggcttcctcccttctaaggaggaagtgagtcaaacaacagtaagggctgttgcctgtgtttggttagcaaagcggctcctaggcagactggtaattacagttggcatttcatttttgcccaggcatgccagataattgtgctggcggtggaggaacctcagtgcctggcgctggaaagtcctactccaaagctaagcttcctaataaccgcaagaagcaaaaaccccttgttgaaagagtgtcatccatgatgcaatggctggagtttaccaagtgtctccttcctgttttcgtttactcaaacttcagctctgcaggcgccaggcagttgccttgagagtgcgtggctcccgcaggttcagaccctcttatgtaggcacacgtggagccttatgatggcccacgctgtcaggaggggtcagcgccaggagggaggagttgctttcacctatcctaagtgaattgacttggcaacccaagcggaaactgctaacagtcacatctatacactcccagttgtcaggaaatttggatacgagtggaatttttccttcctttgggttaatgtgtcacagtctgatgcttttgcgacagatggaaaaatcctatatagagcgtgcaagcagaagcgtaccgggcaaatagggagcactctgaggggccacgaggcacccactggggcgctgagcgtatacttagtgtatacttcctgcagagccgttcctgtttgagtttctcagttgtaaaacctcagtgttcgccagggcatgcctcgccgcagcgtccaaacgacccttctctgccatccatgaggtgcccagagctcagcaatgagaacatgtccc

SEQ ID NO: 1760 - DNA, 964 bp, Mus musculus
aggagtaggagagcggctatggcgagtcctgctgccgcttctgtgagaccgcccaggcccaagaaagagccgcagacgctggtcatccccaagaatgcggccgaggagcagaagctcaagctggagcggctcatgaagaacccggacaaagcagttccaattccagagaaaatgaatgaatgggctcctcgagcgcctccagaatttgtccgagatgtcatgggatctgtctatttgtactcagctgggctagtgctttcccacagaggccaggactttatgccagcaagcactgaggttccagtgctggggctggcagtggagagttccacgtgtataggcacctacggcggagagagtaccagcggcaggactacatggatgccatggctgagaagcaaaaactggatgcagagtttcagaagagactagaaaagaataaaattgctgcagaggagcagactgcaaagcgccggaaaaagcgccagaagttaaaagagaagaagttactggcaaagaagatgaaacttgaacagaagaaacagaaggaagaacccagtcagtgccaggaacagcatgccagcagctctgacgaggcatctgaaacagaggaggaggaagaggagcccagcgtcgtcatcatggggcgatgaggagtttcagcagtcgtgagcccagctcattctgtgaccagcctcagaagagaaatggctgtgtgtgaccagctgctagactggctgtgttgggagaaggcaggcacctcctgcagccctgcctgcctggggagcagagggagcagaccttagacatttgcagattgcattctgtatcctgccctgctcttgctgaaggggagtgagtgcttcaccttccccgggtgccgttcccttctgcttgaacagcagtgagctctgcgctggtttctgtgaagggaatatttatttagtaaagaacagaaaacctg

SEQ ID NO: 1761 - protein, 133 aa, Mus musculus
MDAAASVRPPRPKKEPQTLVIPKNAAEEQKLKLERLMKNPDKAVPIPEKMNEWAPRAPPEFVRDVMGSVYKAGLVLSHRGQDFMPASTEVPVLGLAVESSTCIGTYGGESTSGRTTWMPWLRSKNWMQSFRRD

SEQ ID NO: 1762 - DNA, 927 bp, Mus musculus
cgtcatcaatacgagcggccgccggcagctttcgtaaaggagtaggagagcggctatggcgagtcctgctgccgcttctgtgagaccgcccaggcccaagaaagagccgcagacgctggtcatccccaagaatgcggccgaggagcagaagctcaagctggagcggctcatgaagaacccggacaaagcagttccaattccagagaaaatgaatgaatgggctcctcgagcgcctccagaatttgtccgagatgtcatgggttccagtgctggggctggcagtggagagttccacgtgtataggcacctacggcggagagagtaccagcggcaggactacatggatgccatggctgagaagcaaaaactggatgcagagtttcagaagagactagaaaagaataaaattgctgcagaggagcagactgcaaagcgccggaaaaagcgccagaagttaaaagagaagaagttactggcaaagaagatgaaacttgaacagaagaaacagaaggaagaacccagtcagtgccaggaacagcatgccagcagctctgacgaggcatctgaaacagaggaggaggaagaggagcccagcgtcgtcatcatggggcgatgaggagtttcagcagtcgtgagcccagctcattctgtgaccagcctcagaagagaaatggctgtgtgtgaccagctgctagactggctgtgttgggagaaggcaggcacctcctgcagccctgcctgcctggggagcagagggagcagaccttagacatttgcagattgcattctgtatcctgccctgctcttgctgaaggggagtgagtgcttcaccttccccgggtgccgttcccttctgcttgaacagcagtgagctctgcgctggtttctgtgaagggaatatttatttagtaaagaacagaaaacctg

SEQ ID NO: 1763 - protein, 184 aa, Mus musculus
MDAAASVRPPRPKKEPQTLVIPKNAAEEQKLKLERLMKNPDKAVPIPEKMNEWAPRAPPEFVRDVMGSSAGAGSGEFHVYRHLRRREYQRQDYMDAMAEKQKLDAEFQKRLEKNKIAAEEQTAKRRKKRQKLKEKKLLAKKMKLEQKKQKEEPSQCQEQHASSSDEASETEEEEEEPSVVIMGR

SEQ ID NO: 1764 - DNA, 50784 bp, Homo sapiens
ttggcactctcaagcgctagcaatgtatatcctggcagaagccaaggtaaattctctccagaggcagttaatataatgctatattaaaaataaatatcaaggtttaaaggttaaaaaaaattattcctcaagataaacagtaactcttcactgtaataaaaagttaaattcaccaggaagataaaagaattctaaatttgcatgtacctagtaatattgtcttaaaatacataaagcaaaaatcaacaactctataagactaaatagctaaacgaaaaatagtgggaaattttaacatacttttcaacagaaactgataaaatagttagacaaataattagtaaggatatagaagatttgaacaacttaatctatggacatatatggtcacagtgacatgatgaagctggcttgtatcctctcatgagaaacaatttttaaaatttcaagacttttgtgaaccagctgatatcgcgctagtagcttgacattgaccactatgggaatatttatataatagtatgataggcaaatgctaccaatcacagttttatccccttcccctctgaagccagttagtttttttactttttctttttttttgatagagatggaagtcttgctatattgcccaggctgatcttgaacccctggactcaagccatcctcctgtctcagtctctctagtagctgggacaccatgtctggccagttgttaagttttgtttgtttgtatttgagactgagtctcgctctatcgcccaggctggagtgcagtggtgcgatctcagctcactacaacctccatctcctgggttcaagcgattctcctgcctcagcttccccagtagctgagagcacagacgtgtgccaccacacccagctaatttttttcttttgtttttttttgtatttttagtagagacgggatttcgtcatgttggccaggctggccttgaactcctgacctcaggtgatccacctgcctcagcctcccaaagcgttgggattataggcatgtgccaccgcacctggccatgctgcatcttctttgccctaaatgaccccttggtctgaagagatgacataggagatcccttccccacaagtcagatgcattttacaagcccttgaatgatggtgctggcagaggtactgcagatagaaaaggccagtccatttctggtgtagtaccaattagagtaagacaaatcaatgcccccctctgggatgaaaggcggccagtgtaatcaacttacccccaagaggctgactgggctcttcaaaggatcgcactgtatcatgggtcattcagttcaggcattcagtaacagcagtaaatatatcagccttgctgagagtgagctcacgccatcgtgcccatgtgtagccttcagtcctgcgcgtggccattctgctgatggaccaattgcacaatcactggaatggcttaggacagacactgtgtgacctccatagagaagctatcttttttgttgttttgtttttttgttttttgagacaagggctcactctgtcacccaagctggagggcagtggtgtgataatcacttttggaggctgaggcaggaggatcacatgagctcaggggttcgagaccagcctggacaacagagcaagacaccatctctacagaaaatttaaaaattagccaggcgtaggccgggcgcggtggctcatgcctgtaatcccagcactttgagaggccgaggcgggcggatcacgaggtcaggagattgagaccatcctggctaacacggtgaaaccccgtctctactgaaaatacaaaaaaattagctgggcgtggtggtgggcgcctgtagtcccagctactcaggaggttgaggcaggagaatggcgtgaacccaggaggcagagcttgcagtgagctgagattgcgccactgtactccagcctgggcgacagcgagactccgtctcaaaaaaataaataaaataaaataaaataaaaattagccaggcgtggtgatgtgctcctgtagtcccagctactcaggaggctgagttgggaggttcacttgagcccaggaggttgaggctgcagtgagttatgattgcaccactgccctccagcctggatgacacagcgagactctgtctcaaaaataataataataagtaaaccaataaataaaaagaagtgtgggggcttcaaccacattggcctctgggttttcaaaaacctgtcaccccaagccttggccttatggtgagcagggcagatttacaggcccgagctgcctcagagggcacaaggagctaaaggctgaactcctcacgaaagcaactcagacaatggagggttagctcccctgcaacctggcaaatccacactgtaaattaggtcaagtttattgaggtacaatgttcatatgattaaatccacccttttaaagtatatggttcaagtccaggcacagtggctcacacctgtaatcccaggactctggtttgagaccagcttgggcaacatagtgagacccccatctctacaaaaaaacaaaaccaaaaaatacaaaaattagctgcacatggtggtgcgtgcctgtagtcccagctactcgggaagctgagatgggaggattgcttgaggctgagaggcagaagttacagtgagcagagatcgagacactgcactccagtgtgggcgacagagtgaaactctgtctatgaataaataaatagaagtatatggttaaataagtttgataaatgtggatggttgtgtagctgccaccacaattcagatatagaacatttttgtcatccaaatattatgcagagaggccaggtgcagtggatcatgcctataatcccagtgctttgggattctggggatagaaggatcactggaagccaggagtttgagaccagcctgggcaatacagcaagacatcatctctacaaaaataataataataataaagtaaaaatagccaggtgtggtggtgtgcaccaatagtcccagctattcaggaggctgtggcaggaggatcactgaagcccaggagtttgaggctgcaatgggctatggtcacgccactgcgctccagtctaggcaacagagtgagacaccatctcaaaagaaggaaagaaggtaggaagggaggaagggagggagggagggagggaggggaaaaaatatctattacccaagaaagttccctgaggccctcccaggtcagtcccgtcctcctacttggcccatggcaactgctgatctgttttccatccctatcattttggcttttccagaacatcaagtaaatggaaccattcaggttgtggccttctattaatagatctgacttcactcactaaacataatgcatctgagatccatccacgttattgcaagcctcaagaggtccttccttcctttttcttttttctttttcttttttttttttttgagatggagtctcactctgtcgcccaggctggagtgcagtggcacgagctcggctcactgcaagctccgcctcccgggttcacgccattctcctgcctcagcctcctgaatagctgggactattggtgcacaccaccacacctggctaatttttttgtatttttagtagagactgggtttcaccctgttagccaggatggtcttgatctcctgacctcgtgatctgcccgcctcggcctccaaaagtgctgggattacaggcatgagccaccacacctggtcccctttttttttgagatggggtctcactgtcgcccaggctgagtgcagtggtatgatatcttaatccaccttcttaatccgactcactgcaacctccgcctcctgggttcaagcaatcctcctgcctcagccttccaagtacctgagattacaggtgcacaccaccatgcccagctaatttttgtatttttagtagagataggctttcatcttgttggccaggctggtcttgaactcccggcctcaagtgatcctccctcttcagcctcctaaagtgctgggattacagtcatgagccaccgcactcagcaaaagctccttccttttattgctaagtagtatttccctgtaggtctagatctcaatttgatggacatatgggttgtttccagtttttggcaattatgaatcaagctactgtttgtatttgcatacaggtcagtcagtggacatatattttcatttctctagtttgagaccagcctgggtaacgagagtgaaactctgtctcaaaaaaaaaaagaaaagaaaagaaaaaaagaaaaaagaaaaaaaaccctgctgttttagtacttaaagtatcaaccactactcaaagaattgagataggagtacccactcgtctagggtaatcaaccatcctggcttgcccaagattctcctggttttagcactgaaggtcccactttctgggaaacccttcagtcctaggatcaaactaggacaagtgtggtcacctatttttttttttttttttcagacagagtctctctctgtctcccaggctggagtgcagaggtgcgattttggctcactacagcctccgcctcctgggctcaagcaattctcctgcctcagcctcccgagtaggtgggattacaggcagctccccccaccccacacgcccggctaattttttttgtatttttagtagagacggagtttcaccatgttggccaggctggtctcgaactcctgacctcagatcatccacctgcctcggcctcccaaagtgctggtattacaggcgtgagccatgttattgaatgtcaggctctgctggacactgcatgtccaaacgtcattttacccatgtgccagcgacaaggtagattcgcttgtaccaattttgcacataaggaaacagccttagagaggttaggttgcttgtgcaagcccagggtaggtggcacccagtctgccagtctgcaacgcactggtatcttccagccagtagaccttgctccctgggtgcccagttctggatctcaggaaaggtggattaaggctcctagtggcgggacctgggtggggatttgctgccctctggtggcagaagggacatcaccctgggtgtgagacttgtgggcatctgtgaggcggcctttcatcccagggagccggacctcaaatctgacctcagccccaggaaggtgccaccaggaaggtgccacctaggagggtgccaccagggttcccgccagggtctgctggggccctgtcccatctgtgtgagtcacataatcactcaggctgtcacagacccagggctagactgctgggtttgagtctgtgtggccctgagccaattgctttctcctctgggcctcagttccatttcagtaaaatcaggatgatagcctgggcaacatagcaagactccagctctaccaaataaataaataaataaataaataaataaataaataaataaataaaatattaggctgggcaaggtggctcacgcctgtaatcccagcactttgggaagctgaggcgggtggatcacctgagatcaggagttcggggccagcctggccaacatgacgaaaccctgtctctactaaaaatacaaaaattagccgggcatggtggcgggtgcctgtaatcccagctactcaggaggctgaggcaggagaatcgctggaacctgggaggcagaggttgcagtgagccgagatcgcgccattgcactccagcctgggtgacaagagagaaactccctctcaaaaaataaaaataaaaagttagctgagtgtggtggcaccagcctgttgtcatagctactcaggagtccaaggctgaagaattgcttgaggtcagcctgggaaacatagcaataccccatgtctacaaaaaatgtgaaaaattagctgggcatagtggtacctgcctgtagccctagcttttctggacactgagtcaggaggatcccttgagcccaggagttcgaggctgcagttagctatactggcaccaccgcactccagcctggtgacagagtgagaccccgtctattgaaaaacatatatctgctgataaatatgtccacaatttagaccagacttagacactgaagttattaccagctccttcacacccacatgccttaactctctcttgccttcatgcattccttcactccattcattcgcttaactttcatccagcagatatctgccaagcaccagctctgtgacagacactgaggctgggggtgccagggagacctttaccaaccggacagacactgccccgcactcctggctctgtggctttctgatagtccgtggcctcacatgttcatttattaagtgtccttttattgattgagtcttcattcattctttctcttaatgtccttattcattcattcatccatcacttgctcatctcactgacacgtctattcagtcttcatatatgttttcattcctttattctccaagcatcctggaagtacccactctacaccatgccagggttagatgctgggattctggcccagcccaccacactgccaagcccatggggacacagatggtgaggacatagtggtaactacttcaccagttattgggattcagagctgggagagcaccaagaagggagcaattcacttcctggaagtgaggggtgggagaggcaatctgagaaggcttcttggaggaggtagcattttggccaagttgagaagcctgtatgggagttctccaaggaggaaaagatgctttgttttgtagacaaaaaccttcgttctgtggagtgtttggagaaaagtgaggtactggttgctaatgtgtgtgatcctgggtgagtttgtgtgcatggccccagccaggccaagccctccccaggttccagtgacagacctgggccactaaggacccttaattccaccctgagctcctagaaaaccacccactattgggcagccaggaatgacctttggagaacaaacacttcaccctccaggtaccatccacttgtccacctgttcatcctcttggggactcagtgggagggcgaccctgtccctaggagcccatgtccctccagcaaatgtttcttttatttttatttttatttatttatttattttgagacagagtcttgctctgtcgcccaggctggagtgcaaaggcgtaatcttagctcactgcaacctctgcctcccaggttcaagcaattctccagcctcagcctcccgagtagctgggattacaggtgtgcaccaccacgcctggctattttttgtatttctagtagagacggggtttcaccatgttggccaggctggtctcaaactcctgacctcaggtgatctgcccacctcggcctcccaaagtgctgggattacaggcatgagccaccacaccaggtttttgtggtcacggaatggtcttgtgtgatgttggtgtcctggaaattacttttgtttgacaagagaacaccaagacccagctgtgaatgtctgtccagctcccagggaaacagaacaggaactggacagagcttctccttcacatcctttccctttttccttcttttgtcccactgatcacaaaacccacaccattgcctcgctgacaatatagctgctaaccccgaggctttagtcatacaaagaaaataaagaacgaaactgtctcaaaaaaaaaaaaaaaaaaaaaaagaattccagagactggccttaggagatccaaatatcaaatgaagcttgcggagtgtcccacctcgggaaggaatgctgaacaattgattgacacccttgttgccaccagccagactaccaggtgactcattacttaagataaccatcgcaaccagatatgcgacctgcataccctcaaaaccagatatgcgacctgcataccctcacgtgctttgcccagcccagcctgcataccctacccctgatgtcaattcccatgctttgcctaataaaaaaaattcccagccaggcgcagtggcttatgcctgtaatcccagcactttgggaggccgaggcgggcgaaccatgaggtcaggagattgagaccatcctggccaacatggtgaaaccctgtctctactaaaagacaaaaaattagccgggcgtggtggcgtgcacctgtagtcccagctactcgggaggctgaggcaggagaattgcttgaacctgggaaacggaggtgcagtgagctgagttcgcaccactgcactccagcctggcgacagagcaacactctgtctcacaaaaaaaaaaaaattccccactggctcttccacaagtcagctggaggatcccttcacttctgcttccattgtcttccctgcactcaagcacaagctctgaaataaatgccttgtctgggaaatctgcttggatccctgttaagtttcattacaaggggagccaaacagcctatggtctgtaacaccaaatgtatgtgagcaacagcttttctctttctctttctctctctaatttttttttctttttctttttcttttttttagacacagagtcttgctctgtcacccaggctggagtgcagtggcacgatcttggctcacagcaacctccatctcccagtttcaagctattctcctgtctcagcctcctgaatagctgggattacaggcacacaccaccacacctggctaatttttgtatttttaatagagatggggtttcaccatgttggccatgctggtctcaaactcctgacttcaagtgatctgcccatctcggcctcccaaaacgttgggattacacgtgtgagccaccatgccgggccttttctgtttctcaatgtcaactaaacaaaaaatcaggcttttaaaaaattaaggttggttttttgcaatcttactgaggactgtaaccagggaaagtctttcacagagtttgttaaactgctccaaaacagagtttcagcacacatttatatatttatatttatatacagtttatataaaaacatttatatacagttggtggtgccctgcatgtgctcagaagttatatcaagctgggcgtggtggctcatgcctataatcccagcactttgggaggctgaggcgggtggatcacctgatgtcaggagttcgagacaagcctggccaacatggtgaaactccatctctactaaaaatacaataattagccaggcgtggtggcgtgcacctgtattcccagctactcaggagactgaagcaggaggatcacttgaacctgggaggcagaggctgcagtcagccgagattgcatcactgagctctagcctgggggacagagtgagactctgtctcaaaaaaaaaaaaaaaaagttatatctaatgtgctcagaagttaacaatagagcaaaatttcatcaaggctgtgtgtgagggtattatctagttacagattacagaggcttggctgggcatggtgacttaacacctataatttcagcactttgggaggcccaggcaggaggatcgcttgagcccaggagttcaagaccagcctgggcatcacagcaacaccttgtctctgcaaaaaataaaaataaaaaattaactgggtgtggtggcatgcgcctgtagtctcagctactcaggaggctgaggtgggaggagtgcctgaacccgggagttcaaggcagcagtgacctatgatcgagcccctgcactccagcctgggcaaccaagcgagaccctgtctctaaaaaaaaaaaaaaaaagttatagaagcataatcattaatcccgtcagagattatgtacaggaagaggcaggggctaggatcattgaacttgtcttttctaaaaatgcagtgttcaggcaagagaggtggaaacctgtgttctctctcgctcttcccagcttattgttcagggcgttattggagagggctgcgctcagtcaccgagtcacggcctttgtgaaatcctgctcgcaagcagaatgagcagacatggttccttaggtttattactgtgcctcacactacgagacggtcattcattggcagaggtgtatttgcggggggccaggtatagagtaattcaaggcggacaaaggaggaatgtcccagtcttcaggaagctcagtgaatgtttgcgctgtcttatgtaaacaggagattgtcagaaatggaggagggggcaccagatccaaggaagtgcccggacaaagccgggaggcgaggagagccgacggggaggaggtgccgagagcatcagcggggctgctcggtggcacgaagacgcccgcggggactggagaggtcggctagggccaggctactcaggcacggagggccacctccccttcagggacgtgagcatctagctgcactgatttgttgttcaggaacaggaaatgaaaccccgcagctttgaacacaataacccacgccagcctcaggctcatgaatattcagcaggctgcttgcgccttgcaaccccgcctccgttcccctctgctcgccggcgcgcggctgtgtcgtcatacttgcgcgccgacgccgccgctcgcttgtgaaactggaaggctgccatggctagcccagccgcctcctcggtgcgaccaccgaggcccaagaaagagccgcagacgctcgtcatccccaagaatgcggcggaggagcagaagctcaagctggagcggctcatgaagaacccggtgagacgaggcccaggctccacggcccgtccgaggcccacccccttcctctgcagcgcttcagggttcccgcaggtccaccttccccgcctccaaactcagaaactcagtatccgaccctccaagagcagtctttggggaggaggaggagaaggaggctgtcccggagatagtgaacttcccgtctgtccttgtgtgagagcccagcttgaatcaaagcacggtggagcggcttcccgtgctccaagaccccttctggtttaactttctgtgaacaaaaagcgttagactgaaaaggtagaatttgtgggttagcaaaagggtatactctaaacaacactgatcgttagagagacagtggccgagacgtttggagctggtcactcctctcccgctcacaccccctctgggcctcggtcccctcaatcataaaaacaattgaacgggaacgtcctttatacctttaactagaaaagcttgactcttcttatctagtagtgttaaagttggcggtttctagctggaaactatggcttaggtttttcagttctgctctggaaagcgtagccctgggaaggtgtggactgtgttatacccaagagtacataggatgaaaaaagccacgacagagggaagaacacaaaatcagctctgtgtccaagtagcaaagcagtcctgcttcattagtcaattaaaattctttggtcttaagagatgtaacttgggctgggtgctgtggcccctgcctgtaatttcagcgctttgggaggccaggcgggaggatggtccgaggccaggaaggagttcaagaccagcctgggcaacatagtgggtccctgtctttacaaaaataaaaaaattgcctggtgtggtggtgtacgcctgtgagtcctaactattctggagactgaaccgggaggatcacttgagcccaggagttcaaggctgcagtgagctctgattgcaccactgcactccagcctgaggaacagagcaagaacctgtctctaaaaaaagagagggagatatataattttgtcaacaggtttatacttaaatgctttcatgtttaaatgttgcaggacaaagcagttccaattccagagaaaatgagtgaatgggcacctcgacctcccccagaatttgtccgagatgtcatgggtaatggctgtgtgtgtgtgtgtgtgtgtgtgtgtaaatataattttttaaggtagctataggctgggcgtggtggctcatgcctctaatcccagcactttgggaggccgaggcgggcggatcatgaggtcaggagatcgagaccatcctggctaacacggtgaaaccccgtctctactaaaaatacaaaaaaaattagccgggcgtggtggcaggcacctgtagtcccagctacttgggaggctgaggcaggagaatggcgtgaacccaggaggcggagcttgcagtgagccgagatggcgccactgcactccatcctgggcaacagagcgacattctgtctcaaaaagaaaaaaaaaaggtagctataaaaatcctgtagttggtatttgttaaatctctgatgaggggaaatgtgtgttcacatgttcgtgttttgcttttacaatgacggggatatagttgcttttatttgtttttcatttgacattggtaaatttagcttaagggctatagttgcttatggtttggcactatagaattttctcctgcagtattgcggttttttttgtttttgtttttgtttttgtttttcttttggagacagagtctcactctgtcacccaggctgtagtgcagtgacaccatctcggctcactgcaacctccgccttccgggttcaagcgattctcctgccttagcctcctgagtagctaggactacaggcccgtgccaccatgcctggctgattgttttatttttagtagagactgggtttcactatgttggccaggctggtcttgaactcctgacctcaggtgatccgcccgcctcagcctcccaaaatgctaggattacagctgtgaaccacagtgcccggccatctcctgcattattcttaataacgcattgtggtttttttgtaaataaaaatagttttattattttgttggatcataaattaacatatctacaggcttaccatggagatggtgcgggtttagttccaggcaacctagttaaagtgaatgtcgcaataaagggaatcatgtaaattctttagtttcccactgcacatacaagttttctttatactctactgtagtttaatgtgcaatagcattatgtctttaaaaagcaacataggccaggcacggtggctcgtgcctgtaatcccagcactttgggaggccgagacaggagaattgctcgagtttgagaccagcctgggcaacacaggaagacctcatctctactaaaaatgtaaaaattagccaggcatagtggtgcatgcctctggtcccagctacttgggaagctgaggcaggaggatggcttgagcccaggaggttgaggctccaatgagctgtgattgcgccactgccctccatcttgggtgacagagcaaggccctgtctcaaaaaaaagaaaaaagctgaagaaaaaacacttttacaaaaatatgattgttctacatatacaactttgtaagcacctttatttcatttaatgtatcatggatgtcttttcaactcactagaaatttagcgtgtcaaatgtgaaatcatggaggaggtgagaaagtcacttaaccacagtctgcccctcctgatactgcatttgagtgggatttttagtgactttacattcaacattcatagaacaaataattcacgacatctacaatatgccaggtactgggccagttctggatacagtggggagaaaggaaggcatggtcccttccacgacttccactttttgtttctttagtcaccctcgattaagggtgacctgtgttggtaactgaatttcatctagaactgtggactgttctggctacaggttcaagtgctggggccggcagtggagagttccacgtgtacagacatctgcgccggagagaatatcagcgacaggactacatggatgccatggctgagaaggtcagtgagccagaaggctggctgagcccccatgtttgggcagtgtgcgtgtactttctttagaaaaaagcatttgaagaggctgggcgtggtggctcaggcctgtaatcccagcactttggaaggccgaggcaggggatcacctgaggtcgggagtttgagaccagcctgaccaacatggagaaactctgtctctactaaaaatacaaaattagccaggtgcatgcttgtaatcccagctactcaggaggctgaggcaggagaatctcttgaacccaagagatggaggttgcagtgagccaagatcgtgccattgcactccagcctgggcaacaagagcgaaactccatctcaaaaaaaaaaaaaaagagagaaaagaaaagaaaaaagcgtttgaggaagaatagatactgctagttgtggctggtgtgaggtctgccttctacggacagcacgaaatgcagagtctctactaaaaatacaaaaccccgtctctactaaaaatacaaaaattagctgggtgtggtggtgggcaactgtagtcccagctacttaggaggctgaggcaggagaattgctggaacgtgggaggtggaggttgcagtgagcctagattgcaccattgcatgccagcctgggcgacagagtgaaactccatctcaaaaaaaggaaaaaaaaaataacaccaagaaataatcataaaatattgtaatatttagccataaaaaggaacaaactactgatctgtacagcaactgggatgaatctttaaacatggtgagtaaaagaagccttgcacgaaagagaccatattgtgtaatttcatttatatgacgttttagagcaggtacaattagtttgtgtgagaaaaaaaaactggttatctggttggggtcacggttgactgggaaaagacgtatgaggggactttctggggtgatcaaactgtacactcgagatctgggcatttggttctgtgtagatactaactttatttattattttgagatggagttttgctcttgttgcccaggctgagagcagtggggtgatcttggctcactgcaacctccacctcccagtttcaagtggttctcctgcctcagcttcctgagtagctgggactataggcacaacccccatgcctggctaattttttgtatttttagtagagatggggtttcagtatgttggccaggctggtcttgaactcctgacctcaagtgatccacctgcctcggcctcccaaagtgctgggattacaggcgtgagccaccatgcctggccagctattactttaaaaggaagaagaaaagcatacacaaatatgaaaccctatttaataacgtgcatgcttgaatgttcaagaatggaacttcccgatgtctgcagcttactttgaaatgcaccaaaacaaacaaacaaaaaaatgatgaattagtggaggaatagatgtatgagtagagctctggaagggaggaatcataattttccccattttatagatgaggaaaatgaggcttggaaacaggactgctgggaagacataatacagtgcataccaatagaggtatggatagatcgataggtgtgtgataaagaaaatccagcacaacaggaattgttgagtcaaagagcagtggatatatctgctgtataattcttttaacttttctgtttgaaattttcaaaataaaacattagggaaaatttaaaccaaagagacagccaggatacagaagaaaatatgtaagaatttattggaatggccaaaattgagttagaaaaaattctgctttggggggccagccgtggtggctcatgcctgtaatcccagcactttaggaggccaaggtgggtggatcacttgaggtcaggatttcaagaccagcctggccaacatggtgagaccccatctctactaaaaatacaaaattagccgggcgtggtggcacatgcctataatcccagctactcgggaggctgaggcaggagaatcgcttgaacccaggagttggaggttgcggtgagctgagattgcgccattacactccagcctgggcaacaagagtgaaactctgtctcaaaaaaaacaaaaacaaaaattaaccaggcgcagtggtgcacacctgtaatcccagctacttgggaggctgaggcaggagaatcacttgaacctgggagatggaagttgcagtgagctgagattgtgccactgcactccagcctgggcgacagagtgagactccttctgaaaaaagaagaagaaaaaatgtcctgctctggaaacagaatggggtcattgttgtgctggctgtcaactgatacttgcttgtcctgtagtttttcctggcccctgggtgttggtggttcttcttgtttctgccatcttttgttggtaacagtctcaatcctagtgagaagtattagacagtttttgtcacaaaattctaccaggtcactgcagtgggtttgcctgtcaaaaataatgctctgtgtatagaaaccatcaagctgggtgcggcagctcacatcagtaatcccagcactttggaaggccaaggtgggaagatcacttgagcccaggagtttgaacccaggcaacgtggcaagaccccatctctacaaagaatacaaagactagccagatgtggtggtagccacctgtagtcccagctgcttgggaggctgaggcaggaggatcgcttgagcctggacggtcaaggctgcagtgagctgtgatcacaccctgtactctagcctgagttagtgagccagacgctgtctcaaaaagaaagaaagggggtggggggtggagtgagggagggagagaaaggaaaagaaactactatcagaagaaacacttttataaactattttagaggggaggacatagagtaggttgctgtctcaaacactataaattcgtctgaagtttttatgtattgattcaagattcagagaaaatacagaaaaatgtttcacaaaccttggcctctatgcaaatgcaaagattcttattttggatggcaaaagacagtctctgagatttaaaaaaaaggcaagcacgtcctcattttttagtgacagatcacctccatcagagcccagtcccactcacccctgcttgagacattgcctctgccaggtgcggcagccagcgggggctctgtttagttcacttgctggtaaatttggcttcttcagcagcacagagtaagacattcacggctcagctttttttttttctctgagatagagtctcactctgtcacccaggctggagtgtaatcttggcttgctgcagcctctgcctcctgggttcaagcaattctagtgtctcagcctcccgagtacctgggattacaggtgcctgccacctggcctggctaatttttgtgtttttagtagagacagggtttcaccatgttgcccacactggtctcgaactctggacctcaggtgatctgcccacctcagcttcccagtgtgctgggattacaggagtgagccaccgcacccggacttcacagctcagcttctaagcaaatcagatcttttagatttaagtcatttgctttttggttgtccagaaagttgattaattaaagttgatttccttcctgaaggaatattttctgccctcagagagagggcttgtttggtttggtttctgtgccactgtaagcagatgcgtacagccctggcggtgcagaccagcagaggtgttgaaggcacctcttcctcctttgccggctccttattttttgctccattgacctttatggctgtgactggaagaaacaagagatgacactttgaatcagtagatgtctttgtagtttacaggtggttttctattttttttgagacagtctccctctgccgcctagactggtgtgcagtggcgcaatttccggtctctgcaacctctgcctcttgggttcaagtgattctcctgtctcagcctcctgagtatcagcctcccaaagtactgggattacaggcatgagccattgtgcccaaacccttatttcattattgttcctaacagctctgggagagaggaattacaattttccccattttatagatgagtagactgaggcttggagacagaactgctgagaagaagtaatgcagtacttacaaatatctgtgtgggtgtgggtgtgtgcttagcagcaggtcatggcagcagatggcgtgtgttacgctgctttagaatcagtcatttggtggctgggcacagtggcctgtaatctcagcactttgggaggctgaggtgggaggatcctttcaggccaggaatttaaaaccagcctggacaacatagccagacctgtctctacaaaataaacataaaaattagccagatgtaatggcatgcacccatagtcccaagtactcaggagactgagacaggacgatctatcaagcccaggagttcaaggttgtagtgagctattgtgccactgcactccagcctaggcgacagagtaagaccttgtctcaaaacaaaaacaaaaaaactcagccatttggtaactatggttgggcttagggcttgaaaattccatggttctgaccctccagccattcattctgatgagctctgggcagtatccaaggccccggctgagcagatggtgagcgctgccctcagagtgtcctctgcactccctcctgtattgtctcctatattgtgctatgcatgagtggtgcctcagtcaactaaaagagttacttcgccatcggagacctatgtattgattacctgccctgcctctgggacagccttttaaagttaaaatggccctggggacccgggtagtgcctccgtcacccccagtggtgtgacttctagaactctcctactttgcctgagcaaaacctcccacagtctgcccagaccagagcgtgtctaaatgatgtgggttttgttgcagcaaaaattggatgcagagtttcagaaaagactggaaaagaataaaattgctgcagaggagcagaccgcaaagcgccggaagaagcggtaagcggcatggcctaactgtgatgacacttaagggccaggggtggtggctgggtgagctgtccttgcagtcagtagtagttcctctgcatgacctgtaggggtcatgaatgtagagcaatgacttctactacctgagcagagagcaagttccttatgaccctccaactggttacagattgtccagagcttgcaagtcaggacttcagtgatcacattgatttctgtgtctccttcaggtctgtatttttttttttttttgagacaaagtctcactgtgtcccccaggctgcagtgcagtggcacaatctcggctcactgcaacctccgcctcctgggttcaagcaattctcctgcctcagcctcctgagtagctgggattacaggtgcctgccaccatacccagctaatttttatatttttagtagagacgaggtttcaccatgttggtcaggctagtcttgaactcctcacctcaggtgatccgcctgcttcggcctcccaaagtgctgggattacaggcatgagccaccacacacggccgcatctgtattttaacaaggtgctgcaaccaaacttcccatttagcatgtttcttaaattacggtttatgactccctcaagtgactacatggtatataggctgtatgtttatatgtgtatctgtgtgtttacataagtggtctctcaacttttacaatgagagctgaggaggattctaacaacagcccctaaatatcttgaaatgaaaaagcatctttagggaccaggcatggtggctcacagttgtaatctcagcactttgggaagccaaggcaggaggatcgcttgagcccagggggctgaggctgcagtgagttatgatcgcaccactacactccagcctgggtgacaaagtgcaaccctgtctctacaataataataaaaaaaattttttttaaaaaagcacccctgttatttctgaggttgctttgcctcagggctccctgggatttgctcttgaatcctaatgaaagcagctgataaggacggactggcagagtcatgcaaaagttttggttggtgcaaaagtaactgcagttttggaccgtgaattttagatcattgtaactaggctcaaaccatgtttattgatcagaataggaaccattacaatcaacacattttcaccaatgagaaataagtttatttctataacgtaaaaatccatgctccgggatttgaagaactcttggaaagcattttctgcatcccgctggttgtggaagtgctttccctgcaaaaagttgtcaaagtgcttgaagaagtggtagtcggttggcaagaagtcaggtgaatatggtggatgaggcaacacatcgcagcccaatttgttcaacctttgaagcattggttgtgtgactcgtggtcgggcattgtcctggggaagaattgggccccttctgttgatcagtgctggctgcaggcattggagttttcagtgcatctcatcgatttgctgcacatacttctccagtgtgctggtttcaccgggattcagaaagctgtagtggatcagtccagcagctgaccagcaaacagtgaccatgaccttttttggtgcgagtttggctttgggaagtgctttggagcggcttcttggtctaaccactgagctggttgtcgcaggtgtcatgtaaaatccacttttcatcacatgtcacaatctgatcgagaaatggttcattgttgttgcgtagagtaagagaagacggcacttcaaaataatgatttttttgattttcgctcagctcatgaggcacccacttaccgagctttctcacctttccagtttgcttcaaatgctgaatgactgtagaatggtcgattctgagttctttggccccttctcatgtagttgtaagaggatcagcttccatgattgctctcaatttgtcattgtccaatgactgatggctggccacgatgctcatcttcaaggctcttgtctcctttgcaaaacttcttgccccaccactgcactgtacattcattggcagttcctgggccaaatgcgttgttgatgttgtgagttgtctccactgctttacgacccattttgaatttgaataagaaaatcacttgaattggctttttgtctagcatcgttttcatagtctaaacataaacaagtaataagtcattagcaaaaaaaaaaaaaagccgattaaaatgatgtataacataatcacatctatttaagaatatataggccgggcgtggtggctcacacccgtaatcccagcactttgggaggccaaggcaggtggatcacgaggtaggagatcgagaccatcctggctaacacagagaaaccccatgtctattgaaaatacaaaaaattagctgggcgtggtggcgggtgcctgtagtcccaggctactcaggaggccgaggcaggagaatggtgtgaacccaggaggcagagcttgcagtgagctgagattgcgccactgcactccagcctgggtgacagagtgagagaatccgtctcaaaaaaaaaaaaaagaagatattccagtatcaaacagcaaattccagcaatgcaaaaacggcaattacttttgcactcacctaatatttttcttattttgttattgtaatgtttgtgttattccgcaggttttagagataccataaggaggtgtttattttctaaaatataccataatgtagttaaggaatcaatgtatatggttttacatttttagccagaagttaaaagagaagaaattactggcaaagaagatgaaacttgaacagaagaaacaagaaggtgagtggtgcccacttttcttggctgtagcttctttcttcttgttggtcacagtggctgaactgtcaggaaacacagggacggagagtttgggctggttggctggccactgaagaaataacagcttattcatattagctaggacccattgaattgcaagtatcagaaaaccaaactggcttaagcaaaaagatactggttcaagttaggttgaggacagacctcccttctggcatggctggtcagggagatcagtgacattattggttattgacatctccccctctgtcctgatgtcctgtcctcaggctcacactcatggttttgaggtgcctgcagcagctctcggggctacatccctcctcgatcttgtccaggagggaaaattgagaggatgtctcagctttcctagcaaaagtctttttgtgtctctctggctctgattgagtcacttgccaggtcaggtaagaatgcttttggctacaagcaacaaaatgcagcaacaaagtgcctaaaccacgaggagttggttgtttttacaggatgagaaatctggtagtaggtggcagcgtgatgtggctcagcagtgtaggctggctcccccgcacgttccctggcctttaccctgagagtatgaggtggctcccatggcttctggcaccgtacctgtgttcaaagcaagaagaaggggagtgaggtggtacttatgtggtctgccttttttaaattggagagcaaaagtttctccagaagtgcccagaagacatcaccttagatactaggtctctttgccatcactagctgccgtcaggctagaggaatagaaaacagaactgttgtaaccaactcaaacctatcgtgatccagcactgcgagctgagtacattgccaccctagccagatccaggtcccattaataaggaagagtaggaggcagggttggctgttaggtcagcatcccaccgtgctgccaatcctgccgcctctgaactcatcacaatgctagtggtgctatcccccatccctgggaactcatgggctgtgaataagggtggggggccccagctggaaaggaccaaggatgctaagagaccaaaaaatgacactgtcccccacatgactgcatctatggctattccatgcttgactggatctgcttcctgagtgcatgattgtggtttttggttttagggtgaagtcagactttcattgacgtattaaaatagaattgggctgggcatggtggcccgtgcctataatcgcagctacttgagaggctgaggcaggagaatcacttgagcccaggaggctgaggttgcagtgagccgagatcacgccattgcactccagcctgggcaacaaaagcaaaactccatctcaaaaaaataaaacaggccaggcgtggtggctcatgcctgtaatcccagcactttgggaagccaaggcgagtggatcacctgaggtcaagagttcgagaccagcctggccaacgtggtgaaaccccatctctactaaaaatacaaaaattagctaggcgtgatggcaggcacctgtaatcccagctattcgggaggctgaggcaggagaattgcttgaacctgggaggcagaggttgcagtgagctgagattgtgccattgcacttcagcctgggtgacaggagcgaaactccgtctcaaaaataaataaaataaaatatgattggccacttctaggaaccacttccttatgagttgtaaatgtactgtgtgacacatcggatatggttttaggttgtttctcaccctttcctagaagaaattattttaaattgctaaaatgtgactgataggacctcatctctcaaataaagtacctcaacactttcccctccaccgcaacagtagatcatggaagtacttggcccaagtaggaggattgggcataaaagctattctcacaatctgttaaggggttattgtagcttggacctattatatttggaaatttgagaccagcctgggcagcatagtaagaccccatctctacaaacagtaaaaaatcagccaggcatggtggtgcacacctgtagtcccagctttttgggaggctggggcaggaggattgcttgaacccaggagttcaagactagtctgggcaacatagtgagaccccatctctacaaaaagttttaaaaattggtcaggtgtggtggtgcacgcctgtcgtcctatctagtctggaggctgaggcaggagagtcgcctgagcccaggaggtcaaggctgcagtgagccatgattgtgccactgcactgcagcctgggtgacagagcaagattctgtctcaaaaaaataataataataataatagatctcctttgctgagtaatttgaccctccctcctcagggtttgttggttttgctgcttatcattgtcattgttgctatttgtgtgtttagtgactttcctaacaaattctgtaaaacctgtattctttgttgtgtttggactctgaagtctctgctcggtcagcttagttggtcagtggaagatgagagatttccttgaatgtcttgaaccaccgcatctcccagtctttgcctaggagctctgtgtgtgtgttggaatgtgcctccaaccccctggcaggcagtctgcaatttgctgtagcctttacttcctgcttgcacagagcctccagggcagcagaggtgagcggtcagggccttggctgtctttcttgggcatgtgcactgctctggtggccctctagagtcccagcttttccttttaagctttttggtcagtttcttgtttgtgtcaatcgttactgctgtcttggttggtgggatgttaaacagttgtcactgatggtttttgacaaacgcccaggggaaaatgctgttcacgttgagtgagctcaactcaatactgagtcagagcaactaaagacaagccttgcaggtagacgtttccagggaactgctagacaggtcaactagggccagtaccctgggagtggaacttccaacagctcccaacccagtcagcctcctcccatttttacagctactgtggcaggggggctcttggttttcaagactccctcagatctggggagagggagacgggaaattaaaactcacagaactcacactcttagtgaggttcaggcatttgaacagctcgaggagcatttccagagttctgaaaaagttgatttttaggatttttgccagtgttctgttacctttatggaggagcagatttttggaggcccttactcttccattcatccctttagattttaactttcaaacagcactgcatttgaagtatgtttcctgtacgtcaaatgtttgggttatgttttttaattcattctgacagtctgtctctttcttgatatgtttggattcaaggctaccatttaatttgttttttgttttcatttttgtgtttttgaagcaagatctcactttgccacccaggctggagtgcagcagtgcaatcacggctcgcggcggccttgaactcctggtgggctcaagcaatcctcttacctcagcctcttgagtagctgggcctacaggtgtgtaccaccatgcctggctaatgtgttatttttttgtagagatggggtctcactatgttgtccaggcttgtcttgaactcctgggctcaagtgatcctcccacttcagcctcccaggtagctgagacctcaggcctgtgccaccaccctcaggtaatttttgtattttttatagaaactaggtttcactatgttttgaactcttaagctcaagtgaccctcccgccttggcctctcaaagtgctgggatttcaggcgtgagccaccatgtgaagctgccgtggtttttctctggctgcttgttttttttttgtttgtttgtttgtttttaagttggagtcttgctctatcacctaggccggagtacagtgtgcaatcttggctcactgcaacctccacctcctgggttcaagcaattctcctgcctcagcctccctaataactgagattacaggtatgcaccaccatgcccagctaatttttatatttttagtagggatggggtttcactatattggccaggttgatcttgaactcctcacctaaggtgatccgcccacctcagcctcccaaagtgctgggattacaggtgtgaaccaccacacctgaccttagttctatttttaatttttgtgtaatcaccatacttttccatagtaactgaaccattttaacgcccaccagtgcaaaaaggctataatttctccacatcctcaccaacacttattttctgttttttttttgtttgtttgttttgtttttaggtaactatcctaatgggtgtgaagtggtatctcactatagtattgatttgcatttccctaatgatttgtgatgttgggcatctttgttgttgttgttgttttgtttgtttgtttgtttttgagacggtctcgctctgtcgcccaggctggagtgcagtggcgtgatctcagctcgctgtaacccctgcctccaccatgcccggctgatttttgtgtttttagtagagatggtgtttcaccatgttggccagactagtctcgaactccacccacctcggcctcccaaagtgctgggattacagacatgagccaccacgcccagccagcacctgaacatattaaaaaatggttaataccccatgattgtacatgctttgtaccaaatgggaagaattgagtgttctaaggataaccatcataaaagtggtttgggcttggactctggctcacatctgtaatcctaacattttggtaggtcgaggtgggaggatctcttgagcccagaagtttgagaccagcctggtcaacaaaatgagaccccatccctacaaaatatttaaaaataagcaaggtgtggtggtgcacacctgtagtcctgccttcttggaaagctgaggtgggaggatggcttgagcccaggtagccgaggcggcagtgagctgtgattgcaccactgcactccagcctgggtgacagagcaagagcctgtcccaaaaaagaagtggtttgtatgccacttatcttgccttctcagtttccttatttttcattttgtgagagtaagcaagcttttccagttatctgctggaaagaaatgggagtaatgtggtaataccgagttgcgccccaaggtggctttggtgcgccgtgggtcctggatggactcagaggcacagatcactcaagctattttggctcttctcctaaaaagcaggaggggcagctggctgggtgttctgttgttggagaggacatctcaccgcttgttttctgtgctgatccagtagctcagggaagactcccggcagtgtgggacttgtgtctgaaatgacagcataggatgacattaagccaatgtggattattctgcagccttgaactccccagatgatgtattcccacacaactcttacttatcctaacataggcctgcccatcaaagaaatccagggcgcccttaggggatttgttactaggtacatctagagcagagcttctccacagttgcactactgatgcctcaggctggaaaatgctgtgtcctgaggggctgtgtcttggtcactgcagggtgtctcgtggcatcctagtgtctaccctcccgaggccaggagcacccaccttcccccagtcatcagcaattggatgtctccagacacgaccagatgcaccccagtgggggaggaggacggaattgttcctgtctgagagctcctgatctaggggcaggtatccagtgtccagaaggcactcagcatgtgtttggatcaaactgtttctttcagagccaaaatccttcaacataatatgttggaaaactacccacgtcctttgtgtctttggaaaaagagatactctatgatcattttagaaatttttaaaatatgcagaaaagaacaacatcaaaaataaaagttggctgggcacagtggctcatgcctgtactcccaacactttgggaagctgaggctggaggatcatttgaggccaggaatttgagaccagtgtgggcaacatagcaagaccctgtctgtattttgtaaataaatataagttatctgtaacctgtactaaaaatgactttaacactttaatataatttctttgatttcagttttttaatatataagccttatttctataaatgccatatttatagatgtcctgattttatcatgtaacattgtatcacaagtgttttcccaagtctgtacttacaaggatttttttctaatctattcattcatctgttaaaaacaaagtgtgtgcttcagttgcagtcagtggcattttacccagtatgcctgtagcctgtgaataaaatctcagattcctggatcttaaaataatatataaacagtagtagaagagtactggaaggagggccaggtgcggcggctcacacctgtaatcatagcactttgggagggcgaggcggacagatcacatgaggtcaggagttcaagaccagcccagccaacatggtgaaaccctgtctctactaaaatacaaaaataagccgggcataatagcgtgtacctgtaatcccagctactcgggaggctgagacaggagaatcacttgaacccaggagacggtggttgcagtgagcgaagatgcgccactgcactccagcctgggtggctgagtgagattctgtctcaaaaaaagaaagaaaaaaaaagagtgggggaaggaaattatggagaaagctcaaatatcatttcctgaattgatcacctttttctctattcattttctcttagtctccatgtgcacatcatttgtgtgtagctacaattataggaagttttccattttgcttattttatttaacattatacacgtactgcttaatgaagcaattccttcataatttttttagtgactggtaatatccagcagttgacatgccataatacacctaatctttctccttttatgaaacagtagattgattccagtacttgtcttctgtgaatatcctgtgtctttctcccttccccctttctggggtgatagattaagataaatttctaaaccaggcatggtggcttacacctgtaatctcagcactttgggaggccaaggcaggcgaattccttgagcccaggagttgggaaaccagcctgaccaacatggtaaaaccctatctctacacaaagtaaaaaaattagccatgtgtggtggcacatgcctgtagtcccagctacaagggaggctgaggcaggaggatcacctgaccttggggaagtggaggctgcagtgagctgtgattatgccactgcactctagcctgggtgacagagcgagaccctgtctcaaaaaggaaaaaaaaaataataataaagataaatttctaaccatgggaattactatatcacagagtataaaaagaactcctggctctggaaatatattgcaggttactttccgaagagatagccccagtttttaccattgacagtgtatgtaacagggtacactctcaccatatcctcaacattttactcttcctccacatgggtaagaatggggcacatgagagccactcaaggtcttactggggattgagtaaaaagccttacagaaatacagtgcagacctgcaagactgtggaggcagtcccactctcttgccattccaccccccacgcacccacctgtgtacagcctccaaagctctgttttttgaaatggagtcttgctccatcactcatgttggagtgcagtggcgccagctcagctcactgcaacctccgcctcccaggttcaagagattctcccacttcagcctcccaagtagctgggattacaggcgactgccaccacaccagctaatttttgtatttttagtagagatggggtttcgccatgttggccaggctggtcttgaactcctgatttcaggtgattcacccgcgttggcctcccaaagcgctgggattacaggcgtgagccaccgcacccagccccaaagctattttataaaatgtacattggattgtcagtcattcttctgcctttacaacaatacccaagatcacggaatgcttcttacgtacccctagttctaaatgctttgcttgtattaactaacaatccttacagcagccctgtgaggttagtcagtggtgctgttatccccattttactaatgacagaccttaggcaccatgcggtgatggcacccacaaagctgcagaggatgtgggcagcaggccagggtgtgatcccaggcacccacacccgcccatgaggcgatgctgcgtgaaaccctgtcagcagccccagtgttcctggccctcacggtctggccccttccggtctccaccatgctggtctgttcactcccttccacatgcccccagctctctgtccctcagcctcgctgcatgtgcttaggctgcctgtactctgttcacgccgcctgacttctcatctgactggagaagctctcttcaccttcagcttcctcttacaatgctttctgtttgtgtaaagcctctcctcaccttcctccggcccccggccctagaagtcgcctttcctgccagcctgccccatggggttgtgtgtgcccttggctgcaggccctgccagatcagataaggtgcttgtccattcagctatgtcagttccatctttttcaaaataagcctcattttagaatgactttagattcacagaaagattgcaaagatagtacagagcgttctcatatatccagtctccccattgtttaacttcctaaattaacctggtacattggtcacagtgtgtgaacccacatcgatacacttgttagctgaagtccatacattattccagctgccttagtttttacctgctgcccttttcttgctccagaatccaatccagggcaccgcgtcacattgtgttattacgcattcttcggctcctgttggctgtgacaagtttctcagactttctgtgggtccagtactctataaaatggccctcagttgggattggtctgattttctcatgatttgactggggtagtttgttttggggatgaggaccacagagggaaagcacccttctcaccacacatcagggcattgtactgccaacgtggccatcaggttttgtggggtgttttttttttttttggagacagggtctctctctgttgcccaggctggagtacagtggcaccatctcacctcactgcagcctcgaacttctgggctcaggtgatcctccttcctcagcctcctgagtagctgcaactacagatgcgcacctccacaccctgctaattttggtgttttgtttgtttgtttgttgagatggagtctcgctttgtcgcccaggctggagtgtggtggcgcgatctcggctcactgcaacctccgcctcttgggttcatgccattctcctgcctcagcctcctgagtagctgggactacaggcacccaccaccactcccggctaattttttgtatttttagtagagacggggtttcactgtgttagccagggtggtctcgatctcctgacctcgtgatccacccgcctcagcctcccaaagtcctgggattacatgtgtgagccaccacacctggctaattttggtattttttctggagatggggtctcattatgttgcccaggctggtgccatcactgttgatgtttaccttgatcacatggctgaggtagtgtggtcaggtttctcccccatatgtttactctcttttccccttcctgtacgttactctgtagaagaaagtcgttgtgtgcagcccacacatagggagtgtggggctgtgttcctcctccctgacagtggagaatctacatgcgtcattgaagtcattctgcatgctagggttatttcttctttccatgtatttatcattatttaatcatttccatctatcagtatgagcttgtgggtattcattttgtacttgatagtccattattactgtatttgttttactactcatagtattcccagctttggccattgggagctctttcagttggctcctgtgttcccttgacaaagtcccatcattgtgggtaccttttttttttttttttttttttgagacagggtctcttacctaggctggagtgcagtggcaccatcatagctcactgcatcctcaaactccgggctcaaacaatcctctcgcctcagcttcctgagtagctgggcccacaggcatgcaccaccatgcccggctcagttttaaaatttttttgtagagacaagggtctcgctatatggcccaggctggtctcaaactcctgggctcaagcagtccccctgcctcagcctcccaaaagtgctggaattacaggcatgaaccaccacacttggcttccttacttcctggtactataggatattccagactcgtgtcttgtgtttcctgccctggacctgggatcagccatttgtccaagaagtcctggctgctgctttcttcttcttcttcttcttctttttttttttttttaagatagagtttcactctttgtttgcccaggctggagtgcaatggtgcgatctcggctcactgcaacctccgcctcccgggttcaagcaattctcctgcctcagcctcctgagtagctgggattataggcacgtgccaccacactcagctaatttttgtatttttagtagagacagggtttcaccatgttggccaggctggtctcgaactcctagcctcaaacagtccacctgcctcggcctcccaaagtgctgggattataggcgtgagccaccatgcctggtccctggctgcttttagagaaatggtattaaaatggtattaaaacccaaggtctggggactaggcatgttctgtgctactggatggttgcttttaggctctctcagctgacagagccaggaaatttacctgtgtactccaccagtatatatgtacatatctgtcaatactaatacccataaccatccccatccatattacactaacatgagttcatactgatgtctccaagtctagcccagtatgacatagctcattctagccttctctccttgtttctctgtcacctctcactccaatagtgagtatctttgctaccaccatccactagccatttgcttaattgctcaatgccagcatacatggataatggtttcagaattgtttaccgttaccctgggggaagcaccattatcaactagaggacattgctatgtgcagtcccttcagccttacagcttacagaggccactcatttcaagaattacttagatcagcactttctttgtttttaatgtttaaaaaaaaaatttgagacgatgttacattttatcgcccaagctggtcttgaactcctgggctcaagcgatcctccggcctcaacctcccaaagtgctgggatcacaggcatgagccaccacacctggctgatcagcacttttccccacactcccttcacagaggtcatttcgtacatttatgatacgtttggattcatgtgtcaccttctgcgttccatcctgggaccctgacttcctaaatgacttttaaaattagcataattcagccaggcacagtggctcacgcctgtaatcccagcactttgggaggctgaggtgggcagatcacttgcggtcaggcgttcaagaccagcctggccaacatggtgaaaccccatctctactaaaaacacagaaattagccaggcactgtggcgggcacctgttatcccagctactcaggaggctgaggcaggaaaatcacttgaaccctggaggtggaggttgctgtgagccaagatcacaccactgcagtccagcctgggtgacagaatgagactccgtctaaaaaaaaaatagcataattaagttttaattatttgtgctgtaaggttctgtggattttgtcaaacgcatagtaccatgtatccaccactgccgtatcatacagaataattccactgccctaaaacaattccgtgtttcccctgttcagcctcctcccgacccccagcccctggcagctgtttactgcctctgtggttctgccttctccacactgtcatagagtcggaattaaatcgtatacagcctttccagattggcttcttttgcttaccagaacgtggcttaatgccccattccttttgccaagtagttttccaccgtcaagatagaccaccgtttacccactgaaggacagcctggttgtatccaagttttggtgattatggataaagcttcaacagacatttgtgtgctactgtttttttgtgtttttgtgtgtgtgtgtgtgtgtgtgtgtgtgtgtgtgtttttgagatggagtctctctgtcgcccaggctggagtgcagtggcgcaatctcaggtcactgcaacctccgccccctgggttcacaggtttaagcaattctcttgtctcagccttcagagtagctaagccaggcatctgccaccacgcctggctaatttttgtatttttagtggagatgggttttcgccgtgttggccaggctggtctcgaactcgtgacctcaagtgatctgcccgccttggcctcccaaagtgctgggattacaggcatgagccaccgtgcctggccttgtgtgctagtttttgtgtgcacataagtttcacatcaactgagtacatctgcaggaacatgattgctgggttgtatgataggattaatcttgttaactttgtaagaaactgccaaactgtcttgcaaagtggctattccatgctgtactcccaccagcaacgatagtttctcttacctcacatccttctcagcacttggtattgtccgttttttgaatttgagccatcctaatatatgtgttgtgctttttgttttgatttgtgacagtatctttttaattcttgtatcaccaacatgaagcatagtaactaacaggaaatagccacttgatgatttcttactgttatgtatttgttatgttgaaggaatgaactggggtaattttgtcaaattgccaaatgacttgtctgtgcccccggtttctgggtttctcctccctgagaatgatactcttggaccctgacagtgggtcttccacacacataaaatcccttgtgttgactattagtgagatacaggttgagcatcccaaacccaaaaatccaaactcggaaatgctgcaagattcagagcttttgaacactgacatgacgctccaagtaggaattccacccctaacctcatgcaagagttcacagtcgaaacgcagatacacaacacggattattcagtgtctcccagggacagaagaccctcccagcctccttcagctgcaatacaacctttccacatacacccagatttttcccctacacaggcacacgcctctccagaccacacacacaccagcagcaggttccccacgatgccccacacggtgcccagacctccatgcttactcacagtttctttgcttgttctctgctttgttgtgtaaagataatgttgaaaacatcaaaaaggcctgcagatcccctgtgggtaacagtgataagaaaaagaggaagcatttgtgtttttctgtagcccagagagccaagaatgactgccacgcgtgacctgaagaagcagaaggataaaaggttgaaacaccaaaagccatgaacagaagttggtgaaaaattgaaaaatgaggctgggcacggtggctcatgcctgtaatcccagcactttgggaggccaatgagggaggatcacttgagcccaggagttcgagaccagcctgggcaacatggttgagacctcgtctctacaaaaaatacaaaaattagccaggtgtggtggcacacacccatagtctcagctactcaggaggctacggtgagccgtgatcacaccactgcactccagcccaggtgacagagcggaaaccctgtctcaaaaaaaaaggccgggtgtggtggctcatgcctgtaatcccagcactttgggaggccaaggtgggcagatcaccaggtcaggagatcaagaccatcctagctaacacggtgaaaccccgtctctactaaaatataaaaaattagccgggtgtagtgtcacacacctgtagtcccagctacttgggaggctgaggcaggagaattgcttgaacccaggaggcagaggtcgcagtgagccaagatcgcgccactgccctctagcctggtgacagtgtgagaccccgtctccaaaaaaaaaaaaaagtgtccagtaaccctttaatccaaacacagcatagtaggtggggattgaaagcctgttgttaccatttagcagccgatccaggtgttctcatgacacagctgtgctgcttaattactctgaacatgctattttccactgtatgaatggcccgtcatatttattaccgttaagcacttatgtgtgaataagtgtaggaaaaggattgcttatcagtagcaaattcagagtcagaaatgatggtgacgccaagccacagatcagccacatgggtgagagatagacgcctttgctttctgatggttcattgtacacaactgtgtttcatacacaaaattattattattattattattattattattattattattattattatcagagacggattctagctctgttgcccaggctggagtacagtgctgtgatcttggctcattgcaacccctccctcccgggttcaagcgattctcctgcttcagcctcccaattagctggatgacaggcgtgagccaccatgcctggctaattttttttttttctgagacagagtttcactcttgcccaggctagagtgaagtggcatgatctccgcttgctgcaacctccatccacctcccacccccggttcaagcaattcttctgcctcagcctcccaagtagctgggattacaggtgcaccaccacgcccagctaatttttgtatttttagtagagacggggtttcgccatgttggccaggctggttttgaactcctgacctcaggtgattcaccggcctcggctgttgaaagtgctacgattacaggcgtgagccaccacacccagcctaatttttgtatttttatagagatgaggtttcaccatgttggccaggctggtctcacactcctgacctcgagtgatccacctgcctcggtctcccaaagtgctgggattacaggtgtgagccactgtactcagccacaaaattatttttaaatgttatatttaccttcaggctatgtgtgtggggtatatatgaaacataagtgaatttcatgtttagacttgggtcacatccccaagatatctcattgtgtagatgcagatattccaaagtctggaaacatccgaaacatccgaaatctgaaacacatttggtcccgagcattttggataagggatctgcagcccatactgcattttcaaaggcttttcagccacggggaatgcttccagtcctcctctgttgctcccttccacaaacatccagctcaacgagtattctattcatcagaagcagaattaaagatcagaccctatgctcttttttttttttgagacagagtctgcctctgtcacccaggctggagtgcagtggcgctatctcggctcactgcaacctttgcctcctgggttcaagtgattctcctgcctcagcctcccaagtggctgggattacaggcgcccgccaccacgcctggctaatttttgtatttctagtagagatgaggtttcccccatgttggtcaggctggtctcaaactcctgacctcgtgatccatccacctcggcctcccagggtgttgggattacagacatgagccaccgtgcccggcgccttatacgatttctgcagacaacataggcagaggctgagagagtcagagaacacgtttgagcctgggtccctgtcttagtgaataggagatctcgagcagcaagttcctccacctctctgggtcttttatcttcttcatctgtaaaatggatatataagagtggtacttacctcatagactattgtaagaattaaacagggtactctatgtacagacttagcacagtgcttccatgtaatagtgttggacaaatattagctattaaaatatcctcaccatttaaactttaaaaaaaaaaaaatctgtgcccaggctgccgtgcagtagcatggctcactgcagccttgaactcctgggcccagaaggtcctcctgcctcagcctcatgagtagcgaggactataggcatgtgtcaccaggccattttttatagaaatggaactcgctgtgttgcccaggcttgtcttgaactcctgggctcaagtgatccatcctcctcagcctcccaaagtgctgggattacaggtgtgtgccattgcacccggcttccccgtttgaactttcaaagctaatcatgctgtgtggtatgaggttgaggggaaaaagggatgccccaaattaatgaaactaaatcttccagatgctttcgccagcgccgtgcgtgttctgtgttctttctgcggtcccatcctgggtatgacagtgaattttaggctgggctgtgccttcggctgtgcagggcctcctgcttagaggccctttgtctgacctttggtgacacagcagtagcagcgctcagggtctgtagtgggcgtgtgggtggccagggcaagccctgcacatgtgcctcaaggagcattggctggcccgggtgagcccacccatttgtgagttgctgaggccaccgtgcctgcggccggcgtcctggcatggctgagccgggccatctgctgccttgtggtctctgcctctgcctttccaactctcacttgtcctcctgctcccgcgtgaagagggggaggggaggagttgggaacacgtcctcatgctcggcttctggctggcagtcatgatgggggacagggaacctgtgctgctcacaggtgtcaggaggggcttcctgggccatgcttgggaggagctgggaagctggcgtatgtgtggggggcagagccctctgccacacaggtttcagaaatccttttgcagacggcagtgagaacttgagacttcagtgagagtgttgtcagcctggcgttagtgttgaagagctgggtcgggaagttgcccacccaagaggcaacttgagccatgtaaaagtagtgcgtggtttatggggtgtcgggtcttgcgtgtgcctctgggcctttgggtaaagatggggtgcacccgtgagagcagtggtagatcaggtctgtgagccacccttactcctggggaatggctcagaggactggtgggcgtgaggcatgaccctggtttcttgccatgcggtctaggaacagggacttttgacttcccatcagctctcctctttgaaagcacccttgaccctgaacgattttgcatgtctgtaatttgaatgtcgtgtggttacaggacccggtcagcccaaggagcaggggtccagcagctctgcggaggcatctggaacagaggaggaggaggaagtgcccagtttcaccatggggcgatgacaatgtttgccacagcctctgcctggaacctggctcgtgctgtgaccagaagggaaaggcggctgtttggctctttctcccccgcaaggacctgctgacccgctggatggagagcaaaggagacccctcccgagccgctcacagtcctgtatttggcaggtttgggagcctgaggggccatctccctgacactcagaggcactgccttgcagacaccatccgtgctcctggtaaagggggacagagagcctcaccttgccacatatttgaacagtgatgagtttggggctggtttctgggaagggaacgtttatttagtaaagagcagaacacccttgcgttttgttgggacatgtggaccgtgagtcgcaaacactctggagaaggctgagatgccaccattcccacggggactgaagacacattacgtggacctggtcccaggctcagtgaggagatggcctcagctgtggggctggtccatgttgcccactcactccagtgggaagtggggaccacgccatagagggtctgctcccactgcagctcccggtgctctcgtgttctgggaaggcctgggtgtgtgcacaaggaggcccgggccagggacttcaccaggggctgggtcacaagggcacagggtgtgtggaaagcgctgtgggggaagagccggtcaccggagagtgagcaggcggagactccaagctgggctgagccagagcagaaggcgagggattcccagccggacgggggttctctcaccaacagctgtgatttcatcccgaagtggaagggggtctaaacagaacaggctgagagaggcgggactgggtcaagtgggtggagctcctccttgcatgactgcaactgtcggggctttccgccggctcacagcagttggggccagcggggagaagagaggcggaactgctgtgtcctcatgtggcgcagcctcaaactggcatccaggcactgggcccgtgcagagaaggcacctgcagagagcagggcagcccggcgcaggggcatgcgcctagaatcccagctactcggaaggccaaggcaggaggaccgcttgagtccagggattcaaggccaacctgggcaatagagcgagaccctgtctcttaaaaaacgatgatgatgaacacagaggacggggcactgtgctgggagccagggggcctgggaggagccgagaccagccttttacctcggggttttgaggccaacagggacgacagagacagtttctagttagagccttggctccatttttggatgatttagccccgagttcctgagtctattttatgccccttacgtactttgatagaactaaggaaatagtggttttgagtgaagggaaaggaaacccagaaacattttacgttgcttttacttctgtagtgtagattgccccggcccctctctgagccctgtagcatctgtgatagcttctgtcccttcatcggttcatgtcacagggattttctttcccaggaagcggacacggagagtcagccctaataaatgagcacatgccctggctgtacattttgaaacctgtttttctctgtctgggactggctggtttgtgtttcggttttagttctcctatctttggactgttggtttccatccctctccccacccccacatgtgtcacagcccctgccctgagtctgcaacctggagcttgtgggccgcctcagtgctggggagggtgctggggcttggagcctgatgacctggctttgaatcctgcccctgcctctggtaagccaggggactgtcagcaagtcccttcctgcctctgccagctcactgggccaagagagacagtcgccacaggtgtgtgttgggtgggtgggcacatggcgacacagcaggatgccaggttgcggtgggcttcacccccacggggtgcaggagatgatatttaggcaggacatgtcctgtagccatttctggccattagtactaggtcatcaggaccttaagttgagagattctttcttcagggcatcacttatttaggaaaagaagaacaaacagatgtcatcattgagaaaggattgggtgatactgagagcccctgccctccccccgacaaaaaaaaccaccattaggggagaatcatgaagtaatgtccctcattgctcatgggtgggaaggagtctggaactgaacacagaggtgtaggtaacagaatcgtctcaaacaaactcacacacaagaattcttatggccaggcgtggtgagctgacgcctgtaatcccagcactttggaaggccgaggcaggaggatcgcttgagcccaggagtttgagaccagccttggcaacacagtgagaccccatctctacaaaaaattttaaaattatctgggcgtgatggtgcgcacctatagtcccagctacttgggaagctgaggtaggaggatcccttgagccgaggagttgaaggctgcagtgagccgtgatcactccactgcactccagcttgggtaacacagtgagaccctgtctcaaaaacaaatatatctaggttccctggtgatgcccctgtaattctgcatcatttacgattcatgcccaaatagacatttaaacaggtattttactgtttaaacaggagattctactacagaacccgcccctttaattagttaacttcgagacaagggcttgctgtgtcgccccggctgcagtgcagtggcgccatcattgcacactgcagcctccaactcctgggctcaagcattcctcccatctcagcctcccaagtagctaggactacaggcattcaccaccatgccagcctaatttttgtttgtttttgaaacaaggtctggcgcttttgcccaggctggggtgcagtggcgtgatctcggctcactgcaacctccacctctcgggctcaagccattcttacacctcatcctcccaagtagctgggactacaggcgcgcaccaccatgcctggctaatttttgtattttttgtggagacagggttttgccatcttgcactggtctccacctcctaagttcaaacacccctcccacctcagcctcccaaagtgctgggattataagtgtacaccaccgagccctgccctgttactattttaaatttatttcgctgtttccaacatttatattttggtaaaaaacaaattaaaattgagttagaggagtgttctactaactcttggaaatagaactcaggccaattctttttcattcatggtggagacacgtgttttctccttctccctcttggaagttaatttctgtttactatttggtgtacttgactaaagttagctacgattaccatatattaacatatatttcagtagagagaacactcttggaaattaacctggagcgagttccaggaggccgtttcttgttttcttactccacagaatgtcacaaatccactgggtgtggtggctcttgcctgtaaccccagcactttgggaggcctaggcaggaggatcacttaaggccaggagttcaagaccagcctgagcaacatagtgagccccacatctctaaaaaataaaaattgaaaagtgcacctggcctagtggcatagtcctagctacttccaaggctgaagtgggagaatcacttgagcctgggagattgaggctgcagtgagccatgattgtgctgccgcactccagcctgggtaacactaagaccttgtctcagaagtaaaaggctggatgcagtggctcacacctgtaatcccagcactttgagaggccaaggcaggtggatcacctgaggtcaggagttcgagaccagcctggccaacatggtgaaaccccatctctactaaaaatgcaaaaattagccgggcatggtggccagtgcctgtaatcccagctactggggaggctgaggcaggagagttgcttgaacctgggaggcagaggttgcagtgagccaaaatgatgccactgcactccagcctgggcaacaagagtgaaacttcgtctcaaaaaatgtaataataaatgaaaaaaaatagcaaatgtttattgagcaccaactaagtgcaaaatccaagggattccaaggcccattgctaggcactggggatggtggtggacaagacacagtccttgccttcagggggctccaggtctgagcaggaacaggattggggagagcagcacagcctgctgtgtgggcacctgacccaggcctctgcgaaggcgagcgctgagctgaagtcaggtggctcaggagaacaagagtgcccagaaagcgagctggggagggaggaggcgccctgccatggcctcagaccctgttaatcaggggactggagtctcaaaggccacagggtaggggctggaatggagagacatgggggacctttgagtttgtggaaggggacagggctcctgccttgccatgcagaccagaggtgatggtggcctgagttagtgcagaagcaagtggggacagggagaagtaagggagagtccagcaatgtggaggtgggagaattgtcacgacccgatggggagaggactcatgggtgccagcagctgagtgggtgagggaacccttctgagacagctgacccaggcggtggggcaggaatgcgagggaagatgacagattcggctgtgggcctggtaaagtggagggccctaggcatatgtgctgggaagagagatcaaggctgaaggtgatgatggggttgtcaggctgccctggtccttggaactatgggagtagatgaaaccagtcagggaggagcaaagagaggagagggacccagacagaaccctgagaatcgcatatcgaggggacagaaaatggggggacaagcaggcagactcactggagccaaggaacagggtttcctggtagaaggaggggtccccgatgacagggctgacagctgaaacatcctctgggtttaggcaggcagatcagctgaggtcaggagttggagaccagcctggccaacatggcgacaccccatctctcctaaaaaatatatacaaaaacttggtgggcgcctgtaatcccagctacttgggagactgaggcagaagaattgcttgaactcgggaggtggaggttgcagtgagccaagatcatgccattgcactccagcctgaatgacgagcgaaactccatctcaaaaagaaggagctattataggccaggcatggtggctcaccccagtaatctcaacattttgggaggctgaggccggcagatcacttgaggccaggagttcgagactggtctgaccaacatggtgaaaccctgtctctactaaaaatacaaaaattagccaggcatggtggcccgtgcctgtaatcccagttacttgggaggctgaggcatgagaatcgcttgaactcaggaggtggaggttacagtgagccaagatggcaccactgcactccagcctgggcaacagagcaagactctgtctcataaatatgatagagaaagaaaggaaagaaaaagggaggaaggaaggaagggaaggaaggaacgaaggaaggaaaggaagggagggaagggagagaagggagggaaggaaggaacgaaggaaggaaaggaagggggggaagggagagaagggagggaagggaggaagggaggggaaagaaagaaatgaaggaagtgagggagggagggaaggaagggagagaaagaaaagagaaaaggaagggagggagggaaagaaaagcaagcaagcaagctattctgtgtttggttaggaaaccaactctgcaaagcactggcaattacaacttgcattttgcttctgtctgggcatgctggataaatatgcctgtggggtggcggcgtcagtaacgggcacaggaagctttctcaaggatgagtgaagtcgctgcaagagtgagatttcaacaagcaaaggactcctttgctgaaagcacattcatctatgatgcaaactactgcgtttacaaagtgttttcttcctgttttgtgtgtgtgtgtgtgtgtgtgtgtgtgtgtgtgtgtgtgtgtgttttgagacagagtcttgctctctggcccaggctggagtgcaatggtgtgatcttggctcactgcaacctccgcctcccaggttcaagcgattcttctgcctcagcctccccagtagctgggactacaggcgtgcgctaccatgcctggctaatttttgtatttttagtagatatggggttttaccagttgacctggctggtcttgaactccaggcctcaggtgatcagcctcccaaagtgctgggattacaggcatgagccaccgagattcattttaccaagaactccacgttggaaagccataacatgattgctttttgaggactttacccctgaaattcaaatgttccctcacccatagccattgatgggggtggcaggaggagggccagtaaggaaccctgggatttgcttatgtccatgttagggcctaacttgccttttaggtcagtaacccggagggggaaacctggtttattagactaagtgtcctcctggtttcattctggctgtcagcagtagcctgtaaaagacaactcgaagtgtagatggatttaacctggcgtccgtaacatctactcttccaattgtcataaaatgtgggctggctgacatgagtggaatttttccttcgtttggataaatgtgtcacggtccaatgctgttgtgacagatggaaaaatcctatgtagggcacgcagcagcctacccggcatggaggaaggactccaagggaccgtctggcaccgccgggctgataggaacccatcttgtctgtctgtgaattattcatgtgctgcacttcctgaaaagaatgctcctgtttgactgcctcgctcgtaaaaccgcagagaattcaccgttaaaggtgagaggctccctgcagtagggagtggaaggggccagggcacagcagaaactctttgctgctgtctgcgaacagcatgagaaggacagcacgctgcactgaagttgggaccccaggggtctcgctgggtctgtgagtggcagtgcgctctgggtggcaacccccaattagctcagtgcaagctcttcatggtgccatccaacaccctgggcaggggccaagcaaggtggcccatgcctctatgcccagcactttgggaggctgaggtgggaggatcacttgagcccaggagttcgagaccagcagaggcaacatagcaagacccatctcaatttttttaaaaaatttaaaaattagctggacattgtggcacatgcctgtaatcccagtgctttgagaggctaagagaggattgcttgaggccaggagtttaagaccagtctgggcaatacaggaagactctatctctaaaaaaagaattttttttttttttttttggctgggcacagtggctcacatgtatcatcccagcactttgggaggccgaggcaggcaggatcacctgaggtcaggagttcaagaccagtccggccaacatggtgaaaccccatctctactaaacatacaaaaaagtagccaggctagtggcgtgcacctgtagctcggaggctgagacaggagaatcgtttcaaccccggggtcgggggttgcagtgagccaagatggcaccactgcactccagcctgggtgacagggcaaaactccctctcaaaaaacaaacaaaaacaaattttttaaaaactaccacggtgtggtggctcctgcctacatgtagcctcagcactttgggtgactgagggcagaggatcactcgagctcaggaattcgaggctgcattgaaccgtgatcgcaccactgcagtccagcctgggcgacagagccagaccctgtctcaaaaaaataaaaaaaaaaatcctgtgaaaactcgggcgtggccagacggattctcccctccccaccttcctttcccctccactgcccacctgcacccgcccgccctgtccccactccccgcccctctacgcagccagcgtccaatgctgggcaccccccgaggctcaccctgccaagcctggggctccccttttgcgcccggacccaggggcagggaaagcccagctcgtggtctgtgggtagccggacccccgatggggcggtggggggcctcgccttgactcccagagctggggccggggacaggagctggggcaggagggatgcgcgcgggtcggggtcttcccacctcccctgctcctctccctcgcgcgatcccggggtggttccaggtgaggcggggacccccacccccccactctccgaggaggcgccgccagccccgcccctcccggcccggcgggtgacgtggccgcggctctcccgcgggtgggtcacgtgttggcggcgcctggttgccttggcagcggctgcggcggccgcgggggcggggtggaggcggggccgggggaccccgcgcgaccggcggaaggagggagggggccgcgctcggcgccccggccgggccactgggccacaggccacgcggccacgcagtccgagcgggagccgagccgggcggggcgagggcagctccggtgagtgtggcggcgcgggggcctggcgcggggagcggggtccctgcggctgggggggccggaattggaccggggacgctcggcggggaaggggacgactgtaggctgcccgggcgcggtcactacccatccggggttggtgacctccaccccgcgggatccctggcggggtgcggcgcccagaggatcagggtcggcggcgcagccggttccggacaccggggcgtccctgggggagggacagggatgcagcctagcgcccctgggaggccccctcccagtgcgcctgctggagagagacactcgccattgccggtgccccagatgcttagaggaagtcaaactccaagaccgccctctggaaatgtgtccagtaggccagccaggaagaaaagctcatctctagagaggggatcgcgttattctacaagacctgttttctcggactgctcattaaagcaaaaaaaaaaaaaaaaaaaaaaaagcaaccccacaaggttcagtcccggagcatcctctagggtctgtgccacctgacagaagtacagggctccatcctgccccaccccaccccctgcctgggatccagtgtgaggcccagactctgtccctccccctgggccaccgggcctggcacacacagttggcattgggaacataaaggatggatttgaaccccctcctgggctgctccttcgagacctggagacctgtctcaagacccagctccaggcagacagacatcgtttcctccacaatcccacccactctggggacatctgcagggcctcaccgatggggcatgggaggcctggcggctcccaggaagccaccctcagccctcactgccctgagctcttcacctccactctcagacctgagcccagcccacccttactgatggggcatccctcttgttcacccttccttcctttggaggccaccaggctctcccttgcgtcccactcctgccagtcggccagccatttccctgggttgaactgtggtcccaaaccagaatgatctagcagtgcccagaccgttccactcaccaatttcttccattctcctgtggctggacgcccagtcatgctgcccagaccctctggctcattccacagccccaggctccaagtgtcttccacccacatctccctgccccctccaccccccaggtggcagccagtcttccctccatatctcctggacaaggagagccaccccacatgtacacctggagtggccttcccgtctctcggaatccttccatgcaggcagcatcttgtctttgaggaaaggtccctcttttttaaaattctttttagaggccaggcgcagtggttcatgcctataatctcagcactttgggaggccaaggtgggcggatcacttgagctcaggagttctagaccagcctggccaacatagcaaaaccctgtctctaccaaaaataccaaaaattagccaggtatggtggcacacacatgtagtcccagctactcgggtggttgaggcgggaggatcgcttgagcctgggaggtagaatttgcagggagctgagattgtgccactgcactccagccttggtaacacagcaggaccccatgtcaaaaaaaattatttttagagacagcgtcttactctgttgcctaggctggtctccagctcctggccgcaggtgatcctcccaccttggcctcacaaaacactgggattacaggcatgaggcactttggcatgcaaagggccgctctgtcccctccccggtgttacctgcaagcaccttttcctggccttggtgtgaggcagccagtcctctgctccctgccctccattgaagcctttagctcagtggatgaggattgcctccccctctttttttttttttttttgagatggagtctcgctctgttgcccaggctggagtgcagtggtgtgctctcggctcactgcaacctctgccaccacacccagctatttttttttttttaagacagagtctcactgtgtcacccaggctggagtgccgcggtaggatctcagctcactgcaacctccgcctcctgggatcaggcaattctcctgcctcagcctcctgagtagctgggattacaggcgcccaccaccacgcccagttactttttgtatttttagaagagacaggtttccaccatgttgtccaggctagtctcgaactcctgacctctagtgatccgcccacctcagcctcccaaagatgacaggtgtgagctactgctcctgacccacatccccttaccttgctcccctactgggaggccatgaattctggcctctttcatcttggatctttaagtaccaagtgcgctaagcacctgtgtgatggaggagggaggacggagggagcaaaggttagcgtctcacccctccagtctctgtatactgcggtcatcagacctgcatgctcaattctattaactatgggggtggggggagaggaaaaatgcagtttccaaattacagcattttctattatgtggagctaacctacggattgcagcgtttctctgaattctccccaagggaagtaacgtcccagggatggaagtgcttggatgcggtgctgctggctgcggatgtgcgcaaggagatgggatggagagcctgagttggcattcgtataaatgacctggtaattggcatcccctggcagaaatagcacagaactgttcccagaggtcttgttggccagggaaggctgtggctttgtagccttgttgagaacaaagggaaaggcgacactgttttccacctccagcaccttcctgcgtaatttccaaattggggcattttcaattatggggggctcgactctggcatggatggactaagtttggggcatttcctcagctgctgaccctgttaagcactccccactccacccgtccaccccagccacgctccctgggacctagaaacacggatctgtgtgtaacagcctgacatagactttccgtgg

SEQ ID NO: 1765 - DNA, 2579 bp, Homo sapiens
acggtcattcattggcagaggtgtatttgcggggggccaggtatagagtaattcaaggcggacaaaggaggaatgtcccagtcttcaggaagctcagtgaatgtttgcgctgtcttatgtaaacaggagattgtcagaaatggaggagggggcaccagatccaaggaagtgcccggacaaagccgggaggcgaggagagccgacggggaggaggtgccgagagcatcagcggggctgctcggtggcacgaagacgcccgcggggactggagaggtcggctagggccaggctactcaggcacggagggccacctccccttcagggacgtgagcatctagctgcactgatttgttgttcaggaacaggaaatgaaaccccgcagctttgaacacaataacccacgccagcctcaggctcatgaatattcagcaggctgcttgcgccttgcaaccccgcctccgttcccctctgctcgccggcgcgcggctgtgtcgtcatacttgcgcgccgacgccgccgctcgcttgtgaaactggaaggctgccatggctagcccagccgcctcctcggtgcgaccaccgaggcccaagaaagagccgcagacgctcgtcatccccaagaatgcggcggaggagcagaagctcaagctggagcggctcatgaagaacccggacaaagcagttccaattccagagaaaatgagtgaatgggcacctcgacctcccccagaatttgtccgagatgtcatgggttcaagtgctggggccggcagtggagagttccacgtgtacagacatctgcgccggagagaatatcagcgacaggactacatggatgccatggctgagaagcaaaaattggatgcagagtttcagaaaagactggaaaagaataaaattgctgcagaggagcagaccgcaaagcgccggaagaagcgccagaagttaaaagagaagaaattactggcaaagaagatgaaacttgaacagaagaaacaagaaggacccggtcagcccaaggagcaggggtccagcagctctgcggaggcatctggaacagaggaggaggaggaagtgcccagtttcaccatggggcgatgacaatgtttgccacagcctctgcctggaacctggctcgtgctgtgaccagaagggaaaggcggctgtttggctctttctcccccgcaaggacctgctgacccgctggatggagagcaaaggagacccctcccgagccgctcacagtcctgtatttggcaggtttgggagcctgaggggccatctccctgacactcagaggcactgccttgcagacaccatccgtgctcctggtaaagggggacagagagcctcaccttgccacatatttgaacagtgatgagtttggggctggtttctgggaagggaacgtttatttagtaaagagcagaacacccttgcgttttgttgggacatgtggaccgtgagtcgcaaacactctggagaaggctgagatgccaccattcccacggggactgaagacacattacgtggacctggtcccaggctcagtgaggagatggcctcagctgtggggctggtccatgttgcccactcactccagtgggaagtggggaccacgccatagagggtctgctcccactgcagctcccggtgctctcgtgttctgggaaggcctgggtgtgtgcacaaggaggcccgggccagggacttcaccaggggctgggtcacaagggcacagggtgtgtggaaagcgctgtgggggaagagccggtcaccggagagtgagcaggcggagactccaagctgggctgagccagagcagaaggcgagggattcccagccggacgggggttctctcaccaacagctgtgatttcatcccgaagtggaagggggtctaaacagaacaggctgagagaggcgggactgggtcaagtgggtggagctcctccttgcatgactgcaactgtcggggctttccgccggctcacagcagttggggccagcggggagaagagaggcggaactgctgtgtcctcatgtggcgcagcctcaaactggcatccaggcactgggcccgtgcagagaaggcacctgcagagagcagggcagcccggcgcaggggcatgcgcctagaatcccagctactcggaaggccaaggcaggaggaccgcttgagtccagggattcaaggccaacctgggcaatagagcgagaccctgtctcttaaaaaacgatgatgatgaacacagaggacggggcactgtgctgggagccagggggcctgggaggagccgagaccagccttttacctcggggttttgaggccaacagggacgacagagacagtttctagttagagccttggctccatttttggatgatttagccccgagttcctgagtctattttatgccccttacgtactttgatagaactaaggaaatagtggttttgagtgaagggaaaggaaacccagaaacattttacgttctgtgatagcttctgtcccttcatcggttcatgtcacagggattttctttcccaggaagcggacacggagagtcagccctaataa

SEQ ID NO: 1766 - protein, 182 aa, Homo sapiens
MDAASSVRPPRPKKEPQTLVIPKNAAEEQKLKLERLMKNPDKAVPIPEKMSEWAPRPPPEFVRDVMGSSAGAGSGEFHVYRHLRRREYQRQDYMDAMAEKQKLDAEFQKRLEKNKIAAEEQTAKRRKKRQKLKEKKLLAKKMKLEQKKQEGPGQPKEQGSSSSAEASGTEEEEEVPSFTMGR

SEQ ID NO: 1767 - DNA, 2669 bp, Homo sapiens
acggtcattcattggcagaggtgtatttgcggggggccaggtatagagtaattcaaggcggacaaaggaggaatgtcccagtcttcaggaagctcagtgaatgtttgcgctgtcttatgtaaacaggagattgtcagaaatggaggagggggcaccagatccaaggaagtgcccggacaaagccgggaggcgaggagagccgacggggaggaggtgccgagagcatcagcggggctgctcggtggcacgaagacgcccgcggggactggagaggtcggctagggccaggctactcaggcacggagggccacctccccttcagggacgtgagcatctagctgcactgatttgttgttcaggaacaggaaatgaaaccccgcagctttgaacacaataacccacgccagcctcaggctcatgaatattcagcaggctgcttgcgccttgcaaccccgcctccgttcccctctgctcgccggcgcgcggctgtgtcgtcatacttgcgcgccgacgccgccgctcgcttgtgaaactggaaggctgccatggctagcccagccgcctcctcggtgcgaccaccgaggcccaagaaagagccgcagacgctcgtcatccccaagaatgcggcggaggagcagaagctcaagctggagcggctcatgaagaacccggacaaagcagttccaattccagagaaaatgagtgaatgggcacctcgacctcccccagaatttgtccgagatgtcatgggttcaagtgctggggccggcagtggagagttccacgtgtacagacatctgcgccggagagaatatcagcgacaggactacatggatgccatggctgagaagcaaaaattggatgcagagtttcagaaaagactggaaaagaataaaattgctgcagaggagcagaccgcaaagcgccggaagaagcgccagaagttaaaagagaagaaattactggcaaagaagatgaaacttgaacagaagaaacaagaaggacccggtcagcccaaggagcaggggtccagcagctctgcggaggcatctggaacagaggaggaggaggaagtgcccagtttcaccatggggcgatgacaatgtttgccacagcctctgcctggaacctggctcgtgctgtgaccagaagggaaaggcggctgtttggctctttctcccccgcaaggacctgctgacccgctggatggagagcaaaggagacccctcccgagccgctcacagtcctgtatttggcaggtttgggagcctgaggggccatctccctgacactcagaggcactgccttgcagacaccatccgtgctcctggtaaagggggacagagagcctcaccttgccacatatttgaacagtgatgagtttggggctggtttctgggaagggaacgtttatttagtaaagagcagaacacccttgcgttttgttgggacatgtggaccgtgagtcgcaaacactctggagaaggctgagatgccaccattcccacggggactgaagacacattacgtggacctggtcccaggctcagtgaggagatggcctcagctgtggggctggtccatgttgcccactcactccagtgggaagtggggaccacgccatagagggtctgctcccactgcagctcccggtgctctcgtgttctgggaaggcctgggtgtgtgcacaaggaggcccgggccagggacttcaccaggggctgggtcacaagggcacagggtgtgtggaaagcgctgtgggggaagagccggtcaccggagagtgagcaggcggagactccaagctgggctgagccagagcagaaggcgagggattcccagccggacgggggttctctcaccaacagctgtgatttcatcccgaagtggaagggggtctaaacagaacaggctgagagaggcgggactgggtcaagtgggtggagctcctccttgcatgactgcaactgtcggggctttccgccggctcacagcagttggggccagcggggagaagagaggcggaactgctgtgtcctcatgtggcgcagcctcaaactggcatccaggcactgggcccgtgcagagaaggcacctgcagagagcagggcagcccggcgcaggggcatgcgcctagaatcccagctactcggaaggccaaggcaggaggaccgcttgagtccagggattcaaggccaacctgggcaatagagcgagaccctgtctcttaaaaaacgatgatgatgaacacagaggacggggcactgtgctgggagccagggggcctgggaggagccgagaccagccttttacctcggggttttgaggccaacagggacgacagagacagtttctagttagagccttggctccatttttggatgatttagccccgagttcctgagtctattttatgccccttacgtactttgatagaactaaggaaatagtggttttgagtgaagggaaaggaaacccagaaacattttacgttgcttttacttctgtagtgtagattgccccggcccctctctgagccctgtagcatctgtgatagcttctgtcccttcatcggttcatgtcacagggattttctttcccaggaagcggacacggagagtcagccctaataaatgagcacatgccctggctgtacattttgaaacctg

SEQ ID NO: 1768 - protein, 182 aa, Homo sapiens; identical to SEQ ID NO: 1766

SEQ ID NO: 1769 - DNA, 33971 bp, Mus musculus
  misc_feature (1)...(33971): n = A, C, G or T/U
gctcgtgaagcagacttggcttgagggaaggccagaagtggaggccggtgctgaaggaggttaggaaagggtggcggtatttcacaaggtgtggtcttggtgggtgtcccatccctccggcttgggagggctgaagctggacggcgatgggggtgggggtgaggctggaggatatgggtctgttgtggaggggagggtgccgtcaatggaggaggcccgttggccctgccatctcctgcttcttcaggcaaggggtacttcatctcttcatagatagcctcactgtcttcagagtccgaatcggcagcagctggaggggttgggcctccacttccaagaggaggtcccgccaggcctcctccacttcgtcctcctcctcgaaagacatcccctaccatctcaatgtacactggctcttcttcctgggcccctgcatccaggtctccagttattcgagaagccctactgaggcgttgcaggggcaggttcgcccctcgaggagatggggctggggcacaagactcatcaaaggacacagacagctgggtattggggcttcgcctgggtttctgtgggggaaccttccggctggactcacggcattcgggagctggcttctgggagcctaagtagtgtgggaaaaagaaaaagaaatggagcttatccaatagagcacctaacaagtcaggtaagtgctctaccactgagccacgcccccatcccctcactgggggattctaggcaggggctctaccactgagccacgcccccagcccctccctgggggactcaaggcagggcctctaccactgagccacgcccccagcccctcactgggggattctaggcaggggctcaactactgagccacgccccccgcccctctctgggggattctaggcaggggctctaccactgagccacaccccagcccctctctgggggattctaggcaggggctctaccactgagccacgcccccagcccctcactgggggattctaggcaagtgttctctacctttgaaatacatccccatgagcgggcatggtggcacatgcctttaatcccagcacttggaggcagaggcaggcagatttctgagttcgaggccagcgtggtctacagagtgagttccaggacagccaggactctacagagaaaccctgtctcaaaaaaaaaaaaaaccaaacaaacaaaaaacttagaaatacatccccagcttttttttcccgatatatatatattttttctctttcaagacagggcttctaagttgcctagggtgtcctttaactgatttgatagtataggggaatgattcctttctgatgtcttgacccaacttcaaggacatatttgactgttgttcatcctttccacaaccttccactcagagcccactacgtttcttttctttaaggcaatccccagtcttttctttctctctttcgtccttccttccttccttccttccttccttcctttctttcttcctgttttgtttgcttgagacagggtctcacaatatagccttggctaccctagaattccacacgtggctcaggctggccttgaattcacagagatcctccccagctatatccccagagcatgggattaaagttgtgtaccaccatggcccaggttttgttggtttgttttcctgttttggtttttgttttgttcttcttattgttccttttgtttttaatttagagtttttttttttttttttggagactaggactcaccacataccagaaactataatcttacgatttctacctcagcctcctaccaactccagagtcggcagttcctcctcacctttgggtcctttcttaccagctgttttttttttttttttttttttttagggagtgtctcctgcccttgaatggttcatctgaggtccatctaaaagaaaccccctattccttttcagaatggaaccttccacttccttggctcttccctgaatgaaccctcccagagccccccctggcctggaatggatcctgccgctgccagcttcctctgaagagggatggggagcagggtggatggatgtctcacctgctttcttacttggaggtgtctctgcccctggtcctgccatgctgagcttggtgctggggtgtctccggggcttagctgggggtctccgggtgctgctgtcctccgtgagccctcccccaggcccaccacctacactgtccatgctgcccaccgagtggcaggagagagagcgtggggccatggtgctgcggcaggggtgaggggtgtgttcctgggacgcgggcatcgtcatgaaacccatcctgagggatcgtcgaagcgaggcaatgtctcgcactcgaaccccaggccctgggacagccccaggccccaccgggcctgtgggggctgcttccttactggagctagggagagaagacaggatggggcagaagttagaaggcaagcctctaccttgttgtcttccatctcaggaggagatagcatcttcaagggtaggacaactgtgcttccccactgaggaggagaataggagcctgggttagggatatctgaaggtctaaggtttgcaggtagattctttggatttaagaagagcaaggcaataggtaggggtgaaggacagcatatgatatcagaaatggtgtgtgtgtgtgtgtgtgcgtgtgcgtgtgtgtgtgtgtgtgtgtctggtgctgactgaccacctaactagtacacagcccgttatgtgcaaaaagatgcaatccaggcaacagccacccgacagacaagcagacacacctgcccctgtggctcctcgcctgtgctggcctctggcctttctgtatgtccagctacagtgtactatggcctctgtcacaccacaggcctcttctcccagaggcagggtgtgatgcctgaatcatcagagcctctctctctctctctctctctctctcttcctctctctctctctctgctgccctctctctgtcagcttcctcacctcacttgtattcccttttctctgtccccgagttctcctctgggtgagtgaagggggtggctggcagggaagctgggagacgccgccgctgtggggtgggctctcattaaggccctgtctactaaccctttattagggagagatcactgtagtgatcactctgattaatctaattaacggcaagaattaaactccacagttgtgaggagggatgaagagggctgggaggtgcttctgactcaggctccaagaagctgtatagtcaaaagggaaaggagccagaggaagcagcctgggttcctcagaggtcagaagaaagggctggtggagatgcaagaatgagggtgggcacggggtctccacctgactcttctgcagtacttagcctaaaaatccttacacacacacacacacacacacacacacatacacacacctgtcatttagtcgtaccctccttccaacaggaccctgactggtaggggattacattgagtgctctttgaggtccctaaaatgaccctttctctggaccccacgaggatggtagggcctgcctgccctttccaaggtcaggtgacaagggaaagccagcagccagtctcaaaataacagaaaaaaagagagtcaggaaggagggacttgggccctttaggcatgggagcaagccactaaggttctttaagctggaagtcgttcccctggctaaatcctctcccaagaagccaggaacagggctgggaccaagcaagtgcatgtgcagcccattctatgctgaatagaaaatctggggaaaaaaaaactctttgatgacaaagctggtgggcccccgagaagggctgtggctaagcaaaagggggaggtctggtgcaacaggcggtgggtgggacagtcggagggcccagccttacctccgtttggcctcctcttctttgtgctgtctccactccagcttggtttttcggtagagaaggttcatgtcgtggggcaagaggtgggggctgaggggccctgcttaatgccaccaggcccggggggcggccctccctgggtcccggatccacttgataaagggaacaggtggagagaaaaaagaagatatggttggggagggaggaatgaaagagaaaaaggagcagagacgtgatttgggtcttcagaaaaggaaaacacaggcacagaatatcccatacagtttagggaacccctcccagacaggcagccatagaagtgtgtgtgtccagaatcacacaccctgacaaaggtgtttggagccacagacactgagcgatcaggttggcacagattcccattctgtgtaaatatatcccgaaccaccacagacagacagacctcacaagcatacagcaactctgtagggacacagcatatttagacacaccacaggccacagacatatctacaaatagggacagacataaaggggcacaggtaaacacaaacccaggaacaacacacacagacataaacacccacagacacacccactgatagatacacacagacctctagcacacaaatctgctatggaattggccacacctacagacaagttgtgctcagggcctacttgcgtacattgcacccagcttggggggggggggagttaggcttcctaccctcttttaggccctgaggcttagtggggggttcatcagggcagggtggggatgctgaaggaaggatggtgatactgagttgggcaactgaaatcccatccatccatctaccttcactctccggagtccccgcttttccaatcctgggcctggacctccgtccacctctattccagctccctggtccctcagcaatggtttctgcctccctcctcttgctgatagcccaaatcaatctaccttctgtctgctccaggatttgggagaacccccggctcccccctagtagtcccgcccttgaatcccaccctggcgggggtctccagtctggccccatagcaaccttctgggcttcggcctccatacctgcgctttgcgtcccttcccccaaacacactctctccctttcgccttcagcttcacgtctcctccctggagcccctcctcacagccgtcctcctccttccccagtttgttccaaacctggcctgctttaacccccccccccttttccatccaagggccccaggttcccggggcaccccctcctcttccccttgtcctgctaccctgggtgtctccgcctctcgccccgccaattcctccctacccgtagtccccccatcaccacctccccgcatgaagcctccccagtttctacatcaccgtacctggcctgccgggcgccggcccccccatgccgggctccgcccggagcaggaggagggaggaggagagacagagagagactgggggagccgaactgggccctgccgcagagacagccccgcctccgggtccgcccccagacccgcccccggccccaaacccacccttccacaccctccaagggcagagcgggaacggcggtgcggcgctgcaccaggaggttagggtggagggtgcaaggactgcggagcgtacaggggatcttgagaggatggtcttggggtgtgggagttccgctccgcagctttcgggcgtctggttctcgccgacccgcgccccctactcagccgtgttgtgctgggttgggtctcccaagccctaagcggagcggggtgctcagcggcgccccccagcggaagcctggaggtcgcacccacccgcgaacccggtgcgccttagtgctcccgggtgggaggctgcggctgcggcccctgggtgctaccaagcggtgaggcgggcagagggactccgagtcgcctgcctggagatcagcgcatctgctcagcagggggcgtgctcccttggcttagtccccgccgtgcccccaccctgccaccccgccctaggtgcggggagggcacgagaattggctggcggtgctgggcctcctccccttgcagcctcccaggcgcccggaccttgttccaccgtgtggggctcaaagtcttccgcgcgtccgcccccgcgctccaagtcattccttactaacctttgactccgtgggcgccgcccgccaggatctgagcgcaccaggttggcccgtgcgggagaccaccaggggcaccacctgggagtggttagggatgtgacctcacccctcccctcttttgaccttttctcatcagagctctgacaaattccttacgtggatagctttgtggttgggtaaattagcatcgagaagacctctgctgtatccgccaaggactggggggggggggggggggggagatatcccctgcaaaatatgcacatcctaatccctggtacctgtggacgcttttcaatgcggcaaaatctatgcaggtgtgttgtgtggccccaagcacatcccactgcttgtctgagccatgtctcatttcacacttgcctcgattaaccttactgaggcttgacacgctgcggcacacacctgtgatcccagcattcctcaggtagaatcaagaggcgcttcagttcaaggtcatcctctgctacacaagttcaaagccgaccgtggcctacatgcgactataaataaagaccttaggaaggaagagggttgtaagcactttgtaaaccagcagcctatatagggatccagtttggaggagtaagggtacgtgggaagcttgtttcctgactgcagctactacagccatttttactatggcgaaaatatgacagacaagacgagcaagactgtggctttttaaaaattttcagacaaggtttctctgtgtagcccaggctgtcctagaacacactctgaagactaggctagcctacaactcagagatcctcctgtctctgccatcggagtactgggattaaagatgtgtgtcagccgggtgtggtggcgcacgcctttaatcccagcatttgggaagcaaggcagatttctgagtttaaggccagcctggtctacagagtgagttccaggacagtcagggctgcacagagaaaccctgtctcgaaaaaaaaaaaaaaaagatggtgtgtcatccatctacatctgtctctgcgcctctgtctctttgtctgtctctgtctgtctcaacatttacctaaccttagaatgtggtccgagggactagggagctgctcggcagcacatactacttttgtggaagactacagttcagctcccagcgcccacactgagtggctcacaactccctgtaattccagcttcagaggattagatgcctggcctcctcaggcacccgtaccaaatgggcacattcctacacccagtcacacatacatacacataataaaaacaagccgtaagacaggcatgatggggcatcctttaatcagcactagggaggcagaggcaggcgggtctctgagttcaaggccagtctggactgcagctcagcaggaaagcatttagctaacatgcctgggttcactcactagtaccaacactaccacaataatagaggtgatgagaactttccatgagtttcaggtatggtggctacgtttgtggttcttgaactcagatgtagtagaagggttaggagttcacctggctaccagcttgggctactaaaaccttatcttaaaaaacttatgtgaaatctggggtgtggtgacgcatgcctttaatcccagcacttgggaggcagaggcaggagaatttctgagttcgaggccagcctggtctacagagtgagttgcaggatagccagggctacacagataaaccttgtctggaaaagccaaaaaaaaaaaaaaaacctaaaacaaaccaaaaaaaaccaaaaccaaacaaacttatgtgaagcaaagcaaggagtctaggtattcccatagaatcctaattctgccttagaaaaataatggaatgcctctgagcctcagtttctttcatcgaatatctgcattcatgccattgttcttccctatgggataaggtgaaggcttaaatttttattttattatttatttatttattgcagaatcttaagtagcccaggctagcctcttattcactatgtcccaagactaacccttcaggtagtttgctgatgctagagatggaatccagggctttatatatgaggtaagcactctactaaactatattcccagcccaaccaagggttctttcttccttttttcccctcctgtctgtctgtctgtctgttactgttgaagcaggatctcatgtagctgaggctggccttgaactcttcagcctcctgcttctatgccacctcccatgatctgggactataggcatgtacatgcactgccacagccagctaggatttttaaaatatacctaagaacatacctaagaacagttctttttttttttttttttttttttttggggtttcgagacagggtttctctgtgtagccctggctgtcctggaactcactctgcagaccaggctggcctcgaactcagaaatccgcctgcctatgcctcccaagtgctgggattaaaggcgtgcgccaccacgcccggctctaagaacagttctgtttgaggaaaattaattagaacctatttccttccaaacccatgagtgacaccagatgctgcctttagatcctgctttggctgaaagattcttgcccagaatgccagtatgggtgccaagaaagaaaaatggcagttgggagttcgctttttttcttgccagttgcagaatagaccctttatgtgtgtgcagattctccttcataatgatgaagggataatatgggacaggtgggagagggctggagatgggaaagagctggtctgtagccagctgggattggttctcaggtatacgcacggggtagttgtgtggacatgggtgtgtgtccaagcacttggggaagcagaagtgagcaacttcatcttcccatctacctaagtgtttatatgagggacaaagatgagaaggtagcaatgcctgttctgggctgaggagtggctcagcaggtaaaagttcttgctactcaagcatgaggacctgagttcaaatcttcagtagccacatgagaagccaggcataaccatgtgtgcctataacctcagtgttgtggagaatagatgtagaattattggggcttgctggatgcctaccaagctatgcattcaatgagagaccctgagtaggacacccagtgtggtcctgtggctaacaaacacacacaagtgtgtgcaactactcattcatgtgcacacacacgccacacacatgtctaccctaccaccaacagccttcttggatagtttgctttctccaattttccctttttaagagagggaaacaccgtatcagagatttgatttcatatactggagcaggagcaggatagacaggatggctcagtgggtaaagggccttaccaccaaaccggatggttggcactattccatccttggacccacatagtggaagagaaaactgactccttcaagttgacctccagatctacacatacatacattcacagtaaaaaaaaaaaaaaaaaaaaaaaaaaaaaaaaaaattcaaatattgcagcaaaatccgagaaaagatattggaggaataaaacacgtttgggtacagctgatacttgttacaagtccatgatggcgtgtatgggcgttcattctcctagttcctctactttagggcatgtttgaaaattttcatagccgctcgcttttgaaaacagagtggggaaaggagtttctcgtgaatttacggtgaaaaccagagacgctgtgacaaatcacagccagtgggtcacattgactatgtatttatggacagtcaggtacccagaacatgtctggcacgttccttgagactcttttggagaacctgcaaaagcctacaagtaagggaatccctggcctcccgcaggctcctcctctttttctccgccctcatgcccctccctccgaggaagagttgcctggaacctggcaggtgtagggttaaagcaaccagtttgggacccgcagcggcagaagctgcagcagcaacagcagcagctacagcagcaactgtaggctgcggctgcggctgcggctgtggcaggcctggctccgggccagctggcagggagccttaggagggaggagggaggagggaggaggaagaggggaaggaggaggagaggagcagtgagcaggcccgagaaggcaggacttcctggtgtgggggttgtcaacagcccagaaagagagccagagacccagaccgagacggagcggagctgaggagctgagagatacatccagtggggccacgtgggaggagccttgagagagagccactcaagggactggagccagcggggggctgagccgccccctcccacagcaacagggaagacccgtggagtgttaaccgaggctgcgcctgggctcccccgtggaagcgctggtttcttctcgtctcaactgcaaactttccaccgagatgcctcgcagagtgagatgcggacgccagagaacactgggtagcccttgattgctgcctgccgtggcctgctctaggccgccttaggatttaaaaaaaaaagagagagagagagagagagagatcttagtcccccaggtcttctctccagctcagctcggtggccgaggcccgagaggtaggtagttctcccgggctgggcggggcgcttggcttggcgggcagtgcctaaccagcgatgggggaactggaatgggggtggggtgggcttgaggcccggcagaggcctcagggtggccctttcaggggaggagccgattcacccctgtgcccctggccatggagatacgtgttggggacgagtttggatctcaagcatgaaatgtccaactttgggtcccagctgcttcttcctgttgtgggtgttctgaattctgtcccctctgctccggtctgtcatttctacttgtctctgggtctctagtggctttcttcttcctccctccagtcggctcccccgagaggaagccccggaggtggtttggcccctgctttttcttttgctcacgtacacacactctcgctcactttctgtctctttctttttccagtttgcaagctcagctttggggtttcagcggcgacagcagcaggaaaaacctgcccctgcccccccctcctgccacctcccctctgtactccagtcactaaccaggcacccccaagttcccacaaggccctcctgccatgtcggacccagacgtccccaggggccccgatgtccctgccatgtggcccccttgttccagaggtgcctgagcccctctccaggagcccagcccctcccccacccgagcccagtccggagccccagggaccatgagtggtggtaagaagaaaagtagttttcagatcaccagcgtcaccacggactatgagggcccaggaagcccaggggcttcggattcccctgtcccaccggctctcgctgggcccccgccccgcctccccaatggggaccccaaccctgatccagggggcaggggcaccccccggaatggctctccgccacctggagcccctgcctcccgtttccgggtggtgaagctgccccaaggtttgggagagccttatcgtcgaggtcggtggacgtgtgtggatgtttacgagagagatctggagcctccaagcttcggtcggcttctggagggcattcgaggggcctctggaggcaccggaggcagatcattggattctaggttggagctggctagtttgggcataagcacccctatcccgcagccaggcctgtctcagggccccacctcttggctccgcccgccccctacttctcctggaccacaggcccgctccttcacaggggggctgggccagctggcaggacctggcaaggctaaggtggagacacccccgctgtcagcatctccaccccagcagcgccccccagggcctgggactggagatagtgctcagaccctgccctctctgagggtagaagtggagtctgggggttcagcagccgcaacccctccactgtcacggagaagagatggagcagttcggctgaggatggagttagttgctccagcggagacaggaaaggtaagagatgggttcatgggggcggggcgggacctactgtactcaggcggctgacctatatcctgggcctcctcccctcagtttccgtcctgccggcccaccccttatcacctgtctgttggataggcataaagtcccctctccctttttgcaatttgtactctgaaatcttttttctctcccagcctttctttattctgaatacacatgcaccctcccttccttccttccttccttccttccttccttccttccttccttccttccttccttccttccttccgtttttcctttccatctcttttcttttttcttttctctcctttttctgtggccttcacattgttgcccttggcctatgtggcctgcccacttcagtctttaccttccctgatttcaggtgatgagggtggaggttccagctgggtggctggctaggcccttgaggggaggagctggcagggttttggggcagccataaaaggtaggcattcctctgggtctttattctaaccatcagctaccagcccagccccatttttctgccttattgcaagccagtttctctaaggaattggggtagggggcggggcatatcacccttagtagcttttagtaccctagacgcaggcttctcctggagtgtgggatggggtgaactcatggactagctagtgcgaggtaaggaagcagttgggaaggggttaaatcctctgtgctttctgcttcctgtctccaaaagaggaagctatccacaagtctgggctgggggcaggatgcctatgcccctggtgtgnnnnnnnnnnnnnnnnnnnntgggggttgggcacttagggttgggagagttggatgtttctgctgtggagaaaataacaccttggctgccagggggaagcagggagtgagggtgagggttctgtcccttcctggccatgggctccaaccacagtgtaaaaatatcttgagcctgagtcctgttagaactggtcagggccagctctcccaccctctcctggccttcagctctccatttcatgagaaatttcccatctttctcaagtttttttttttttttttttaaatttagtcttctggatcagctgtcattgcctgtctggtccttgtccccagactctcccagggcaagtttgtcaatgacgtttgctctactttcgttacatttatttttttaatttatgtgtgaatgtgtacgggcatgtgcacgtcttggtatgcatgtggaggtcagaggacaaactgggagtcagttcagtccttccactgtgggttccaccaggtgggatcaaactcaggctgccaaacttggctgcaagcctctctactcccttagccatctcgacagccctctttgctctcctcaggcacagctcaagcctattttaggtttgtagaccctgtctcttgccccacagtgtccccagccccaccccccttccttcctcccggtcggcctcgatcatttcctgtgtgcttataactgtcactatttccatgtctcaagagttagactttcttcattcagttttatggtcggagaagagctgagggaggttgacaggggacaggaggtaggtgacacctgtgtcccatttggctttcctgaggtggggggcctcttaggggcccaccctcatagaggcttcttgtccagttcctgtcacatctgcccttttacagcacaccccagcctctgcctgttgggctttgtaggtccacacccaggctcctccctccccctcccattctcacagagctccaccccccacccccaaaggcagagaatctttgaactgcatcccaggtctggagaagttgaggaggccaccatcagggtgggggggtgtggagaggcagttgctgaagattccctcattctgcagacagccgcagatcaaactcaccttcagggggaggtgacaatatacatgctttaattccaaatcgtattagatgctgtgaaaaatgaaactgtttagtggactagtaaacagtggggaagtgtaaggacatttgagcggctttaaaaaggcacacagggggctggtgagatggctcagtgggtaagagcacccgactgttcttccaaaggtccggagttcaaatcccagcaaccacatggtggctcacaaccatctgtaacaagatctgacgccctcttctggagtgtctgaagacagctacagtgtacttacatataataataaataaataaatctaaaaaaaaataggatttgaaaaaaaaaaaaaaacggggctggtgagatggctcagtgggtaagagcacccgactgctcttccgaaggtccagagttcaaatcccagcaaccacatggtggctcacaaccatccgtaacaagatctgactccctcttctggagtgtctgaagacagcgacagtgtatttacatataataaataaataaatctttaaaaaaaaaaaaaaaaaaggcacacagctgggggaaggtactggcctgagggtggcaagttcaaggccagcctgacctacatagcaaggtcaggtctgggtagacttgggctgagatattgtctcagaaggttgggagctgggtgtggtgaacgcctttaatcccggcactcgggaggcagaggcaggcggatttctgagttcgaggccagcctggtctacagagtgagttccaggacagccagggctatacagagaaaccttgtctcgaaaaacaaacaaaaacaaaaaagaaaagtttgggagggaggggtctgagaacatagctcagttaatgtagtgcttgcctaagcatgcacagagccctaagtttgagttgtagcagatcataaactgagtatagtggtatatgcttataaccccagcctttgggaaatggagacaggaaggaaggccaggaagtagttcaaggtcaccctcagctacgtagtcaatttgaggccagcctgctttacaggagaccttatttcaaaaaagatactaagtacaatatcctcttaactaggagccctggctaggcccctcattgatacccttggtccctccagaacacccctagtacctgcctgttgtttctagcaagtctgggaaaggggaaggctttagatctaggaagagaagggattggtgggaagggagaaattgtaaggtgaacccatacacacacacatgcacacacacacatgcacacatacacacacacacacacgcacccacgcacgcacgcacgcacgcacatacacaccatgtctactgagccctgttcccagtcttcaccctatatgatggttcccactcttctgcctccaggtacctcccaccgactctcgccccaactccccagccctctacttcgatgccagcctggtccataagtctccagacccatttggagccgcagcagcccagagcctcagcctggcccgttccatgttggctatcagcggtcacctggacagcgatgacgataggtaggtgggagacacgcgggtggcacccactgtgacacctgtacaactctgccttgtgtatacttttctcctgagatgaacgtgagaagggacttcataagcagagacctagcaggggtgtaatcactgggtgaagctcacttgggacccactccctgtggaaaaagctgggtgggactccttggctcagtcaagagtttttgagttagaagggagtcattgtcagattccagagctcttgtggatctagaggtcattgcttaggaatcaaatccattggcacgtgtactggagacaagaatagaaaatggggaggggagacggggagacagctggggaagtggcccagtgactggagtgcttgcttagtatgcataacgccttgggcccagtctccagtgctgcataacccctgggggccagctgtgatttgactatatcatactatgtgaaagaataaaaataggatgaataggcagttggtgcccccaccctcccatcagcatctccctttgctcctggcaccaagggtgaaaggatgccttatgctcctccaggattgtcacaatccttggaatctgcacaaactacttgaggatacaggaatttttagtaccaaaaccacattgcctggaaggtgtatacctatgatctgaagttcagaaggtggaagtaggcggctagttttaaattcaaggccaacctgggctatctaggaagatactgtcttaaaaaaggtgggaggagcggggtgtggcagctcgagactgcggtcccagcacgtgggaggctgatttaagagggtcaccatgggtttaagacctgcctggagctgggtgtggcggcacagacctttaaccccagggtttgggaagcagaggcaggtggatctctgagtttgaggccagcttggtctacagtcccaggacagccagggctgtgctctgttggggggaaaaaatcaaaataaagaaagaaaccagcttgggagagcagcttaaactctgtaggatgagagcctgtctcagaacagagcaaacaataacaaatagtgtcttgtggggcctggggatgtagcttagttagtagagagctaccctagcatgtttgaagcctgtggtcccagcacttgcataagccaggttggtagtacatgttttataatccagcactggggtagaggtcgaagcaggaagatcaaatgtttagggttatcctcaagggggtctgggcagtggtggcgcatgcctttaatcccagcactcgggaggcggaggcaggtagatttctgagtgcgttccaggacagccaggactacacagagaaactggaaaaacaaaacaaaacaacaaaacaaaacaaaacaaaaaaaaaaaaaaaaaaaaagaaggaaaagggatggagggaaaggaaggagagaaagaatgggtttaagttctgtcctccgaggagatagaacccacatagccgggaagagccaaggcctcccatagcaatgcctggccacaaaggacatttctactggccctgccagctgaagggtgaaagtctcatctggtgacatggtagacagacttttgcttttgtatttataggaatatcgaccatgccaggtagctaggtgctgggcagaagagctagcaaggctctgcatttattggagggagaaggggacttcctgttggaggccctgcagaggcgggtctacctgttgggaaggaaaagagtgggtgtctccaggagacccactgtagatgcaagtctttccttctcaccttaccccttcgaggtaccaaaccctggaattagacgctggcccacaaaagaggccagggccacagtcagaggcagagacccaggaaggggtggtgggcgtctgtgaactgcagggcaggggctagagctggccgggtaaggccaggcagggaagcttctgaactgccttccagctggctctctggaatgtgtgaggtgtggggtcagccaaggccagagagtcgcctgtcccatctgatgctattctcagcgtgtcccaccccacccaccccccccaatttgggaagttccctggcaaaaaggcttcgtgtccctcctctgcccctttctcagctcggcctccagctctcccatcacaaagagttctacctgttgaagcctccataacaccattcttttgacctggtcccctccccccttctctgtcccacccgctctgcacaccctagtctgaccggttgctcccagccttcaaggctctggggctctggcccaacccagcccctcagtgcctcgcccggctgggccagcgggtttgggctgggccattcctctaccccctaggaatggggtgggtagaccccacttcacctgtgtcccctggagctaggagacacaggttccaagtgctgtgataggtcccttttgagaaggaaaaatggcttgtgataagtactggggtaatgagtgagctggggggcccttgcccatccttggatctagaatgggacaatagggtgcctggtgaattcagactatgtgttcctacttggaagatctgtgatcacatacaggttgggagatacttggtcaggatgaaagagggggcacatgtctagctagggggttcccaaagccttgagggcgaaaagccacattattttgtctgttttcctttgggtccggtgcttgttttctgctgctgtctaccactgagcacacaccaaaaccctacccctaccctcttcctcctgattttgttctcaacagtgagacagggtctcactgtgagttgcccaggctcatcttgaacttccaatcacttgtcccagcatcctgagaggctaagatgacaggcgtgccccccttcccccactccccaggccctctctagcgctactccttggcatgcatcctttcatgtgttcatttgcgtgcatgcgtgtgtgcatgcgcacttgggcccttggacacgtgtgtgtgtgtgtgtgtgtgtgtgtgtgtgtgtgtttgtgtgtaggggtgcacataggataggacaaatttggttatggtccctcatgagttatctaccttgtacatatgtatgtggtggtgtctcattggcctgggaattgttgactcagccattcttgttgacaagctagacctatgggtttccctgtccctgccaccccaggcttgggattataaacatgtgacactgccccttagcttttttgacttgagttttggggatcaaatttaggtcttcacgcttgcagcacaaatatttttacccgctgagctagctcctctgttcctgctaacttaattttttttttcatttattttttgagtgtgtgtgtatatgttatgtatgtatatgatatatatacatgtatgtatgtgtatgtatgcgtgtatttgtgtgtgtgtgtttgtgtatgtgtgtttgtgtgtgtgtgtgtgtttgtgtgtgtgtttgtgtgtgtgtttgtgtgtgtgtgtgtgtttgtgtgtgtgtgtgtgttgtgtgtgtgtgtgtgtgtgtgtgtgtgtttgtgtgtgtgtgtgtatatgttatgtatgtatataatataaatacatgtatgtatgtgtatgtatgcatgtatttatgtggtgtgtgtatgtgtgtgtgtgtgtttgtgtgtgtgtgtgtttgtgtgtgtgtgtttgtgtgtgtgtgtgtttgtgtgtgtgtgtgtttgtgtgtgtgtatatgttatgtatgtatataatatatatacatgtatgtatgtgtatgtatgtgtgtatgtggtgtgagtgtgtatgtgtgtgtgtgtgtgagtgtgtgtgtgtgtgtgtgtttgtgtgtgtgtgtgtgtatgtatatatatgtgtatgggtgccactttgcagaggcagcagcagtcaaaggccagagagctgtgtatatgagtttctccaccatgtagattctggtgacccaactcaggtcattatgctctgtggaaagctgcctttctttacccactgagccatctggatgacccctccacacacttacctcatgaaattgtaaaagcaatcccatgattcctcacttcccaaatgagactcaaaaagaaaggggggggcgggttagaaatgtgtccaaggtcactgaaccagtctgtgaccctgggtctcagtctatagccactctctttcctgttggagtgtgtgcctcccaggaggatgagaggtagccgcggtccttaggatgtccttttgctaagacagaggcagggacagctcaataactggggcaaggagccagcccctccccctgccctggcccagcctctgccctgggtacccccaaaagtactacagaatccgatctgagagagagtgtagaggggattgctggatgtcacttccttggcctcaggcctgcatctccagctcttcacagacatctgtgtcttccgttctcatactgaaattatcatactcagacttgggacaaagcaaaggcccatctcaaagagatgccctcactcctggacccaagagtctgtccctcagggctgctgtatgcagttacgttgcgcactgaacaaaccctgggggtgccgtttgcatttgcagtcttagcctggcctgggttggaagtcatgatggttttgtaggtcgatggtgagacatgtcttgggggcggggatatttcatcctcattcctacagcattgcttagaggcacctgcccttcctgcccccagccttacccaagagttccagtgtagcacataccagtccctcactcaggcctaatcagagggaaggctgggcttgccagaggcccccgtcccttcaagtgttaaggctcgaatggcataggggaagtgctttcaaaaactcctgagctagacaaacacaagatagccatcaagcagccaacaaatgttgcctgttgtattactcctttatttctggcaagaatagaggatttaacttggcatctctgcctgagtgtccgccaagcagggctgacacctctattctggtacatctgtccatctttggtgtctctatgtactggaaggagggggttttattctgtagcctactccccacccaggtactgtggattgaagtatcttgaaaacaaatttaacactggctagttgcacctaccccctctctccctccctccctcgctctctccatcccttcctccccctttctcttcagtgtgtgtgtgtgtgtgtgtgtgtgtgtttgtgtgtatatgctggtacacttgtgtgtggtgtgtgtgtgcacgctggtatacttgtgtgtggtgtgtgtgtgtgtgtggtgtgtgtgtgtgtgtggtgtgtgtatgtatgctgatacacttgtgtgtgtccaggaacaatatggcaggcttgtggaagtcaggacaatttagagaagtttgttctttgctcccacaaggtaggttcttggaatggactcaggctgtccggtttaatggcaggaatctatccaccgagccctcttccctctaacctgtctgtcccccacctccactcttaagcatctcccgtgtcccctgcctttggaggccccccgtgtccttagtcactgatatcctgctctttctagcccattcacccccttggttggttctacctgtcagcacgtcctgcacccagagcttggccaggaaatggaaaattcccagcttcgtttctgatggccggcttcatgcaagggtcaccttgcactgagtatggatccccctgtaggaaagcaggctgaggttgacagccagcggggagggattacaaaagaggcagcaatgtatgaatggagccaagtggcaccctgactcagggaggggacagggctggagaccctggtgtccctggggaaagcagaaatgaggcttaggtaactggaacaaagcctacctcctctgcgccagccgccaaaagggagacattggaggctggagcaaggtaagcagaccctaggagtcgtgggtgaccagaggggcttgagtacgaaccagattctctagcctggtgccagtcaggagcctgagtcctggggcatttgagtcaggcatgagttgccctctggtggccactgctcaaactgcagccaggcctaccctttaactggctgattaccagagtactgagttagtctctcttgcctctttatccagtgtcccatgttcagcctctccttttttcccccttcccttccttaagccctgactcactgagagacctccatacccaggtctcaggccccatacaggctgcctttgatttacagggttcctaacatgggggaggggggtgtttctgttgttatggtaatcttccctaattctctccttcgctgaagtggggtactatctgtcccaggtttcaagagctacccaagaaagctctctctctatatatatatatgtatatgtatttatttctaccctgcccccttgccaattccctttctcaaagttgagggaggccatggttaatccaggcagggcagaaaggaaggcataggtcagggacaggtgccctagggtctcaccttcaagcccctccccatgccagccatcttgccccatagcccctcccccacaccctcttaccagctgacttcacctccccgtcccctccaatctgggagtggtgccagggtgagaaggggacactggcacagactatgtgtgtctgggaattcccgcccactgtggagccaagggagggggtccccgtgtccctgaggaaccaatagcagctgtgccttgccctgagggggagggcagggtgtatatctctcagaccagcaatcggtaagtccggtctcctcactgcctgcctggcatccatccgaagaaccctgctctgcccaggggggctctgagccccccaggcactctgcctgacacagccctttggttgggagtggatactgatgaccctcaggaatgtcccagccgggggtctctgtgaagtccttggtatcatcttatgagatgcgagtggtggggatggcgccaggggcaccccgaaaaaggggctgcgtgtcttccccatgctctccacgggggtcatcccccatccgaggggtatcgggacctcctgcccaccagggcctgggggggccagggcatcgaccttcatcccactgtgggatggacaaaagccttctccctctgatcctctactgccacaggtactcggctgggctggggcagagctgggctttttagagcagggagtgtccagaagactgtagcagagctgacttggggttcctcctcatcttgtactctcccccctcccccatgtctctccagtggttccggaagcctggttggcattgacaacaagattgaacaagccatggtaagaaaaagatgttttggtcccaggaggccccttagctgtctctctagcatctctcctctcccatgacttgggaatacaaaccattccttttctacttccaccttggcttccctcaacctccatccctgtctgagtcttgtgtctccttttttgaccgactgctgccctgtgtctcctttagcctctttagcttctgtcccctccttggggcagagggggaggggtatctaactgcttccttgaggcacctgggttaggcgctgcagttggaagtggcctgggggtggggtggggggaggacctgatggttttgtttgtccctggggtccaggacttggtgaagtcccacctcatgtttgccgtgcgagaagaggtggaggtgctgaaggagcagatccgagacctggcagagcggaacgctgcattggagcaggagaatggattgctgcgcgccctggccagcccggagcagctggcccagctgccatcctcggggctccccaggctcgggccctctgcacccaatgggccctccatctgagccttctttccctcacaatgtgcctttggggggctgccactggctgttgcgccttgtgccggcagcctgccccctcttcctatgtagctttaatgcccatgcccaactccagtgcccagggatgggagttgaaggctcaatattggcctgtcccatcccgctcggtctccccagagtcctcaggccttgccggaagagaaacagctcgggagagggtatttatctgaagcccctcgtccgtggaagaacccagccctgcctcctaccccgggtatcagtgttctggggagcccctcagcaataggtggcctggaaagatttggaggttccctggcaggcctcaccccgttctcttcaagtgccccctctcctctgccaagggagggtgtatggacagtatcttcaacttctcggattcaggttgttgttaaaataataattataattaaaaaaaaaatctgaagaaacttgaatatggaggttggtgtgctgttgctgcgtctagctatgtatgtagttatgctgtccccaacgcacgccctcgcgcacacaaacacacacacacacacacacacacacacacacacacacacacacacaagatcccaggtccaccctggagaagatgccagaaaatggcttgggaatggtcttggtccctggaaaggcctagcaggctggcctaaggaaagaggtagggggcggtgtctacccacgtgctggtggttggccctgtgaggggaggccataacaatgaagtctttggtgagtgtcaggatccacctccagcttcccagtgtgtcctctcttgtgggctggatccgggtggctgcttggagacaggcaaggagccctgaatgggccccttgtcttaaggctgggtgtgggccaggctcttagggcacatggtgcccttgccaggcctggcaggctgcctctgcttctaccccacccctggctggatgaggactaggcccagtgggtgagcaagctcctccttctctcccagaccgactgaggcagccaagaagggccccacctagtgggggcaaagggaacagcactaagagccttgaaggagaaagtcttgtctctggggatcagagaggaagccttagcagagttttaagtctttggtggcccgaccaaccagattggaccccgtcttttcttttggggtcagggtgtggtggttaaaacggtgtcatgtagcccagcctggcttcagacttactatatagttgagaatggtgccggaggcctgatcctcctatgtgccgggatgacaggcgttcaccagtatgctggccctggttcattgttgtgtgattcgagtgttcactctgtgctattgcccacatggagagaccagaggataaacctgggtgtcactcttcacctttcaccttctctgagacagggtctgtccttactaaggatgcccagctagccatccttttatcttggcctctcattccctgttaggacctctggtattgtaaatgtttgttactgtatctgtggggtggccctgactcccaaccgaggcttgtgtaatcagcacctcctccttacccacggtctcgtggccttagtcttcagttgtctagctagagggtatcatttagcccatgatggtcttgaactcactatggagccaagactgactttggtctgtatctgtgttcacatgcctgtcagtgtgtgtatgcatgtgtggagagaccagaagctacttggtgtcttctttgattgcttttcacagtttttgttggttttcttttttgagatgctgtttccctgggtagccctggctgtccaggaactttccctgtagaccaggctggccatctgcctctgagagccctgagacagactctcagtagacctagtgttcacggatggagctaagactgactggccagcaagccccagggatccttcagtctcggcttccccactagaattacagacatgcagcattggagagttggggtgtagggtgctgaggacccaaatgcaagtcctcattgcgttggatcccctagaacaggagttataggtggtaaactaccgtgtggatgctagggctagaaccctggtcctttggaaaaagcagcaaacgcccttaatggctgagccatctctccagtcccctcaaatccagtttttacaaatcctgtatccactctccaaacacttaccttgaagtactgttgtaaaaattatctagcaaaatccacagagaacgcttaaagagtttctgggctcttgatcaacgttgattttattatctcggttcttgggccagaagagacaaggccatcaatgattggctctgaggtcttggaaggtcctcggggggttggggccagacagctctcacaatgatctagaacactccctcactctaagttctcatctacttgactcctctccctgtcccagggaggggaggaagggcctgtcatgagtcattggggggtacgccccttttggatttcgtatttcttccttcgatactgtgcttgaagcgtcgcagtacccatagtcctctctggtggtggcactggctcatagcctttcccctcctacgcctcaaatgctcgctttgtgccaaactttggacttgtggtgtcaagagagattgccatggtcatgaggttcttgagatggatcaggcaaatttggcgaaaggtgcccagttgggtgagttttacggatataagatggctgtgagataggagttgtggttcgtgttgtctgggctgtaagcgaccctgaccttatcttgtttctcatttttggcctcttttagctcaagacaaaacagggggggtgggaggctttaagatgagtggggaaggactgtaggtggtggaaagtcacatcgatgtctttactgtggggtctcctccccctcccctgtgttttgtttctattactattatgtataggggaacacacagacaacttttgggaatcagttttctcctctcatcacaggagccaaagacctacctcatactgccaggcccacctggcaggagctttcacccactgaactatccaacccaccccatgtcttacttcttaggtcccgttctggaaacacctaggcaagccaggcacgtccgagcagcacgagaagcgtccattgacaggaccggagaaggcttccatggactctgacactgtaaagttggtcaagccccacaaagaggccatggtcgccgacctggatgcgggcccagggatgctcgaaccctgtgtgctgccctcagccaaggaaagatctcctgtgcgtgatcaagagagccgttcgaatcgtgacagccgtgacagccgttctctgatgaccctagttcactcagtctctatgttcatgttctccatgctacagtccggctggcgactatgtaggtggaaggtgtgtactctcccatctctcaccctgacacccagtcctcctctgtcccttctccagcactgggtttttggtttggggcttgttttgttttgtttgagacagtctctcgtgtagcccagaattgtctggagcttgccatgtagctgaggataactgcaactcattcctacttaaatttatttctgagcattttttaaaaggctatttaaaagctgggcagttagtagcacacaccttagtcccagaatcaagaagcagaggcaggaggatctctgttgagtttgaggctggcctggtcgacagagtttcaggacagccaaaggctactcggagaaacttaatcttgaaaaaaagttatttatgtgtatatgtgtttctgcttgcctatatgtgcaccatatatgtgcagttgtccaaaggaggctataaaagattgtcagaacccctggaacctgcagtttcaggtggctgttagctatctgattgcaggtactggggtcctttgcaagaatatcgagtattttaactgctaagccatctctctggccccaagatttttattctgcttatttattttattttagttttttttttttaagatttatttatgtatgagtacaccattgctctcttcagacacgccagaagagggcatcggaccccattacagatggttgcgagccaccatgtggttgctgggacttgaactcaggacctttgaagagcagtcggtgcttttttttttttttttccattttttattaggtatttaactcatttacatttccaatgctataccaaaagtcccccatatccacccacccccactcccctgcccacccactccccctttttggccctggtattcccctgtactggggcatataaagtttgcaagatttatttatttattatatgtaagtacactgtagctgtcttcagacactccagaagagggcgtcagatcttgttacaggtggttgtgagccaccatgtggttgctgggaattgaactctggaccttcagaagagcagtcgggtgctcttacccactgagccatctcaccagcccccagtcggtgctcttaaccactgagccatctctccagccctttagattttttttgagacaggttctcaatatgtgttctggctggcatggaactctatataaaccaggctgccctgaaactcagaggtcctcttacctctgtctgccaagtgctgagattaaaagtgtataccactatgccctgatccccaaattcctttccttttcattaaaaaaaaaaaaaaaaaaaactcttcctttcttcatgtgtgtataagttgcacctgtgcctttaacatgcttgtggaaataagaggacaaccttgggtgtcagtcttttcccgttattttattattatatctttatgtatgagtatgctgcatgcatgtacatgccatgtgtatgcaggtgcccatgaagccagaagagggagggagttagaccctttggagctggagttacagggtgtgtgagcctcccagcatggatcctcttcaagagcagcaggggttcttaaccactgagccatttttccatcccctccacaggatgtcttgtttgttgtcactgctgtaggtgactgttctgagcatttctggggagtctcctgcctcctccagtttcactgtgggagtgctagggttacagatatggctatggtatccagctttagttgttggtcttgtttgagttttgttttgaaacaaggtttctctgtgtagtcctggctgtcctagaactcactctgtagaccaggctggcctccaacttagaaatctgcctgcctctgtctctcaagtgctggaattaaaggcgtgcaccaccactgcccagcttggtatccagctttctacataggttttgaggatctgaggacctgaatttaggtcttcaggcttacaccacaaacactttaccagctgagccatctttcctgcccttgaactctcctaatcctcctgccccctctccttggtgttgggatttccagcaaatactacccaggacttcatgcatgcaaggcacgtgctagacagaccaagctccgagtccagctcctccctctacccccgtgtgcagccagccctttgtagtagctcctcttctattgtgaagcaaagacagtggtaagcgaatttacccagaccaggaaggccgcagaccagggaacaaacaggctgtgttggttttatacccaaatggagtaaggttgcaggtacagaggacttgggtacctaaggagcatccgatgaagaactgggcgtggagcaccaaatatgcttccatagatgtagagagggggaaactgagacctgaagaaatttgattggcttgtcgaaaattaagaggaaatggaggaggggggacggtatggtgtaaggagagtcaggatagaggggtggggctgggggagtggcttatgttatgggagagctaaggacctatttgaataggcactacacataaatgaatggcagggtagatggccaggtggtaggatttaaatttaaccctaagaacaagaacagccttggagttgtttagtcaggagtgatataatctttttatatttatttttattttttaattttttgaaacaaggtctcctgcaggctggtgtcaaacttcctatgtatttattgtaaccttgaatttctggccctctggttgccactcccatcctcaattctgggcttacaggtgtgcaccaccacaccgggcttatgtggtagtggcgatgaaacctttggcttttttgcctgctgcacaagcatactgccaactgctagtttctctacaccattattaagataaaatctagaaactgggaacatgttatgtggtttggtggtggccaggtgccgtgtggaggaggttataagatggcattggctgggcctgcagttcaggagtaatgtgcttgcctaacgtgtctgaggcctcagatttaatccctagtactgctaggggtagtgagagacaagacagcaaaggaagggaatgaaactgattgagctgggattaccttcacaataaaagggtaaccttagtaacgcttgtgatgctcttgattggtaggtagatacacagttctgcacgtgatacagttttatagaattaagcacatatacatgcccacacacaacatacacagggataaaagtgaaactagggatgtctgcaggtggtagagatggcttagcagttaagagcactgcctggggctggagagatggctcagtggttaagagcactgcctgctcttccagaggttctaagttcaattcccagcaaccacacggtggctcgcaaccatctgtaataagatctgatgcccttatctggtgtgtctgaagagagcaacagtgtattcacatacataaaatatataaatcaaaaaagaaaagaaaagaaagaaaagaaaagaaaagaaaagaaaagaaaagaaaagaaaagaagagcactgtttgctcttcaagaggacctgggttcgattcccatcatggacatgccagctcccaactgtctcttactccagttccaggggatccagtcccagccgtcttgtagtctcaggcaccagataggaatgtggtgcacatatatacaggcaaacacacacagaaattgttttttcttaaggcaagcactcttcttttgcagaggatcctttggttcctagcacccacctagagcagctgagaaccacctgtaactccagtgaatctactgccctcttgtggtctttgtgggcattgcactcaaatatacccctcccccacatcccacccccaacagattgatgcatacacgcacataatttaaaaggataataacacaaatctttttgttcgttttttttcaagattgggtttcactatgtagccctgtttctggaatccactgtgtagactaggcttgcctctgcctcctgcatgttgggattaaaggtgtgtgctactatgcccggctacgttcctctattatgtgggtattttcacgtactgttctctgctttttgtttgtttgttttggtttttcaagacagggtttctctgtgtagccctggccgtcctggaactcactctgtagaccaggctggcttggaactcagaaatccacctgcctctgcctcccaattgctggaattaaaggtgtgcaccaccaccgcccggcttgcttttttttttttttttttttttttttaaacacaggatcttactatgaccctggctcacctggaactctctatgtagactaaaatggcctcaaagttaaagatgtgccttctcccttccaagtgctggggctctgctctaccatgcagagtgttttcaacagcgtctgtcactgaacctggaccttgctgtttcccatagactggctggccagagagctccctgtgccccacttggtttagtatgtggtgctgggaagcagctgtcagcctgatgtttgatccgatacactaagctattccctttgcccctgtgtctcacaaattattcttactgaaagaaaataagttgcttggctgtggtggctcatgtctttaatcctaccacttgagagataagaggtaggtggaaatctctgtgacttcaaggtcagtctggtctacagagtgagttccaggacagccagggctacacagtgaagtcctaccttgaaaaaccaacaccccccccccaaacaaacaaacaaacaagcaaaaattgaaaagaaaagaaaacaggacaaggtgacatacgtctgtaattctggaagtggaggcaggaggagtcttcaagtttggggctagcccgagtttttgatagtgaatttcaggccagcctggattaacagcgtgagactttgtcttaaaagcaaacaaaacagaaaggagaacaaatgggtgaagtaagacagggaagcggaaaacgaaggagaggagcgagaggaagaaataaagaaaatgcctaaaatctcagcactcagaggctgaggcaggactatgaatttaaagccatgaaacatggaaccttagggcaaacataagggcaggaagagtcaacacttaatgcaagctgaaaggacttcctggaggaagtgatgcctatgctaatctgatggaggaggtaaaaggcgtccaaccctttgctgtttatttgctggtccacctatcctcctgtgacacccccttatttctttcttttacagtcttctatgagtgctggctcagtttcctcccacacgaggaccaggtcggcattggggacgtcagaggctgagatgctgcgggaagtgtacctggtgctctgggtcatccgcaaacaactaagagagctggcccgcaggcaggagaggcgaagacggcgccgtatgtggtctcatccctcccatacttcccgtcactctgaaccagtgcagggcctcaaacatgatgcccgaagtcctctttaggcaggggagccccagatcctttgaaagcccccacctcactcttacggaagattgacaggaagggttcaatggccatcaggccagagctactggtgaggagacattcgaccatactgccacatctcactggagccccaagaccaggcctggggtcgaacacactccccttctctgtgtttattcaatttgtaaaaaaaaaaaaaaaaaaaaaaattaatattgagaaataaataccggatatttctgagtagatgtagtctgtggtcatgaatgagaggcagtgaggagacttggtggggttgtggtatatgtgaagaagcacccactaaatgtgtgtgtgtctggggggggttgcaattatgcatgaaagtaacccctaggtatcttttttatatgtcagaagtggaccagtcctacccttacatctctacaccctcctaggagatgaattgcctttgactgctctgcctagccagtaaccatagcaacagcatcatgcccactgggcagcagccctgacttttgttttgtttttttggtttttgttttgttttgtttttcgagacagggtttctctgtatagccctggctgtcctggaactcactctgtagaccaggctggcctgcaactcagaaatctgcctctgactcccaagtgctgggattaaaggcgtgtgccaccacgccggctgcagccctgatttttatcccagcaattctatgagatagggtggtctagggaccatccaaggccctccagttaaggatgtctgtgtgtgtgtgtgtgagtgtgcgtgcgcatgggcgagtgagtgtcggatcccatggagctggagttacaggcagatgcaagccatccagaatgggtgctaggaatcgaattagccctctgtaagagcatcaagggctttagctgtcgagcagtctccagtcctcccttttgtttttgagacaaagtctcaggtgctgccatctggcctccaactctttatgttaggatggtagacagacattttaccaacgaagccacatccctaggtgccagctttttagttggttctgttacatttttaatcatgtattttgtttgcactgtatgtatgtgtgtgaatgggtgggtaccatagtgttcatgtgactagacaacaacttggcaggaatgagttctgtctatcaagtttaccacagggattgaattcaggttatcaggtttagtagcagcgcccctccccccccctgccttttttttttcaagacagggtttctctgtgtagtcctggctgtcctggaactcactctgtagaccaggctggccttgaactcagaaatccacctgcctctgcctcccaagtgctgggattaaaggcatgtgccaccatccagcttgggacaggcccttttacctagtaggacagaatgcagaccaggtgggactcactatgcagattgaagatgatcttggacaactggtccttctgcctcagtctcttatatgttgtgatggcaacagtgtaatatggggcttggaagtt

SEQ ID NO: 1770 - DNA, 2574 bp, Mus musculus
ggaacctggcaggtgtagggttaaagcaaccagtttgggacccgcagcggcagaagctgcagcagcaacagcagcagctacagcagcaactgtaggctgcggctgcggctgcggctgtggcaggcctggctccgggccagctggcagggagccttaggagggaggagggaggagggaggaggaagaggggaaggaggaggagaggagcagtgagcaggcccgagaaggcaggacttcctggtgtgggggttgtcaacagcccagaaagagagccagagacccagaccgagacggagcggagctgaggagctgagagatacatccagtggggccacgtgggaggagccttgagagagagccactcaagggactggagccagcggggggctgagccgccccctcccacagcaacagggaagacccgtggagtgttaaccgaggctgcgcctgggctcccccgtggaagcgctggtttcttctcgtctcaactgcaaactttccaccgagatgcctcgcagagtgagatgcggacgccagagaacactgggtagcccttgattgctgcctgccgtggcctgctctaggccgccttaggatttaaaaaaaaaagagagagagagagagagagagatcttagtcccccaggtcttctctccagctcagctcggtggccgaggcccgagagtttgcaagctcagctttggggtttcagcggcgacagcagcaggaaaaacctgcccctgcccccccctcctgccacctcccctctgtactccagtcactaaccaggcacccccaagttcccacaaggccctcctgccatgtcggacccagacgtccccaggggccccgatgtccctgccatgtggcccccttgttccagaggtgcctgagcccctctccaggagcccagcccctcccccacccgagcccagtccggagccccagggaccatgagtggtggtaagaagaaaagtagttttcagatcaccagcgtcaccacggactatgagggcccaggaagcccaggggcttcggattcccctgtcccaccggctctcgctgggcccccgccccgcctccccaatggggaccccaaccctgatccagggggcaggggcaccccccggaatggctctccgccacctggagcccctgcctcccgtttccgggtggtgaagctgccccaaggtttgggagagccttatcgtcgaggtcggtggacgtgtgtggatgtttacgagagagatctggagcctccaagcttcggtcggcttctggagggcattcgaggggcctctggaggcaccggaggcagatcattggattctaggttggagctggctagtttgggcataagcacccctatcccgcagccaggcctgtctcagggccccacctcttggctccgcccgccccctacttctcctggaccacaggcccgctccttcacaggggggctgggccagctggcaggacctggcaaggctaaggtggagacacccccgctgtcagcatctccaccccagcagcgccccccagggcctgggactggagatagtgctcagaccctgccctctctgagggtagaagtggagtctgggggttcagcagccgcaacccctccactgtcacggagaagagatggagcagttcggctgaggatggagttagttgctccagcggagacaggaaaggtacctcccaccgactctcgccccaactccccagccctctacttcgatgccagcctggtccataagtctccagacccatttggagccgcagcagcccagagcctcagcctggcccgttccatgttggctatcagcggtcacctggacagcgatgacgatagtggttccggaagcctggttggcattgacaacaagattgaacaagccatggacttggtgaagtcccacctcatgtttgccgtgcgagaagaggtggaggtgctgaaggagcagatccgagacctggcagagcggaacgctgcattggagcaggagaatggattgctgcgcgccctggccagcccggagcagctggcccagctgccatcctcggggctccccaggctcgggccctctgcacccaatgggccctccatctgagccttctttccctcacaatgtgcctttggggggctgccactggctgttgcgccttgtgccggcagcctgccccctcttcctatgtagctttaatgcccatgcccaactccagtgcccagggatgggagttgaaggctcaatattggcctgtcccatcccgctcggtctccccagagtcctcaggccttgccggaagagaaacagctcgggagagggtatttatctgaagcccctcgtccgtggaagaacccagccctgcctcctaccccgggtatcagtgttctggggagcccctcagcaataggtggcctggaaagatttggaggttccctggcaggcctcaccccgttctcttcaagtgccccctctcctctgccaagggagggtgtatggacagtatcttcaacttctcggattcaggttgttgttaaaataataattataattaaaaaaaaaa

SEQ ID NO: 1771 - protein, 381 aa, Mus musculus
MSGGKKKSSFQITSVTTDYEGPGSPGASDSPVPPAGPPPRLPNGDPNPDPGGRGTPRNGSPPPGAPASRFRVVKLPQGLGEPYRRGRWTCVDVYERDLEPPSFGRLLEGIRGASGGTGGRSLDSRLELASLGISTPIPQPGLSQGPTSWLRPPPTSPGPQARSFTGGLGQLAGPGKAKVETPPLSDPQQRPPGPGTGDSAQTLPSLRVEVESGGSAAATPPLSRRRDGAVRLRMELVAPAETGKVPPTDSRPNSPALYFDASLVHKSPDPFGAAAAQSLSLARSMLAISGHLDSDDDSGSGSLVGIDNKIEQAMDLVKSHLMFAVREEVEVLKEQIRDLAERNAALEQENGLLRASPEQLAQLPSSGLPRLGPSAPNGPSI

SEQ ID NO: 1772 - DNA, 42828 bp, Homo sapiens
ccttattcagcacccccccagccttgaggctctcataggcagggggtctcttgagcccagctgctgtggctgggtaggtccacagcggggtcagggggcctacagttgggtccggaaggctgtggggggaggccaggcagccgcggtggtggaggaccccagctgctgcgcccatggccccaccgtgggggctggtcttccctggcacagggggccttgagctggtacacagcatcccatggaggaccgagatctccttctccgtctttggctccccagcacccaggggtggaccagctggcaggacagagtgcgtggtcaccttgaccgccgagtacaccatggtgtaagacacggccttgtccttgggggggccggggagcaaggcggccggggcagggggggctgccggcgcccccgccgccttagggcagatcatgctgtgggagttggggagctcccgctccccccggggctggccagagccctggggtggcaacggtgtcgagtggctccgggcccggcccgatggtcccagcagcagcaggttggcagcaggaggtggaggcggtgggggaggcgtctcccgctcccgtgcaggcacttggggagctggggtggagccggctggctccttggagtggcagaggacaggtagccttgagaccccatcgccaggggttcgggaagcagacttggcttgggggaaggccaggagtggaggccggtgctgaaggaggttggggaagggcggggggatttcacaaggagtggtcttggtgggcgtcccgtccctccggctcgggagggctgaagctgggcggcggtgggcatggggcggaagggcgtgaggctgttgtggcggggatgttgccgtcaatggtggagggccattggcccggccttccccagcctcttccggcagcgggtacttcatctcttcatagatggcctcactctcttcagagtccgagtcggcgcccgctggaggggtcgggcccccacccccaagagggggcccagccaggcctcctccacttcgtcctcctcccctaaagacgtcccccaccatctcaatgtacacaggctcttcctgggcacccacatcagggtccccagctactcgggaccccctagtgaggcgctgaagaggcaggttcccccctcgaggagaggggcctggggggcaggactcatcgaaggagacagagagctgggtgttagggcttcgcctgggcttctgcggaggaaccttccggctggactctcggccctctggggttggcttctgtgagcctggacaggacaagaaagagaaaaataaaccaggcttttaatgaggggagcaagtgggaggagcccattctgatcccttgacccttctgcaaggacatatctgcctcttccttttccccacattcctcaacttacagccccaggaggtttcttcatttcttttttattttttaatagagatgggtcttgccatgttgcccagactggtcccaaattcctgggctcaagggatcctcctgcctcggcctcctaaagtgctaggattccaggcatcagccaccatgcccagctgtaggttccttttctactagtcagcccttggtctttttaaaacgtcaattaattggccaagcacagtggctcacgcctgtaatcccagcactctgggaggccgaggtgggtggatcacctgaggccagcaagcctggccttgtcagcctggccaacaagacgaaaccctgtctctactaaaaatacaaaaaattagccgggcgtggtgacggacgcctgtaatcccagctacctgggaggctgaggcaggagaactgcttgaacctgggaggcggaggatgcagtgagctgagatcgcaccactgcactcctgcctgggcaacagagcgagactctgtctcaaaaaaaaaaaagtgctgagattacgggcgtgagccacggggcttgtcccacagccctcagtctttctaacgtattctccagaattcgcagctcctaccttcattgtccctctgaggccaccacccctttctcaagaacttttcagggagtgtcccctgcccttgaatggttcatctcaggcccatccaaaaggacccccccaattccttttgagaatggaatcttccacttccttggttcttccctgaatgaaccctcccggcaagcctccccgggcgtggaatagatcctcccagctcccagctccaccccagggagagatagggggtatctcacctgctttcttgctggggggcgtctctgccccagacccaggccccaccatgctgagcttggtgctggggtgtctccggggcttggcagggggtcttcgggtgctgctgtcctctgtgaggcccccactggccccgccagggccacccccgacactgtccatgctgcccaccgagtggcaggagagggagcgtggggccatggcgctgcggcaggggtgcggggtgtgctcctgggaggcgggcatcgtcatgaaacccatcctgagggagcgccgcagcgaggcgatgtcccgcacgcggaccccaggcccctggccggccgcgggcccagccgagccagcgggggccacctccttactggagctggggagagaaggccacgatggagtggaggaagggcctcggacctgggcatcccccttctccaccccaagaggtgtcagcaaccctgtggcttcccagggaagaggacgggagcctgggtggggacagggttgccagaaggtccagggcaccaatgaaggggcttcaggcagaatcttgggctttaaaaacacaaggcagttgggggcagggatgagaagaggggtgagtatgcctgcaggggagcatccctggggctggcggatcccagcctgggcacctgtgtggacagccttgtgcagaggtagagatacaaacccaggtaacacagatggacacgcctgccccccacagctccttggcccctctcactctcacagtggcccacacctggcctctggttacccctcctgcccagccactgtgacctctgcccccacggcacacctcctctcccagatgcaggatgtgcccctccaggaccagagcagcctccctccctggcccatccttcttcctccctctcccctggtgctgttctctctctgtcagcctccccggctcacccccattccattccactgtccctgagcttctgtctgagtggagggtggcagagggttgggggggcggctggcagggaagagaggagagctgtgtggggtgggcactcattaaggccctgtctactagcccttcattagggagagatcgctgcagcgatcactctgattaatctaattaacaacaagaattaaactccacagttgcgaggaaggaaaagggaggtggctgtgagtcaggctccaagtggctgtgaagtcaatgggagagaagaggagaaggagagaaggatgggagaggccaggccccaggtccctggaagggcaagcggggaggcagacagggattgcaggggtctggaggtcgtcccctgccctggctctttggcaaggcccagcctgcatgtctgcccaccacacacacaaccccatcacttgaccactcacctcccccagcagggaaaactgggaggaggccaagtggatgttctctgatgcccctgaaatgaccccttccctagaccctgggagagaggcggggcctgccccttccaaggtcaggtgacaggagagcccgcagccagccccaaatttgcagaaaggagaagggctacaggccagaggtgagtcaggaaggagtgactcgggcctctggggatggggaacaaccaaaggggtgctcctaggctgtaaacccccccacaggagagcaggagttgggccaggacagtgtgtgcaatcctggccattccgtactgactctgagatcagagagctcactcatgacaaggctgccggcccccgagaagggctgtggcccagtgagggggcaggcagaggtgcggaagggaagggagcagtctggggtgcagccttacctcctcttggcctcctcttccttgtgctgcctccactccagcttggtttttcggtagaggaggttcatctcgtggggcaggaggtgggggctggggggccctgctcagtgccaccaggcccggggggcggccctccctgggtcccggatccactggcgggcggggtgggtgagaacggaaaaaaaagaaaggtgggatgggtgggggccagggatgaatgaaagagagaaaacggagaagagacatgactcgggtcctcagagaggaaaacacagacagaaaacccaacacagcttcgaggacccacagacagacagacacagaccccgacaaaggtgttcagagccccaaatacacactctggagagaccaggtcaacacagattcccttcttgtgtaaagacatcccgatccaccacccatacaggccccacaaacggactgcaacccctcagctacacaagtacacattcagacacacaaaccacggagccaccgacccacatctacagacagaggaccagacgcagagattggcataggtaaacagaaacctagggatagacaggcacacagacataaacacccacagacacacccacagacctccagacacacacaaatctgctacacagaactggacacacctacaggcagagttatgcccagggcctacttgcgtacattgcaccccactgggaaaaggggagatggtcagactctcccccctatcttgggctgtagggggatctcatgagggcagggtggggacgctgaaggaaggatgggagacaccctgagttgggtatctaaaataccacccatccatctatctccactgcctgccttcccccacttccagtccttccccgggcctgggccttggtccaccccgattctggctccctggccctttagcaatggtttagtctctgcctccctccctcgctgatggccccaatcaccttcttcttcctccaggatttgggaggccccctggttttcctcttccagtccccgcccctcaatcccacccggggggctccagtctggccccactgctaccttctgggctgcggcctccatacctgctccggttttccttcccccaaacccacactcttcttttcgccttcagcctcacttctcctcccaggcgcccctccttacagccgtcctcccccttcccctgttccaaacctggcctgcttcatcccccttctccatccaagggccccaggttcctggcacccctccccttccccttgtcctgctaccctgggcttctccgcctttcgctccgccaatcctccctgtcccttgtccccccaccccaaccttcctgcaccaagcctccccaggttctccatcaccgtacctggcctgccgggcgccggcccccccatgccgggctccgcccggagcaggaggagggaggaggagagacagagacagaccggggggagcgaagctgggccctgccgcagagacagccccgcctccgggtccgcccccagacccgcccccggccccaaacccacccttccacaccctccaaggacggaacgggagcggccgtgcggcgcggggccgtggggctggggcgcggggcgggggagccgcggagcctgcgggggcagattcggaggaaggtcgtggggcgctgggggcccggcgccagcccgtcgcggtctttgggcgtccgctcctcgccgcccctcgccccctgcccggccggtcggtgctgagttcggtctccccggccccggcggagcggcgtgcggcggcgccccccagcggcagcctggggcccacgcccccgcaccgtgtaccccgtgcaccccgtgcaacccgtacgcccggcgcgccccgggtccgcacccagcgtcggtccggggccgaggctgcggctgcggggcccggggtgcagtgaggcgctggggccgccagggggtgccgctttccgggccgaggggctccgagggtggggaacgggacgggcggcggctcagcccagcagggggcgtgctccggcggccgcgccccctttccccaccgcccccaggtgccaggagagcacctgagttggctcgcgggggaatcggctgcctccccctgcagcctcccgggggtgcccggatctcgttccaccgtctgggctcaaagctatccgcccccgtggcccgagtcctcctctcgtgacctttgactcccccggcgccgctcgcaacgaccagggtcgacctgagtgtggccaccgcggctaccaccctggcactgtcggggggccgctacgggacgtgacctcgacctccccttttctcatttatcttttcttttctcattatctcccctagaaataactccctctgaaatcccttgggctcacagctctgcagcgggggtaaatcagctcgagaagacctcggttgtaccttccacgggctggaaaatgggcacggcaaagataggcacggcctgatccctggagcctgcgaatgctactttccatggcagcgtctttgcagtcttgctgtgtggctttaggcagatcgtgcaacctctctgagagacgctttagtccggggatgtccactcttttaacttccctgggccacattggaagaagaatttgtcttgggccacacataaaatactcttaacactggcggggcgcggtggctcacgcctgtaaatcccagcactttgtgaggccgaggctggtggatcacctgacatcagaagtttgagaccagcctggccaacgtggcaaaaccccgtgtctactaaagatagaaaaaataagctgggcatggtggcctgcgcctgtaatcccagctactcgggaggccaaggcaggagaatcgcttgacctggaaggcagaggttgacgtgagcccagatcgggccactgcactccagcctgggtgagagagagagactttgtctcagagaaaaaaaaaaaaaaaacgaaaacaaaaacaaaaaccaaaacttaggcgttttaagaaaatttaccaatttgtcttgggccacaagctgcccgtgcggttggacaagctggctttagtccattctttggaaggggaggggtagtaaaataataccaaagtgccttgtaaattgtaaaaggtcccacatattataggctattaagaatgctcccaggggagggaaatattaaaacacttaaaacccatttcacatttatacctttagtatgattagtttatatgtataggccgggagcagtggctcacgtctgtaatcccagcactttgggagtctgaggcatgcagatcacttgaggtcaggagttcgagaccagcctggccaacatgatgagacgcccatctctactaaaactacaaaaattagccaggcgtcgtggcgggtgcctacaatcctggctactcgggaggctgaggcaggagaatcacaacctgggaggcggaggttcagtgagctgagatcacgccactgcacttcagcttgggtgacagagcaagacttcatctcaaattaaaatataaaaatttgtatgtatttactcaacaaacatttctgcagagatcaacaatgtgccagggcctctagactcagataccagtgcctgaggcagagaaagagactgcccaaagataatttttgaatagtttgtagcaagtcagcaagaaggaaggagggtctggggaaggagggaccaaggctgtgttctgaatgttgctagaggagaaaaggttctgtaagggacagagggatgcagtctagaggggtagggagcaggtgggaggctgcttcccagacttcactacttgggaggcccacagacttgggctatggcagccgttgttactatggcttaagggagagaaacagaagtgtggatgcttctaacaaagagataaagaataaatacataaagagggtaggtattgcattgttttatttttacgtacccctaaagaggggttagaggccgggcgtggtggcttatgcctgtaatcccagcactttgggaggccgaggcgggcggatcacgaggtcaggagatcaagaccatcctggctaacacggggaaaccccgtctctagtaaaaatacaaaaaattagccgggcatggtggcgggtgcctgtagtcccagctacaggctgaggcaggagaatggcgtgaacccgggaggtggagcttgcagtgagccgagatagagccactgcactccagcctgggcgacagagcgagactccgtctcaaaaaaagaggggttagaaatttccctgaggccaggcaccatggctcacgcctgtaatgtcagctctttgggaggcccaggtggaagtatcatttgaggccaggaattcgagaccagcctgggcaacatagtaataacctgtctctacaaaaactaaaaaattagccaggtatggtggtatacacctgtggtcccagctactagggaggcagaagcaggaggatcacttgaggccgggagttcaagaccaccctgggcaacattgcaagatccccatctctaccaaaaaaaaaaatttttttttaaagaaatttagccaggcgtagtagtgtgtgtctgtggtcccagctacttgggaggctgaggcaggagcatggcttgagcccaggagttccaggctgtggtgagctatgatcgcaccactgcactccatcctgggcaacagagagagagagagaccctgtctctaaaaaaaaaggcgggggcaggttgggggaaaggggaatagtataacatctaggatctgatttcaaatagtccagcaaactacagctggcccccacacaatgtcatttcattgaatgtcatttcattataacattgatgattttctaaaaattgattttgggctgggaccaccatctgtgtggagtttgcatggtctccccatgtctgcatggcatgtttgaaaattttcataataatccactttttttttttttttgagacatggtctcactctgttgcccaggctggagtgcagtggcacaatcttggctcactgcatcctcaacctcctgggctcaagagatcctcctgcctcacagcctcctgagtagctgggactacaggtatacatcaccacactcagtttttttttttttttaagatggagtctcactctgtcaccaggctggagtgcagtggcgtgatctcgactcactgcaacctccgcctcccaggttgaagtgattctcctgcctcagcctcccgagtagctgggactacaggtgcccgccaccacacctggctaatttttgtattttaagtagagacttggtttcaccatgttggccaggatggtcttaatctcttgacctcgtgatccgcccgcctcggcctcccaaagtgctaattttttaaattttttgtagagatggggatctcgttatattgcccaggctggtcacgaactcctgggctcaagcgatcctcccacctttgagtagctggaattataggtgcacatcaccatgcccagctatttttttttattttttgtagagatggggtcttgctattatattgtccaaactggtctcaagcgatcctccttcctcgacctcccaaagtgcggagattacaggcatgagccaccaccgggatccggcaataatccacttttaaaaataaggaatggggggaataatgcagttgctgtgaaaaccaaaggagaatgacagtaacagccacagctgccccacagcagggactgggaacttctgggtgggcatgcagcacacctcccggcctgtgccttccgtctcttctgtgtgtctctaggccaatggcagcaattgactacaagtaagggaatccctcgcctccctgcaagctcctcccctttctccccgagccccgccccctgcagcccctccctgcaagagtggggctagggcccggcaggtgtggggttaagggagtctgtttggggcccccaggagcagcagcctaagcagtggctgcagcaactgcaacagcagcggctgtggcaggcctggccccgggccagctggcgggaagccccaggagggagggagggaggaggaaggggaggaagaggggaaggaggaggaggaggaggagaggagcagtcagcaggcccgaggaggcaggacttcctggtgtgggggttgtcaacagcccagaaagagaaagacggagaggcagagacccaggggagccgaggagcggagacacggacccagcagggtcacgcgggaggagactcgggacacccactcgctggctgccaccgggagcagaggggggctcggccgccccctcccacatcagtctccagacccttggggcttcagaggccgctcctaggctcctcggaggaggcgcgggtttcttcttttccggagagcaaactttcctcggagatgcctggcaggatgagccgcggcccccggagaggacgggacagcctctgatcgccgcctgcgtgccccgccactgcccatggccaggaggccccagggaacggacagcccgacctcttaggcgccgggaccctcaggctcagatcagtggccgaggccccagaggtagggttcagggctgggtggggcgctggggggtagccgggcagggcctgccccagagatgtgggagctggggtgagggtgggggctcgaggcccaggagaggtctctctgagtggccgggccaggctggggagctgcttcagcctggttctcccaggccctggagtccgagctcttgggacaatacgggccccctgagtcagaatcccaggcgagaaatgcccaactctgggactcatctgcctctttctactctgagtgccttcttggatccagtcccctctgccctggtctctgtcatctcttgcctgtctctgggtctctgacggtttccccttcccccactctgctccccggagaggaagccccggaggtggcctgcccactggtttcacacacacacacacacacacacacacacacacacacacacacacacacactctctctctctctctctctctctctctccccctctttttccagtttgcaaactcagctctggagttcagcagcaacagcagcaggaaaaacctgcccctgctcccccctcccgccacctcccctctcctcttctcccctcacccagcaggcacccccggttcccgccaggccctcctgccatgtcggacccagacgtccccaggggctcggatgtccccgccatgtggcccccttgttccaggggtgcctgagccccttcaaggagccccaacccacccccaaccttggcccagccctgagccccagggaccatgagcgggggcaagaagaagagtagtttccaaatcaccagcgtcaccacggactatgagggccctgggagcccaggggcttcggatccccctaccccacagcccccaaccgggcccccgccccgcctgcccaatggggagcccagccccgatccggggggcaagggcaccccccggaatggctccccaccacctggggccccttcctcccgtttccgggtggtgaagctgccccacggcctgggagagccttatcgccgcggtcgctggacgtgtgtggatgtttatgagcgagacctggagccccacagcttcggcggactcctggagggaattcgaggggcctcagggggcgccgggggcagatctttggattccaggttggagctggccagcctcggcctgggcgcccccaccccaccgtcaggcctgtctcagggccccacctcctggctccgtccaccccccacctctcctggacctcaggcccgctccttcactgggggactgggccagctggtggtgcccagcaaagccaaggcagagaaacccccactgtcggcctcctcaccccagcagcgccccccagagcctgagaccggtgagagtgcgggcacatcccgggctgccacgcccctgccctctctgagggtggaagcggaggctgggggctcaggggccaggacccctccactgtcccggaggaaagctgtagacatgcggctgcggatggagttgggtgctccagaagagatggggcaggtaagacctgggttctagggctggcccatcagccctggcctaacctctatcttgagcctccttcctcctcctcccccccctctcctcctccttctccatcactttataagatcagatagccctcttctctgtgcctgccaggtcactctgaagccccttcctcctacttcattttctgtctcagcctccttcctgtttttctgcaccctctctctttctccctggcctctgattctctgtcttggtcttcatgtagcctgtagcatatgtggccccctcatcaggccttcttctgtcttggtctcagcccctctgcctctaggtgatgagggtggaggccccagctggatagctgggtagctgggtccctaggggaggagctgccaggatttggggaggaaaagtaaaaggtaggccttgcgcgctgccagtctctgcactgcagccccatcctgaatgtgggggtctttcttttcccccagccacccatctcagtcctgcctccagctttgctgtaagccaagtgtcactgagaaattgggtggggggaacacctctcagggacagggagggggcctgctggttgatccatttcaccccccagttgtctggctcacccccgtccatctgagcctctctgtgattgataactcgagggtgaccactgtggagtgggagagaagagccccagaagggagttcagtcccatactctttctccttcctgtctccaaaagaggaacaagccaggctgtgggggcaggatgcctgggtccccatggtgggggtgagcagccagagatagaaggttggatacttctgtcctgtgggagaatataacacctcggaggtctggggaaaggcagggagtgtgaggatgcgaactctttccccttcctggccttgggcacaaaccacagtataaaaataacctgggactggatgtctgggtcctgtcaggaccggtcaggactggctccccccaaacccctcctggcctcaagctcacatctctcgtgatgccccctcctaccccccctcccccaactcttcttgaactcttgcattcagcacccaccccaggggagaagatgctgtttctcttcctgtcctgtccccagactcttccaaagcaaacccccttggcctccagcttccctgctctctgtccttaagcctggcctgagcttctcttggggccacagaccctgcctctctctctcagtgccccctactccccagccttcccccacctcctgacggtcttctgtttgcacgcatctgttttgctatttccttgcccaaaagtctgtctcccttccacgtcccctcatgcctcttctccctcttaacagaggggagtggtggagaagggccaggggacaccacctgggcccccttcctctgctctgtcccttaaccaccctggactctctgttcttggcttttctgagaagctggggcctcccggggcctcacagaggcgtcttgtcatgttcctgtcgcccccgccctttttgctgctgcccccagagcctgttgggctatgcaggtccacgcccaggctccgcctccccccagctccacaaccagctccccccccaaccctagggcagagcgcaggagcagaattccacctgagtccgagaagtttgagaggggaagcgagagtggggggtgggtgaggggatggaggagcagtttctgaggatccattcattctacaaatagctactgagcaaactgaccttctagcaggggagagacacaataaatactttaatttcagataatgttaggtgctataaaaaaatgaaatagttcagtaaaccagtgaatgatggggaaatgcctctctaagaggtgacattggagtcattttaagaaggcagcctgggtgcagtggttcacgcctgtaatcccagcattttgggaggccgaggcgggcagatcacttgaggtcaggagttcaagaccagcctggccaacatggtgaaaccctgtcgtctctactaaaaataaaaaaattagccaggtgtgatggcaggtgccggtagtcccggctactcaggaggctgaggcaggagaatcagtttaacctggaaggcataggttacagtgagccaagatcacgtcactgcactccagcatgggcgacagagcgagactccagtaaaggcacaggctgggagtggtggctcattcttccagcactttgggaggctgaggcaggaggatcacttgagcccaggagtttgagaccagccgggacaacatcttgagaccctgtgttaaccaaaaataaaaaattagccagttatgatggtgcatgcctgtagtcccagctactcgggtggctgaggctggaggatcgcttaagctcaggaattcaaggctgcagtgagccatgattgtgccacttcactccagcctgggtgacagagtgagactgtctcaaaaaaataaaaataaaacataaaagaaggcagacacgctgcgtagcctctgattaggggtcccggcccagtgggagctggggcattggagtctattctgggttcctccgtcagtcaccccctcctcccacttgggagactctctctaatgtcctatacaccactcctcccattccttaggttgacccacttcttgcttctagtacctgcctaatgccttctccagagctggaggagggaaggactgcggggacaggactcctgggtcctcgaaagagagtggggaggtggagagggaggaaggctaataggcaagttttaaggcagctggttcctttcttttctcttttcatgtgatggttcctacctctccgcctccaggtgcccccacttgactctcgccccagctccccagccctctacttcacccacgatgccagcctggttcacaaatctccagaccccttcggagcagtagcagctcagaagttcagcctggcccactccatgttggccatcagtggtcacctagacagcgacgatgataggtaggtgggcttcgtggggtggtggggcgtggggttcaggttccccgcccagcacccggggtagctgtaagaaagtgcctggtaggcatccttcccccaggttgaacttggagaggacctcttagagaaacctggcctgggcatagccactgcacacagttgatttcggacccactccctctctgtggagagggctgggtgggactccctggctcagaactgtcaggtcacagacttttttagagtctgaagggagtcattgttgtcagattccagagctcttgcagatttagagatcatctggccaacccaggaacccactggcaaatgcatgctctagacagaatagcaaatcaggccggggcacagtggctcccgcctgtactcatagtgctttgggaggcccaggcaggaaaattgcttgaggccaggagttcaagaccaagccctggcaatgtagcgagacctcatctctaaaaagaaaaagaaagaaagaaaaaaaaaatatatatatatatacataaaggaagtaggctgggcatggtggctcatgcctgtaatcccagcactttaggaggctgaagcgggcagatcacctgaggtcaggagttcgaggccagccttgccaacacggtgaaaccctgtctgtactaaaaatacaaaaattagccaggcgtggtggtacgtgcctgtaatcccagctactcaggaggctgaggcaggagaatcacttgaacccaggaggcagagggtgcagtgagccgagatcgcaccactgcactccagcgtgggtgacagagcgagactccgcctcaaaaaaaaaacaacaaaaaaaactgaaaaagaatggaaatcagtttcctcccagttccatctccctctttctctcctaacaaaggactgggactccctaacagcacctgtggagcgtgacatcctgatagcccacagggtctactttaggatcctaagatttctagaaccgagaaagcaagtccctaagatgggccagctaggaacagaatcagagctaggaacggcaaaggggcaggggcagcactgcagagagcgactttctggggttctccctttaggggacagtgctctgttgggtgggttttcagggccaggtgtcaccattcctaagaaagccagcaagctgaaaagggaggcccagaatcgtgagtcagagatagccaggctgcctgcttctccccggggactgataggaaccgggcagaagggctggggagtcaccgcttttcttttggagggagaagtgggacttcccgtgggaggttttcaaggggagggacttcctgcttggaaggaaattgggggtggggcttcgagagtgggtgagtgggtgcctgagggaccaattccagatgggagtcgctccttcctgtcctccccagatcaggggccactcgctgggatcagggactcaagcccaccactgatagggtcctgcggcctcagggaggatagggacctggcaaaggaggtggccaggagctggtgggacggagggcaagagtgccagtgctgggtggggctgggcggggctgggcaggactgggtggcttctgcacgccccattcccactctcaggaatgtgcgaggtgtgaggtcggccagggctgggagagtcacctgccgccatcactgctattctcagcgtttcccgccctctccctctcccacttgggaggttccccggcaagaggactccccgtccctcccccacccctgttgagttcacagcccagcctcctgctgtctctgtcttagaggattcaacctcctgaggcctccgtctttcccctgtaccctccctccctgcctccctccatcccaccccctccctgcacaccccaatctgaccggtccggttcccagcctccacttcaccctgctgtgctccaaggctcttggggatctgtcccagcccagcccctcaagccccaccctgccaggccagcgggtttgggttgggccaccccctgccccctaggaatgggacatgtaggccccacctctcctgtctggtgtgcacagggctggcaggacaggatgccagtggcctgggacctctctcttaagagggaaggtgggctgagatgttcagtgcctggatcacagggagggagttggggacgcctgaccagtccctgaatctggggatgggcgaacagagggtgcaggtgaatctagaatgctcacgtgccccagggctggaaatccttgtcccctcccggcaggcaggaggtaattaaggtgtgaagaagtggatggaaggaatgggggtgggggcagtgaccggcctgggggatccaggcattatacagaatggatcccagggacttgggaaagaaaaggtacatttatttatccagtgcctcccttgggtccggtactgccttctcccttctaatcctaaaaagcagttccattctcccacttgccagatgaagtatctgagactcagagaaggaggtttttttttgttttgtttttgtttttttcttttttagatggagtcttgctctgtttcccaagctggaatgcagtggcacgatcttggctcactgcaacctctgcctcccaggtttaagcgattctcctggctcagcctccccagtagctgggactacaggtgcatgccaccatgcccggctaatttttgtatttttagtagaaacggggtttcaccatgttggccaggctgatctcaaactcctgacctcaggtgatccacccacctcgacctcccaaagtgctgggattacaagcatgagccacctcacccggccaggagggttttagaaacttgcccaagggccacccagctagtttaagtggctggactgcagctggagcctgggtccaactccaaagccacaccttctccactgtcctactgggatgcctgtgtcccaggcaaagaggtggcggcaatggtctacaatatcctttctctctaggacagtcaggtacagctctcccaagcagggcagggagccagccccccttccccctccccgacctccccagccccgccccaaagacaccacagatccgggacagcatagagacagggcagctggatgacactttcttggccccagacctaggccctgggggatcccctgaacccactggagagtgtgcagggctggcccctgtccccaagatcccaggctccccatttctcccaggtgtcctgctttttatctcatcttcatgttgaggccgttttatttgaccctcaaagaggaagaccagcttctagggctgtccccgccccaggaccaagagtcctgcagggctaagtctcccactgtgcatgtcacacactgcacaactaactccagggggtgccgctcatatttgaaatcacagtcaatgcttgaagtcacgacagttttccagaagatggcattaaggatctcgaagaagggggcattttctaatccatacaaacttgcttttgggcttgtggtggaggtcgatcctgtctcagcagcccctactttcctcccccggaccctgtcaaagaattctagcacagtgcccacaacccctcgctttggggtcctaaagggaagggcctgcattgccagagccctggtcccttgaagtgtgtgttagaatgttccaatagaggcctggcacagtgactcacacctgtaatcccaggactgagatgggaggctgaggtgggtggatcatgaggtcaggagttcaagaccagcctggccaacatggtgaaaccccattttgccggaggctccccggcaaaaatacaaaaattagctgggcatggtggctcatgcctgtaatctcagctactctggaggctgaggcaggagaatcacttgaacccagaggtggaggttccaatgagggaaaatcccgccattgcactccagcctgggcaacaagagcaaaaactcccaggcgctagacaaacagaagacagtcacctgtcggctaacaaacgtttattgctgtattattcctttatctctggtgagaatgaacaccttacttgacatctttacccctgagtctctgcccagcagggcccatgttcctatccctgtgtatccaacccctttggtctctgtgagtgtttaatggggtggtggcagtattgggctttctgtggtggctccatctccacccaggtgttgctgattgaaatagctcgaaaattactttgaccctcctgctggcagacccacctccacccttcaacttctcctctcccaccaccccaagagtcccagatgcccttcccccacccaccccatcctgctcgctcaggcctagtcacctccttagttgctccacctgtcagcgccttctgcacccagagctgggatgagaaatggaaaattcccagctcccttgtgctcccttcctggctgcaggaccttatccaggggtcaccttgaattgagtgctgatccccctgcaggaaagcaagtctgagctgacagccaggagggagggcttacaagggagtccagggatgtgggctgcagcgccttgaggcccctgctccaaggggggcccagctgggggctggagggcaggactggggatcccgccacagcgccagagtgcaggggtgcaagggtgggtcgggagcctcagggcaagagcctggggcctgaggggtgggagagggagccttggaggatgaggtcagcacaagggcctgcgcaggtggggcctgagagtggggcttgagggagagccaggttctgggaccaggagcccaacgtcgtggagccagcctggagcccggccctgggggctgttgagccaggcctgagtcgccctctggtggccacttcccagactgcagccagaccctgtcaccccagactcccagccctcttccaagccctgttgctcctcttcccagtgtcccttctccaagctcacttcccttcctctcctcaaaccctcgcttcctctgagaccccagacccaggtcccaggcccataggcgatttttttttttttttttttaagacagagttttgctcttgttgtccaggctggaattcagtggcacgatctcggctcactgcaacctccgcctcccaggttcaagcgattctcctgcctcagcctccagagtagctaggattacaggcaccccccaccatgcccagctaattttttgtacttttagtagagccagggtttcaccatgttggccaggctggtctcaaacttctgacctcaggtgatccactcgcctcagcctcccaaagtgctgggattacaagcgtgagccaccacacctggcttttttttgagacaagatctcactctgtcgtccaggctggagtgcagtagcacgatctcggctcactgcaacctccacctcctgggttcaagcgattctcctgcctcagcctcctgagtagctggaattgctggcaccctccaccacgcctggctaatttttgtattttcagtagagatggggtttctccatgttggccaggctggtctcaaactcctgacctcaagtgatacacccaccttggcctcccaaagtgctgggattacaggtgtgagccaccacgcctggcctttacgctgtattcatcttctagggctttgggctcagtttctgttgccatggtaacctttcccatttttggtcttctctggagactcagggaccctctggccagatcccaggggtcacccatgatgtgagccttgtggggttttttggtgggagagcgctcatgatctatggaagaccacgagcacgtcagaacgccccctaccccagccacctccaccctctttcccaaggccttgagtgacggaggggacagaatggggtcggaggtggcgaggggcctccgaaggccagccccttcctctcccttcacacccttcactccccgctcagacccaggcttctgccccacgcccctcccctggcccagccaccagctgacttcctcggccggccccctcccctccactctgggattggtgccagggtgagaaggggacactggcactgaccgtgtctgggaattcccgcccaccgaggagctgaaaggagggggggtccccgtgtccccaaggagccaatagcagccaggccttgcccttgggggggtggtgtatatctttcaggccagcacccccgaggcactgtctcctctctgcctgcctggcaccagccagaccctgctctgcccggggggctctgagccccccaggcattcccttcactgcatccctctccattgggggggtgtctaaggaccctttccccttgggcatggcccagccaggggtctctgtcaagtccctggtgtcgtcttatgagacccgagtggtggggatggctccggggctgccccgaaaaaggggctgtgcctcttccccttgctctccccggggtgcatcccccatccgagggacatctgggcccccgccccaccggggcctgggaggccctgggcagcggccttcaacccgcagggggatggacaaaaccctcctctccctcattctctactgtcacaggtacaggggggtgtgggcgggaggctgtggtccaagaaaccagcacctgggaaggcttctcctctcctcccctcaccttcctgtgtctctccagtggctccggaagcctggttggcattgacaacaaaatcgagcaagccatggtaagagaagccatcttggtcccaggaggtcctggcccccttaagccatccctctgccccagccctgtcctcttccttaccagggaacaccaactcccagctcctccgtccctctccctgctgggctgctgggcatcctctgccccctcctgccaccacctccacccttgactttgcccagcctctagtctggctactggtccccatctctgtctttgagccctgactctgcctctgtccctcgtccttttcccctgtcccttccctgctttgtccctcatcctctggacactggggactgtctcccaccccagccctcaaggcactgggcaggggatgaggcacccaccccgttgacgctgtgcctgtcccggggcccccaggacttggtgaagtcccacctcatgtttgcggtccgggaggaggtggaggtgctgaaggagcagatccgggaattggcggagcggaacgctgcgctggagcaggagaatgggctgctgcgcgccctggccagcccggagcagctggctcagctgccctcctcgggggtcccacggcttgggccccctgcgcccaatgggccctccgtctgagcctcccttcccttacaatgtgcctttggggctgcccggccttgcgtcagccgcctgccccctcttcctatgcagctttaatgtccccgtgtccccggggtgggagttcaaggctcagtaatggcctggtcccccggcccctgccccatctcctcatcatccccagccttgatggaggagggagggcttcaggacggggcgtcagagggagccccctctgggagggaaccaacccccaccctccctcctgggaccccccagcagtagacggcttgggggagtcggaggctccccggcagacaccccacccccatcttgttcccttgaggtgcctcctctcctctgcccaggggagggagtgtggacagtatctggaagttctgggattcaggttgttattaaaataataataataattaaaaactctgaagaaacttgaatttggaggttgacatctcgttcgttgcttgtgttcagactcaggggtcgcgcctgccatttagggctcccctgagatcttttgcagactggggaggtttaaagcgtgggagacggaggaattgagacagaggctggagaagggagccagcggttcgggtcctgggaaggggcaagtgaggattgggggtgggggggcgtctgcccacgtgctgggcggggggctgggaaacaataaggtctttggtggttgcccaagatccacccctggcttcccagtgtgtcccctctgcgggctggatccgggtggctgcttgggggcggggcggggggccctgaatgggccccttgtctcggggctgggtgtgggccaggctccccgggcacacggtgcccttgccaggcctggccagccgccgtggctcccacccccggccagctgaggacgggccctgtgggtgagctggcccctccctggcagcctgggctccggtcccaggcggaagagtcagcagcaatggagaaggaccccatctagtggggaagaggcgagagctgcagctgtagccccaggaggcccctagccccgggatcccctggccccagcagcctccaaggaggctgacctgtcttggagtgcctgactctctgcctccttaggtttccctaggttcataaccttgggcaacttctttggtttttctttttttttttttcatttctcctttctttttttgagacagggtattgctctgatgcccagagtgcagtggcacaatcacagctccctgcagcctccacgttcctggctcaagtgatcctcccgccttggcctccctgaactataggtgtgcgccaccacgttcagctaattttctttatttttgtagagatggggccttgctatgttgcacaggctggagtgcagtggtgtgatcatagatcactgcagtcttcaactcctgggctcaagtgatcctcccacttcagcctcctaagtagctgggactacaggcatgtggcactatgcccagctagagtcgaagtttcgctcttgtcacccagtctggaatgcagtggtgagatctcagcttactgcaacctccacctctcaggttcaagcgatttccatgcctcagcctcctgagtagctggaactacacgtgtgcaccaccacacccagctaattttttttttttttcgtatttttagtagagaaggggtttcaccactttggtcaggctggtctcaaactcctgaactcaagtaatctgcctacctcagcctcccaaagtgctgggattacaggcatgagccactgcgcctagcctaaattttttggtagagaccatctcgctatatggcccaggctgatctcaaactgctggcttcaagtaatcctcccaccttggcgtcccaaagttctgggattacaggtgtgagctaccacacctggctctcttaagttttttccttccttgcttccttccttccttccttccctccttccttttttgtctttcttttttgtttttttctttccttcttttctttcttttgttcttttccttctttcttctttctctctctctctctctttctttctctcctctctgtctctctctcttccttcctccctcctctcccttccttccttccttccttttttttttttttttttttgagacagggtctcattctgttgcccaggctggagtgcagtggcacaatcatggctcactgcagcctccacctcctgggcgcaagcaatcctcctgcctcagcctcctgagtagctgggactgcaggcacacaccaccactcccaactgatttaaactctttttttgaaaaatttaaacatagtgagttggggggagtctcactatgttgcccaggctggtcttcaactcctggcctcaagtgatcctcctgcctcagccacccaaaacactgggattacaggcatgagccaccatgcccggcccccttcagctttcctgaatttcagattcctctttgatgaagtggcactaacaataatacctatcttgaagggctgctgtgaaggactgcaggacgtgatgcaggaacagtgcttattagtttgttacgtgttagtttattttccctggatctgagcgaagaagagccagggtggaagagatggactctgtgggtctgggcagggcctcgggggttggggtcggggccaggcagcctcacaatggtctagaactctccctcactgtaggttctcacctacttcgactcctctccctgtcccagggaggggagaaaaggtctgggattcattgccaggaggggcttcccccaggatttcctacttctttctttactgctgtgcttgaagctcacaggagacccctcaagaggtggtcaccggcccacagcccaccccatcccccacccgccacccccaccgtaccaaatgctagctctgccctttcttctgtgtttttcccatcaagagagatggttgtggtcatgaagttcttccgatgggttagacgggcttggcaaaggattatttcctgggtgagtttctgagaccactctgtcctcatgatgcgctgggatgagggcatgggtcgcagcagccccttactgcgtgggttccctcccttcctggcctgtggccaaacaagatggagtggggaggaaggaaaggacagctggggaggggctggaggagaaggaagagaggccaggaaactcactgctccatcccttttgtgccttcttttctgtggatggtgttgtctctgccctgcccctctctcctgtctctcctctctgtgtcttggttctcaggttttcttctggaggcaaaaaattaaaccaaccatctcaggacaccctgactccaagaaacactcattgaagaagatggagaagactctccaggtggttgagactttgaggttggtcgagctcccaaaagaggctaagcccaagttgggtgagtcccccgagctggcagatccctgcgtgttggccaagactacagaggagaccgaggtggagctgggccaacagggccaatccctactgcagctgccgaggacggccgtcaagtctgtctccacgctcatggtctctgccctgcagagcggctggcagatgtgcagctggaaggtcagcaccatcctaacaccccctccctctttccccagcccccagtgactcacccctccctctgattacttgttcaacaattgtttcctggcctggtgcagtgactcacgcctgtaatcccagcactttgggaggctgagatgggaggatcacttgagctcaggaattcgagaccagcctgggcaacatagcaagaccctgtctcttaaaatatctttttctttttctttttcttcctttcttttttttttttctccctgagacagagtctccctctgtcgcccaggctggagtgcagtagcgtgatctcggctcactgcaacctccacctccccggtttaagctattctcctggctcagcctcccgagtagctggggactacagactcccacgcctggctaatttttgcatttttagtagagacagggtttcaccacgaggccaagctggtctcgaactcctggcctcaagtgatccacctgcctcagcctcccaaagtgctgggattacaggcatgagccaccatgcccggcaaatgttttctttcttagccaggcatggtggctcatgcctatagtcccagcactttgggaggctgaggcaggaggatcacttgaggccaggagttcaaggccagcctgggcaacaaagtgagaccccatttctacaaaaaagttaaaaattagccaggcttagtggtgcctgtatttccagctacttgggaggctgaggcaggaggaacacatgagcccaggagttcaaggctgtaatgagctatgattgtgccactgcactccagcctgggcaatagagcgagactctgtctcttaaaaatatatatatatttctggccgggcacggtggcttacgcctgtaatcccagcactttgggaggccgaggcaggctgatcacgaggtcaggagattgagaccatactggctaacatggtgaaaccccgtctctactaaaaatacaaaaaattagccaggcaaggtggcaggtggctgtagtcccagctactcaggaggctgaggcaggagaatggcatgaacccgggaggcggagcttgcagtgagccgagatagcaccactgcactccagcctgggcgacagagcgagactccatctcaaaaaaaataaataataaaaataaaaaatatttcctatgcgtccaccaaatgccatgtactaaagatacaacaatgaacaagacttgcagacttgcagggctacagatgagacaataggcattgctagttcagtatccacacattgttgagtgtgacgttgtcaagcgggctgtaggaccccaggagagaggcatgttatccaaacctaaggagtcaggtgaggcctttttttttttttttttttgagacggagtctgtcgcccaggttggagtgcagtggcgggatctcggttcgctgcaagctccgcctcctgggttcacaccgttctcctgcctcagcctcctgagtagctcggactacaggcacccgccaccacgcccagctaaatttttttttgtatttttagtagaggcagggtttcactgtgttaaccaggatggtcttgatctcctgacctcgtgatctgtccgcctcggcctcccaaagtgctgggattacaggtgtgagccactgcgcccggccaggcaaggccttcttaacagaagtgagggtaaagctgaggcctgaaggtgttagcttggcttgaaagggttgttaggggaaggtggagggagtgggaggggtgtccagggagtaagaatggcaaatgtgtggccaggcacagtggatcatgcctgtaatcccaacactttgggaggccaaggcaggaggatcatttgagctcaggagttcgagaccagcctgggcaacatggtgaaaccctctctctacaaaaaatacaaaaataagccaggaatcggtggctcacagctgtagtcccagctattcgggaggctgaagtgggaagtctgctggagtctgggaagcggaggctgcagtgagccgagatcgtgccactgaggcaggtggatcacctgaagttaggaccagcctggccgacatggtgaaaccctgtctctactaaaaacaaaaacaaaaatcagtggggtgtggtggtgcaccgctgtaatcccagatacttgggaggctgaggcaggagaatcgcttgatcctgggaagcagtggttgcaatgacccgagattctgccactgcactccagcctgggcaatacagtgagagtctgtctcaaacaaacagaaaagaatagcagatgagtgcagagctgtcccaaggtgtgtgggttggagtggaacgatcctgaagcctaaagtcagctggtagaaggcagggttgccaagttgtgagctttggattggacccttagagcaatgggagcccttgaagacatttgagcagaggagtgacatgatcaaatgttgattttgaaagctcacctgcactcatatttgggtaggattgtaagcttgttcagcccagcctgggcaacacagggagaccccatctctacaaaagtaaaaaaattagccaggcatgatgcatgcctgtagtcccagctacttgggaggctaaggtgagaggaccactgggaggtcaaggccacagtgagctatatttgtgccactgcactccaacctgggtggcagtgagacactctcaaaaaaaaaaaaggaaaatagatagcacagcaactctggaaaacaggatggtcatttctctctctctctctctttttttttttatgatggagtctcactctctcacataggctggagtgcagtggcatgatcttgttcactgcaacctctgcctgccaggttcaagcaattatcctgcctcagcctcccaagtagctgggattacaggcactcaccaccatgtctgactaacttttgtatttttagtagagacagagtttcaccatattggaccatgctagtctcgaactcttgacttcaggcgatcctcccacctcagactcccaaagtactgggattacaggcgtgagccacagcgcctggccaagagtggttatttcttataaaactaaccacgcagttatcatatgacccaacagttgtactcttgggcatttatcccagataaataaaatcttatgttcacacaaaaatctaaatgtgaggccaggcgcagtggctcacgcctgtaatcctaacactttgggaggccgaggcaggtggatcacaaggtcaggagatcaagaccatcctggctaacacagtgaaaccccgtctgtactaaaaatacaaaaaattagtcgggcgtggtggcgggtgcctgtagtcccagctacttgggaggctgaggcaggagaatggcgtgaacctgggaggcggagcttgcagtgagctgaaatagcgccactgtactccagcctgggtgacagagcgagactccatctaaaaaaaaaaaaaaatctaaatgtggatgttcacagcagcttgatttgtaatagccaaaatcaacccatgtccttcagtgggtgaatggttaaactgtgataccttcaaaccccagaatactactcagcaataagaagggacaaactggccaggagcagcgacacacctgtgatcctagcactttgaaacaccaggcagaagcatcgctcgagcccagggtttcgaggccagcctagacaacatagtgagaccccgtatctgcaaacaaacaaaacaaacacacaaataaataaaattctaaaaagacggaaaggacagggccgggcgtggtggctcatgcctgtaatcccagcactttgggaggccaaggcaggcatatcacctgagatcaggagttcgagaccagcccggccaacatggtgaaaccctgtatctactaaaaatacaaaaaaattatctgggcatggtggtgggctactcgggaggctgaggcaggagaatcgcttgaacctgggaggcggaggttgcagtgagctgagatcatgccactgcactccagcctgggcaacaaaagtgaaactctgcctgaaaaaataaaggccgggcacggtggctcacacctgtaatcccagcactttgggaggccgaggcaggcggatctcgaggtcaggagatcaagaccatcctgactaacaggatgaaagcccgtctctactaaaaaaaaaaatacaaaaaaattagccaggcgtggtggcaggcgcctgtagtaccagctactcgggaggctgaggcaggagaatggcgtgaacccgggaggcggagcttgcagtgagccaagattgtgccactgcactccagcctgggtgacagagggagacttcgtctcaaaaaaaaaaaaaaaaaaaaggtaaaaaggacaaactattgatacacacagtaacgtgggtgtgaatcttgagggaaattttttgttttgttttgagacggagtttcactctcattgcccaggctggaatgaagtggtgcgacctcggctcactgcaacctccgcctcccagcttcaagctattctcctgcctcagcctcccgattagatgggaccacaggtgcccaccaccacacccagctaattttttgtatttttagtagagatggggtttcaccatgttagccaggctggtctggaactcctgacttcaggtgatccacccaccttggcctcccaaagtgctgggattataggcatgagccactgggcccggcctcaaggaaattatactgagtggaaacaaccaatcctaaaaggttatattctgaatgattccgtttatattatctaccactcttgaaataacaaaagtctagaaatggcaaacatattagtggctcagtggtttccaggggccacagagatagggggagaagagtgtagttattaaaggacaacatgagggacacttgtgatgatgcaaatgttctgtatctttttttgttttgtttttgttttttgctttctcctgtctgatggaaatgttctgtagctttctgttttgttttgtttttatgtttttgttttttgtttctcctgcccgatggaaatgttctgtaccttgactgtggtagttggatacatgaacctgcatactggataaaacttggtaaaattatacacacacacacacacacacacacacacacacacacacacacaccagtgagtacaagtacaactggggaaatctacataagatcagtagattggatcaatgtcaatatcctgactatgatataatagtatagatttgcaagattttcctatgaggtgaactcagtaaagggtgcacaggatctctatgatttcttccaattgcaggtcagtcagtctacaatgatctcaaaacaaaacaaaacaaaaaaacagtttaagccgagcgtggcgactcacgcctgtaatctcagcatttgggaggctgaggcaggtggatcacttgagctcaggagttcaagaccagcctgggcaaaaccccatttctacaaaaaaaaaaaaaaatatatatatatatatacacacacacacacacacacacacacacacacacacacatatatatatataaaagttagccgggcatggtggtgcacgactgtagtcccagctactcaggaggctgaggtgggagcatcacttgaacttgggaggtggaggttgcagtgagctgagattatgccactgcactccagcctgggtgacagagtgagaccttgtctcaaaaaaaaaaaaaaaaaaaaggccaggcatggtggctcacgcctgtaatcccagcactttgggaggccgaggccggctgatcacttgaggtcaggagttcgagaccagcctggccaacatggtgaaaccccttctctactaaaactacaaaaattagctgggcgtgatagcgagcacctgtaatcccagctactcaggagcctgaggcagaagaatcgcttaaacccaggaggtggaggatgcagtgagctgagatcatgccactgtactccagcctgggtgatagagcaagactccatctcaaaacaacaaaaaaaagaagaatagaactgatgggccaggtgtgatgcctcacgcctgtaatccccaacactttgggaagccaaggcaggaagatctcttgagcccaggagttcgagaccagcctgggcaacatagcaagaccccgtctcattaaaaaaaaaaaaaaggatagaaatgacaaacatttgatgcaacctgagaaggctttctggaggaggtgatgtatgagttgggctgatgggagaggtggaatcagggagccctttgctgtttatctatgggtcgttctagcggcagtttctccctagacccagctatttacgcatgcacatcttctctttctcttacagtcatcagtgagttctgcctcagtcagctcccaagtgaggacgcagtcacctttgaagactccggaggctgagttgctgtgggaggtgtacctggtgctgtgggccgttcggaaacacctgcgccggctgtaccgcaggcaggagaggcacagacggcaccacgtccgatgccatgctgccccccgacccaacccggctcagtccctgaaactggatgcccaaagtcccctctagggggaaccccagacccttagagagtcctgacctcactcttacctggggtcccatatcagccccttcattccatgtattccagttgtaaaacaagtatcaaaatattgggaaataaatatcagatagttctgagtcagtatggagtgtgtttgtggacggcgggaggggatgagaggagtttgggtgggtcagggagagacccctaaggtgagggcctaaatcccagtaggggtcacctgtgggtctatttggggggaagcatggtcagcacgtttctgctctgggtcccacccccttcttggggccaaaatgcctgtttgtaactccacctttccttataaggacggtaacagctgccattcaccaaggacccagtcccgtcagctgctgtccttagcgatcctacaagaaaggtatttagggtggattacgggacttgtccaaggctcagcaaaggaggccttgctggaaactgccagctcccaggggtagcccactaccctgcctctctggtgctgaagggctttgccatgggcttggctgtggagagttgtgcgtctgcagacgcacatgggggctgtgggagatgcatccacgtgctgtgaaggaactccagccccgctgcctgctgcccgcgcctcaccaagagctgaaactacacctccagggggctctacagggaccatgctcacggcagggccgggtgaaggctgcagcctaggagctgggtgagggatttggcctggcaccgtgggaataaggacctagagggaggctgtggcaatttggaaggaggttggagggcaacggagacaacaagaagggagacccagcagcctcaggtcccctctcggagtagccaagccacatgaaggtgcagaggtggctctccaggaaaaagcagggttgtttcacaaaagcaacagcaaggccgggcacggtgactcatgcctataatcccagcaccttgggagactgaggcgggaggattgcttgagctcaggagtttgagaccagcctgggcaacataacaagaccttatctcttaaaacatctttttcacatggtgaaaccccgtttctactaaaaatacaaaaaattagctgggtgtggtggcatgtgtctataatcccagctacttgggaggctgagacagaataatttgaacccgggaggcagaggttgcaatgaggtgagattgcaccagtgcactccagcctgggcaacagagtgagactctatctcagaaaaaaaaaaaaaaagaaagagaaaagaaaggtcatgtagctttcattctgcacatgttacacagcaggtgttcaacacatgagttaagtgacttcactgggaatcagtcctgagtgaagcctaaagtcaaagcctgctttcaggttttcaggcggggcctcaaaacagactaataaagagcagctcatgtctggagttttcaatcaccaattattcatcacgtctctattatctgccaggaacccttctgggggtgaatggtgttggtgcaggatctgagtcccaggaagccctgagatttaatgggtcctgaggtttggagtagtacctagctgtctaacatccgggatcagcccctccgagtctttagagatgagctcctcatcgctggggacctgaggtttcagtgagaggaggggaggggagagtaggacgaagctgggcctctgagggtcactggtaaaatagccttgcaagtagctacaggcccaggagctcatccaggcttgacgctgtgggcttgtggaaaggaatactgctctcgtttgtctttggcttcttcagctcttgggagtggaagggaaattaaggaaggtgggttcagccagcaaccaaggcacatcccatcactctctccttccccagatctggagccctgtctaggcttggctgagcaggcacaggcagacttgtgggagaggaaggaaaggggtgggcagaaggaagctgcctcttgatgacagtttttttgtgtgtttttttgagatggagtctcactctatcgccaaggctggagtgcagtggtgtgatctcggctcattgcaacctccgcccgtggggttcaagtggttctcctgcctcagcctctggagtagctgggattacaggtgcttgccaccacacccatgtaaccgtttttgttttttggtttttttttttttttttttgagacagagtctcactctgtcacccaggctgtagtgcagtggcatgatctccgctgacggcaagctccgcctcccgggttcacaccattctcctgcctcagcctcctgagtagctgggattacaggtacatgccaccacgcccggctaattttttttcgtatttttagtagagaacggggtttcaccatgttagccaggatcgtcttgatctcctgacctcgtgatccgcctgccttggcctcccaaagtgctgggattacaggcatgagccaccgcgcctggccacacccggctaacttttgtatttttagtagagacagggtctcaccatgttgtccaggctggtcttgcactcctgacctcagatgatccacctgtctcagctccccgaagtgctaggattacaggcgtgagccactgcacccggccagtggtttttgttttttagagacagggtctggctctgttgcccaggctggagggcagtggcgcaatcatggctcactgcagcctccaactcctggactcaagcgatcctcccaccacagcctcccgaatagctgaaactacaggtgtatgccaccatgcccagctaattcttttttaatatttgtggcgatgggttctagctatgttgcccagtctggtctcaaactcctggcctcaagcaatcctcctacctcggcctcccaaagtgctgggattacaggtgtgaaccactgcacccagctaggaatgtcattttggaagtgataaagaataccatgtgcaggaagtagtaggaggagcccttgatgcggagtcaagagaccttggtcctagtctcaatattgctactactttgctgtacgactcttatttttattttttatttatttttgagacagagtctcgctcagttggccagacaggaggacagtggcacaatcatagctcactatagcctccatctcctggtcaatcctcctgcttctgcctcccaaagggctgggatcgcaggcacttggtgatttttgagagtcactttccttcactgagactcaagctccttaaataaaatgatgacttgatggctgggcacagtggctcacacctgtaatcccagcactttgggaggctgaggtgggtggatcacctgacgtcaggagttcgagaccagcctggctaacatgacgaaaccctctactaaaaatacaaaaattggctgggcatggtggctcacgcctgtaatcccagcactttgggaggccgaggtgggaggatcacgaggtcaggagatcgagaccatcctggctaacacggtgaaaccccgtctctactaaaaatacaaaaaattagctgggcgtggtagccggcacctgtagccctagctacttggaaggctgaggcaggagaatggtgtcaacctgggaggcggagcttgcagtgagctgagatcttgccactgcactctggtctgggtgacagagtgagactccatctcaaaaaaagaaaaaaaaattagctgggcatggtggcgcgcacctgtcatcccagctactcgggaggctgagacaggagaattgcttgaacctgggaggcagaggttgcagtgagctgagatcacgccactgaactccagcctgggcgatagaatcagactctgtcttcaaaaaataaaaataaaaataacaaacttcctcaggcttcagggagtgttgagttaacctgcagaaacaaggtaagttcctgggaggtgctaactagcagttgccggagacagaaccagcccagcctttgggctcacaaagaccaggttcaaattctgcctttcctggctgtgtgaccttcagcaagtgaattaacctgtctgaatctctgtctcaaaagcaaggctctgtctcaagaaaaaaaaaaaaggaaaataaatgaaatagttattagagtgtggtcctggaccagagcatcgcattccccagagagtagtagaaattcaaactccaggccctgcaccgcagacctactgaatcaaaaaccctaggatgggggccagcaatctgtttgaacacgcctgctgaagtttgggaatcactgccacactgcatgggaatgtagactgttgggattctgaagcttaggacatatcacaatctcctgagagcttgttaaaaacacagattccaggccgggcatggtggctcacacctgtaatcccagcactttgggaggctgaggcaggtggatcacgaggtcaggagatggagaccattctggctaacgcagtgaaaccccgtctctactaaaaatacgaaaaattagccaggcgtggcggcactcacctgtagtcccagctacttgggaggctgaggcaggagaattgcttgaacccgggaggtagaggttgtagtgagtggagattgcaccactgcactccagcccggtgacagggcgagactctgtctcaaaaaaataaaacaaaaacaaaaaataaaataagaaaaaaaaaacacagattccaggccatgaacggtggctcacgcctgtaatctcagcactttgggaggccaaggcgggtggatcacctgaggtcaggagttcaagaccagcctggtcaacatggtgaaaccctgtctctacaaaaatataaaaattagctgggcatgatggcaggtgcctgtaatctcacctatctgggaggctgaggcaggagaatcgcttgaacctgggaggcagaggttgcagtgagccgagatcaagccactgcactccagcctgggcagcagagcaagactccgtctgaaaaaaaaaaaaaaacccacagattccaactgggtgtggtggctcatgcctgtaatcttagcactttgggagtccaaggtggcaggatcacttgagcccaggagtttgaggccagcctgggctacatagccagaccccatctctacaaaacaaacagacaaaaaagaaaagtagctgctggtggtggtggtatgtgcctgtggtcccagctgctcgggaggctgaggtggaggatggcttgagcccaggagtttgaggctgcagtgaaccatgatgatgccgctgcactccagcctgggcaacagagcgagagcctgtctcaaaccagacaagacaaaacaaaacaaaaaccagatttttggcctcaaagtcagaaactgaggtggggtctgggaatcctttttttttttttttttttgagatggggtctcactctgttgcccaagctggagtgcagtggcacaatctcggctcactgcaacctccgcctcccgggttcaagcgattctcctgcctcagcctccagagtagctgggattacaggcgtgcaccaccacgcccggctaatttttatatttttagtagagacggggtttcaccatgttggccaggctggtctcgaactcttgacctcgggtgatctgaccacttcggcctcccaaagtgttgggattacaggcatgagccaccacgcccgctggaatcgatattttaaccggagatgagttttattggggtggggggtgccccggaggctgcactgcggggagatcacagaaggcaccttggggtattggagactctggcctgggggactgaggactccccttgggtggaggaggggagatgcagctggagagaggacacctggacacctgcccaatccagtgacgtcagcctcgtctgctgtcagaagggggcggggcctcgggggcggagtctctcccgcctcagccctcggtctagtctggccaccttcccagtctggtgggtgcaggtggggagaagcctgggtctgggggcaacaagcgcgggtaagacctgtagggggccagctagggacgccagcgggggccgggtggtcgggcgtggcggccgcggcgaagctgggggacttgaacagcctgtctcgtcttggtcctgacctccaggtggcgccgcggtgcgcggaccggcgttaaggtcgcgtcgcccttggcctctggctggggaagcccctacggcctaatgggggtggtggaggaactgctagaggggctctaggccatagccgggaacagagagacctccctatgtgagcccccggagaccctgaccgcgggctctgccgctcctcccagcacccctacgacattagccgatgggggagccgacattagcggatggattcttaaacactaaagggtctccagagcataaaatgggcactggtgacactgcttccacgggacggttagtttctagtgaaaacagcttctccactgcgcatgatggctcatgtctgtaatcctgacatttcgggaggccaaggtagggagaactgcttgagcccaggagttcaagaccagcctgggcaatatagtgagaccccatctgtcgcttttttttttttttttgagacggagtcttgctctgtcgcccaggatggaatgcggtggcgcgatctcggctcattgcaacctccacctcccaggttcaagcgattgtcgtgcctcagcctcccgagtagctgagattacaggcatgtgccaccacgcccagctcatttttttgtatttttagtagagagatggggtttcaccatgttggccaggctggtctggaactcctgaccttaaataatccacctgctttggcctcccaaagtgctggggttacaggcgtgagccactgcgcccaaccatgagaccctatttctaaaaaaaataattttaggccgggtgcggtagctcacgccggtaatcccagcactttgggaggcggaggagggtggatcacctgagatcaggagttcctgaccaacctggccaacatggtgaaaccctgtctctactaaaaatacaaaaatcagccgggcatggtagtgggcgcctgtaatcgcagctactaaggaggctgaggcaggagaatcgcttgaaaccgggaggcaaaggttacagtgagccgagattgcgccactgcactccgcctgggcaacagaatgagactccgtctcaaaaaaaaaaaaaaagaaaagaaaagaaaagaaaaaataaataataattaaattaactggccatagtgccatgcacctaaaagtcccagctacttgggaggctgaggtgggagaattgcttgagtccaggagttagaggctgcagtgagctgtgattgcatcactgcactccagcctggttaacagagcaagaccttgtctcaaaacaaaacaaaattcaacaaaacaaatcctgcctcatccgattcttggccaggacacactggtgtggaaaccctccttccccaccaagttcgcatcctgcccggccccccgggttccacctgcagccactctatccctctagcccagaactaacccagcctccaccccttgtcgtccctttgttttcaggataacctgaaatcctagcacttttggaataaacctgtaatcctagcactttgggagtccaaggtggcaggatcgcttgagcccaggagtttgaagccagcctgggctacatagccagacctcatctctacaaaacactccctgtgccctggcctttcctcagcctgggggccagtagaaaaagtgtggggcatttcgaggtttttctcaggttgaaggactggcaaggtgtgtctgtggtagtaacttgtggggaagggactgggccctgattctcagggctctgctttgagcctaggctatattttatttaattttaatatttatttatttgtttgttttgttttgtttttagttgtttgagaaggagtttcgctcttgttgcccaggctggagtgcagtggcgtgatctcggctcattgcaacctctgcctcccaggttcaagcgattctcctgcctcagcctcccgagtacctgtgattacaggcatctgccaccacactccgctaatttttgtatttttagtggagacggggtttcaccatgttggcaaggctggtctcaaactcctgatctcaggtgatctaccaccttagttagcctcccaaagtgctgggattacaggcatgagccaccgggcccggccttatttattttatttatttttatttattttttttgagacagagtctcactctgtcgcccaggctggagtgcagtggtgaaatcttgactcactgcaacctctgcctcccaggttcaagcgattctcctatctcaccctcctgagtagctgggactacaggcgcacgccaccacacctggctaatgtttgtatttttagcagagatggggtttcaccatattggttaggctggtctcgaactcctgacctcaggtgatccatccgcctctgcctcctagagtgctgggattacaggcgtgagccaccacgcccggccataatttattttatttttgagacagtgtcttgcatgtcacccaggctggagtgcagtggtgcaatcacagctccctgcaacttctgcttcccggggtcaagcgatcctcccatctcagcctcccaggtagctgggactacaggcatgtgccatcaagcctggctaattttctgtatttttggaagagatggggctggtctcgaactcttgagctcaagtgatctgcctgcctcagcctcccaaagtgttgggattaaaggcgtgagccaccgtgcctggccttaagcttcttttcttcttttttttttttttccttgagacggcatttcactcttgttgcccaggctggagtgcaatggtgcaatctcggctcaccacaacctccacctcctgggttcaagcgattctcctgcctcggcctcccaagtagctgggattacaggcatgcgccatcacaatgggctaattttgtatttttagtagagatggggtttctccatgttggtcaggctgatcttgaactcccgacctcaggtgatgtgcccacgtcagccttccgaagtgctgggattacaggtgtgagccaccacgcctggctcttttcttcttttttgagacggggtctcactgtgttgcccaggctggtcttgaactgctggcctcaagtgatcctcccaggtcagcctcccaaagcattgggataacaggtatgagccaccacaccagcctcagcctagtcttcagtctcctgaagctcagtgtcaaaggcctcagcttttttttttttttttttttgagagagagtcttgctctgttgccaggctggagtgcagtggcgcgatctcggatcactgcaacctctgcctcctggattcaagcaattctcctgcctcagcctcccgagtagctgggactacaggcgcccaccaccacgcccggctaatttttttgtatttttagtagagacagggtttcactgtgttagccaggatagtctcgatctcctgacctcgtgatccgcccgccttggcctcccaaagtgctggaattacaggtgtgagccaccacacccggctccagcctcagcttcttttttttttttcctctctcttctttttttttttttttttttttggagacgtagtctcgctctgtcgcccaggctggggtgcagtggcgcgatcttggctcactggaagctctgcctcccgggttcatgccattctcctgcctcagccttctgggtagctgggaccacaggtgcccgccaccatgcccagctaattttttggtattttttagtagagatggggtttcaccgtgttagccaggatggtctcgatctcctgaccttgtgatccgcccgcctcagcctcccaaagtgctgggattataggcgtcagccaccatgcctggccatcccagcctcagcttcttgagcatgcatgcttcctggctgccatggcaactcgacacttgcggatcatgatggctgaccaactgtgtggccacccccggagcttatgaggtctgaggccactgaatgggccttgctggacatagtccctccccaccagctccttcaca

SEQ ID NO: 1773 - DNA, 2361 bp, Homo sapiens
agcagtcagcaggcccgaggaggcaggacttcctggtgtgggggttgtcaacagcccagaaagagaaagacggagaggcagagacccaggggagccgaggagcggagacacggacccagcagggtcacgcgggaggagactcgggacacccactcgctggctgccaccgggagcagaggggggctcggccgccccctcccacatcagtctccagacccttggggcttcagaggccgctcctaggctcctcggaggaggcgcgggtttcttcttttccggagagcaaactttcctcggagatgcctggcaggatgagccgcggcccccggagaggacgggacagcctctgatcgccgcctgcgtgccccgccactgcccatggccaggaggccccagggaacggacagcccgacctcttaggcgccgggaccctcaggctcagatcagtggccgaggccccagagtttgcaaactcagctctggagttcagcagcaacagcagcaggaaaaacctgcccctgctcccccctcccgccacctcccctctcctcttctcccctcacccagcaggcacccccggttcccgccaggccctcctgccatgtcggacccagacgtccccaggggctcggatgtccccgccatgtggcccccttgttccaggggtgcctgagccccttcaaggagccccaacccacccccaaccttggcccagccctgagccccagggaccatgagcgggggcaagaagaagagtagtttccaaatcaccagcgtcaccacggactatgagggccctgggagcccaggggcttcggatccccctaccccacagcccccaaccgggcccccgccccgcctgcccaatggggagcccagccccgatccggggggcaagggcaccccccggaatggctccccaccacctggggccccttcctcccgtttccgggtggtgaagctgccccacggcctgggagagccttatcgccgcggtcgctggacgtgtgtggatgtttatgagcgagacctggagccccacagcttcggcggactcctggagggaattcgaggggcctcagggggcgccgggggcagatctttggattccaggttggagctggccagcctcggcctgggcgcccccaccccaccgtcaggcctgtctcagggccccacctcctggctccgtccaccccccacctctcctggacctcaggcccgctccttcactgggggactgggccagctggtggtgcccagcaaagccaaggcagagaaacccccactgtcggcctcctcaccccagcagcgccccccagagcctgagaccggtgagagtgcgggcacatcccgggctgccacgcccctgccctctctgagggtggaagcggaggctgggggctcaggggccaggacccctccactgtcccggaggaaagctgtagacatgcggctgcggatggagttgggtgctccagaagagatggggcaggtgcccccacttgactctcgccccagctccccagccctctacttcacccacgatgccagcctggttcacaaatctccagaccccttcggagcagtagcagctcagaagttcagcctggcccactccatgttggccatcagtggtcacctagacagcgacgatgatagtggctccggaagcctggttggcattgacaacaaaatcgagcaagccatggacttggtgaagtcccacctcatgtttgcggtccgggaggaggtggaggtgctgaaggagcagatccgggaattggcggagcggaacgctgcgctggagcaggagaatgggctgctgcgcgccctggccagcccggagcagctggctcagctgccctcctcgggggtcccacggcttgggccccctgcgcccaatgggccctccgtctgagcctcccttcccttacaatgtgcctttggggctgcccggccttgcgtcagccgcctgccccctcttcctatgcagctttaatgtccccgtgtccccggggtgggagttcaaggctcagtaatggcctggtcccccggcccctgccccatctcctcatcatccccagccttgatggaggagggagggcttcaggacggggcgtcagagggagccccctctgggagggaaccaacccccaccctccctcctgggaccccccagcagtagacggcttgggggagtcggaggctccccggcagacaccccacccccatcttgttcccttgaggtgcctcctctcctctgcccaggggagggagtgtggacagtatctggaagttctgggattcaggttgttattaaaataataataataattaaaaactctgaagaaacttgaa

SEQ ID NO: 1774 - protein, 393 aa, Homo sapiens
MSGGKKKSSFQITSVTTDYEGPGSPGASDPPTPQPPTGPPPRLPNGEPSPDPGGKGTPRNGSPPPGAPSSRFRVVKLPHGLGEPYRRGRWTCVDVYERDLEPHSFGGLLEGIRGASGGAGGRSLDSRLELASLGLGAPTPPSGLSQGPTSWLRPPPTSPGPQARSFTGGLGQLVVPSKAKAEKPPLSASSPQQRPPEPETGESAGTSRAATPLPSLRVEAEAGGSGARTPPLSRRKAVDMRLRMELGAPEEMGQVPPLDSRPSSPALYFTHDASLVHKSPDPFGAVAAQKFSLAHSMLAISGHLDSDDDSGSGSLVGIDNKIEQAMDLVKSHLMFAVREEVEVLKEQIRELAERNAALEQENGLLRASPEQLAQLPSSGVPRLGPPAPNGPSV

SEQ ID NO: 1775 - DNA, 2187 bp, Homo sapiens
ggagaggcagagacccaggggagccgaggagcggagacacggacccagcagggtcacgcgggaggagactcgggacacccactcgctggctgccaccgggagcagaggggggctcggccgccccctcccacatcagtctccagacccttggggcttcagaggccgctcctaggctcctcggaggaggcgcgggtttcttcttttccggagagcaaactttcctcggagatgcctggcaggatgagccgcggcccccggagaggacgggacagcctctgatcgccgcctgcgtgccccgccactgcccatggccaggaggccccagggaacggacagcccgacctcttaggcgccgggaccctcaggctcagatcagtggccgaggccccagagcaggcacccccggttcccgccaggccctcctgccatgtcggacccagacgtccccaggggctcggatgtccccgccatgtggcccccttgttccaggggtgcctgagccccttcaaggagccccaacccacccccaaccttggcccagccctgagccccagggaccatgagcgggggcaagaagaagagtagtttccaaatcaccagcgtcaccacggactatgagggccctgggagcccaggggcttcggatccccctaccccacagcccccaaccgggcccccgccccgcctgcccaatggggagcccagccccgatccggggggcaagggcaccccccggaatggctccccaccacctggggccccttcctcccgtttccgggtggtgaagctgccccacggcctgggagagccttatcgccgcggtcgctggacgtgtgtggatgtttatgagcgagacctggagccccacagcttcggcggactcctggagggaattcgaggggcctcagggggcgccgggggcagatctttggattccaggttggagctggccagcctcggcctgggcgcccccaccccaccgtcaggcctgtctcagggccccacctcctggctccgtccaccccccacctctcctggacctcaggcccgctccttcactgggggactgggccagctggtggtgcccagcaaagccaaggcagagaaacccccactgtcggcctcctcaccccagcagcgccccccagagcctgagaccggtgagagtgcgggcacatcccgggctgccacgcccctgccctctctgagggtggaagcggaggctgggggctcaggggccaggacccctccactgtcccggaggaaagctgtagacatgcggctgcggatggagttgggtgctccagaagagatggggcaggtgcccccacttgactctcgccccagctccccagccctctacttcacccacgatgccagcctggttcacaaatctccagaccccttcggagcagtagcagctcagaagttcagcctggcccactccatgttggccatcagtggtcacctagacagcgacgatgatagtggctccggaagcctggttggcattgacaacaaaatcgagcaagccatggacttggtgaagtcccacctcatgtttgcggtccgggaggaggtggaggtgctgaaggagcagatccgggaattggcggagcggaacgctgcgctggagcaggagaatgggctgctgcgcgccctggccagcccggagcagctggctcagctgccctcctcgggggtcccacggcttgggccccctgcgcccaatgggccctccgtctgagcctcccttcccttacaatgtgcctttggggctgcccggccttgcgtcagccgcctgccccctcttcctatgcagctttaatgtccccgtgtccccggggtgggagttcaaggctcagtaatggcctggtcccccggcccctgccccatctcctcatcatccccagccttgatggaggagggagggcttcaggacggggcgtcagagggagccccctctgggagggaaccaacccccaccctccctcctgggaccccccagcagtagacggcttgggggagtcggaggctccccggcagacaccccacccccatcttgttcccttgaggtgcctcctctcctctgcccaggggagggagtgtggacagtatctggaagttctgggattcaggttgttattaaaataataataataattaaaaactctgaagaaacttgaa

SEQ ID NO: 1776 - protein, 393 aa, Homo sapiens; identical to SEQ ID NO: 1774

SEQ ID NO: 1777 - DNA, 1708 bp, Homo sapiens
ccggcaggtgtggggttaagggagtctgtttggggcccccaggagcagcagcctaagcagtggctgcagcaactgcaacagcagcggctgtggcaggcctggccccgagccccaacccacccccaaccttggcccagccctgagccccagggaccatgagcgggggcaagaagaagagtagtttccaaatcaccagcgtcaccacggactatgagggccctgggagcccaggggcttcggatccccctaccccacagcccccaaccgggcccccgccccgcctgcccaatggggagcccagccccgatccggggggcaagggcaccccccggaatggctccccaccacctggggccccttcctcccgtttccgggtggtgaagctgccccacggcctgggagagccttatcgccgcggtcgctggacgtgtgtggatgtttatgagcgagacctggagccccacagcttcggcggactcctggagggaattcgaggggcctcagggggcgccgggggcagatctttggattccaggttggagctggccagcctcggcctgggcgcccccaccccaccgtcaggcctgtctcagggccccacctcctggctccgtccaccccccacctctcctggacctcaggcccgctccttcactgggggactgggccagctggtggtgcccagcaaagccaaggcagagaaacccccactgtcggcctcctcaccccagcagcgccccccagagcctgagaccggtgagagtgcgggcacatcccgggctgccacgcccctgccctctctgagggtggaagcggaggctgggggctcaggggccaggacccctccactgtcccggaggaaagctgtagacatgcggctgcggatggagttgggtgctccagaagagatggggcaggtgcccccacttgactctcgccccagctccccagccctctacttcacccacgatgccagcctggttcacaaatctccagaccccttcggagcagtagcagctcagaagttcagcctggcccactccatgttggccatcagtggtcacctagacagcgacgatgatagtggctccggaagcctggttggcattgacaacaaaatcgagcaagccatggacttggtgaagtcccacctcatgtttgcggtccgggaggaggtggaggtgctgaaggagcagatccgggaattggcggagcggaacgctgcgctggagcaggagaatgggctgctgcgcgccctggccagcccggagcagctggctcagctgccctcctcgggggtcccacggcttgggccccctgcgcccaatgggccctccgtctgagcctcccttcccttacaatgtgcctttggggctgcccggccttgcgtcagccgcctgccccctcttcctatgcagctttaatgtccccgtgtccccggggtgggagttcaaggctcagtaatggcctggtcccccggcccctgccccatctcctcatcatccccaccaacccccaccctccctcctgggaccccccagcagtagacggcttgggggagtcggaggctccccggcagacaccccacccccatcttgttcccttgaggtgcctcctctcctctgcccaggggagggagtgtggacagtatctggaagttctgggattcaggttgttattaaaataataataataattaaaaactctg

SEQ ID NO: 1778 - protein, 393 aa, Homo sapiens; identical to SEQ ID NO: 1774

SEQ ID NO: 1779 - DNA, 1513 bp, Homo sapiens
agcagtcagcaggcccgaggaggcaggacttcctggtgtgggggttgtcaacagcccagaaagagaaagacggagaggcagagacccaggggagccgaggagcggagacacggacccagcagggtcacgcgggaggagactcgggacacccactcgctggctgccaccgggagcagaggggggctcggccgccccctcccacatcagtctccagacccttggggcttcagaggccgctcctaggctcctcggaggaggcgcgggtttcttcttttccggagagcaaactttcctcggagatgcctggcaggatgagccgcggcccccggagaggacgggacagcctctgatcgccgcctgcgtgccccgccactgcccatggccaggaggccccagggaacggacagcccgacctcttaggcgccgggaccctcaggctcagatcagtggccgaggccccagagcgccccccagagcctgagaccggtgagagtgcgggcacatcccgggctgccacgcccctgccctctctgagggtggaagcggaggctgggggctcaggggccaggacccctccactgtcccggaggaaagctgtagacatgcggctgcggatggagttgggtgctccagaagagatggggcaggtgcccccacttgactctcgccccagctccccagccctctacttcacccacgatgccagcctggttcacaaatctccagaccccttcggagcagtagcagctcagaagttcagcctggcccactccatgttggccatcagtggtcacctagacagcgacgatgatagtggctccggaagcctggttggcattgacaacaaaatcgagcaagccatggacttggtgaagtcccacctcatgtttgcggtccgggaggaggtggaggtgctgaaggagcagatccgggaattggcggagcggaacgctgcgctggagcaggagaatgggctgctgcgcgccctggccagcccggagcagctggctcagctgccctcctcgggggtcccacggcttgggccccctgcgcccaatgggccctccgtctgagcctcccttcccttacaatgtgcctttggggctgcccggccttgcgtcagccgcctgccccctcttcctatgcagctttaatgtccccgtgtccccggggtgggagttcaaggctcagtaatggcctggtcccccggcccctgccccatctcctcatcatccccagccttgatggaggagggagggcttcaggacggggcgtcagagggagccccctctgggagggaaccaacccccaccctccctcctgggaccccccagcagtagacggcttgggggagtcggaggctccccggcagacaccccacccccatcttgttcccttgaggtgcctcctctcctctgcccaggggagggagtgtggacagtatctggaagttctgggattcaggttgttattaaaataataataataattaaaaactctgaagaaacttgaa

SEQ ID NO: 1780 - protein, 154 aa, Homo sapiens
MRLRMELGAPEEMGQVPPLDSRPSSPALYFTHDASLVHKSPDPFGAVAAQKFSLAHSMLAISGHLDSDDDSGSGSLVGIDNKIEQAMDLVKSHLMFAVREEVEVLKEQIRELAERNAALEQENGLLRASPEQLAQLPSSGVPRLGPPAPNGPSV

SEQ ID NO: 1781 - DNA, 1890 bp, Homo sapiens
ccggcaggtgtggggttaagggagtctgtttggggcccccaggagcagcagcctaagcagtggctgcagcaactgcaacagcagcggctgtggcaggcctggccccgagccccaacccacccccaaccttggcccagccctgagccccagggaccatgagcgggggcaagaagaagagtagtttccaaatcaccagcgtcaccacggactatgagggccctgggagcccaggggcttcggatccccctaccccacagcccccaaccgggcccccgccccgcctgcccaatggggagcccagccccgatccggggggcaagggcaccccccggaatggctccccaccacctggggccccttcctcccgtttccgggtggtgaagctgccccacggcctgggagagccttatcgccgcggtcgctggacgtgtgtggatgtttatgagcgagacctggagccccacagcttcggcggactcctggagggaattcgaggggcctcagggggcgccgggggcagatctttggattccaggttggagctggccagcctcggcctgggcgcccccaccccaccgtcaggcctgtctcagggccccacctcctggctccgtccaccccccacctctcctggacctcaggcccgctccttcactgggggactgggccagctggtggtgcccagcaaagccaaggcagagaaacccccactgtcggcctcctcaccccagcagcgccccccagagcctgagaccggtgagagtgcgggcacatcccgggctgccacgcccctgccctctctgagggtggaagcggaggctgggggctcaggggccaggacccctccactgtcccggaggaaagctgtagacatgcggctgcggatggagttgggtgctccagaagagatggggcaggtgcccccacttgactctcgccccagctccccagccctctacttcacccacgatgccagcctggttcacaaatctccagaccccttcggagcagtagcagctcagaagttcagcctggcccactccatgttggccatcagtggtcacctagacagcgacgatgatagtggctccggaagcctggttggcattgacaacaaaatcgagcaagccatgagagatggttgtggtcatgaagttcttccgatgggttagacgggcttggcaaaggattatttcctgggttttcttctggaggcaaaaaattaaaccaaccatctcaggacaccctgactccaagaaacactcattgaagaagatggagaagactctccaggtggttgagactttgaggttggtcgagctcccaaaagaggctaagcccaagttgggtgagtcccccgagctggcagatccctgcgtgttggccaagactacagaggagaccgaggtggagctgggccaacagggccaatccctactgcagctgccgaggacggccgtcaagtctgtctccacgctcatggtctctgccctgcagagcggctggcagatgtgcagctggaagtcatcagtgagttctgcctcagtcagctcccaagtgaggacgcagtcacctttgaagactccggaggctgagttgctgtgggaggtgtacctggtgctgtgggccgttcggaaacacctgcgccggctgtaccgcaggcaggagaggcacagacggcaccacgtccgatgccatgctgccccccgacccaacccggctcagtccctgaaactggatgcccaaagtcccctctagggggaaccccagacccttagagagtcctgacctcactcttacctggggtcccatatcagccccttcattccatgtattccagttgtaaaacaagtatcaaaatattgggaaataaatatcagatagttctga

SEQ ID NO: 1782 - protein, 338 aa, Homo sapiens
MSGGKKKSSFQITSVTTDYEGPGSPGASDPPTPQPPTGPPPRLPNGEPSPDPGGKGTPRNGSPPPGAPSSRFRVVKLPHGLGEPYRRGRWTCVDVYERDLEPHSFGGLLEGIRGASGGAGGRSLDSRLELASLGLGAPTPPSGLSQGPTSWLRPPPTSPGPQARSFTGGLGQLVVPSKAKAEKPPLSASSPQQRPPEPETGESAGTSRAATPLPSLRVEAEAGGSGARTPPLSRRKAVDMRLRMELGAPEEMGQVPPLDSRPSSPALYFTHDASLVHKSPDPFGAVAAQKFSLAHSMLAISGHLDSDDDSGSGSLVGIDNKIEQAMRDGCGHEVLPMG

SEQ ID NO: 1783 - DNA, 27274 bp, Mus musculus
aaatgatgcaaaccacccctttagggctacctgtgagagagagagcttcacccatttggcagtggaaatgatagtgggaacatggagccatggagattgggcccaagggacttgaacctttgtgtcctaatgttttgtgtttataggtgatgtcaatccttcgcagttagtctttctttttttttttttcctttttccagttttgtttttttgagacagagtttctctgtgtagccctaactgccctggaacttgctctgtagccaggcttggccttgaactcagagatccaccctcctgtgagttctgggattaaaaggcatgtgccaccactttgtggcagccatcgcttttttgaaacagtataccatgtactccaggcaggccttaaacttacagtgtaagcaaggatggctttttttggtttttgaaacaggatttttctgtgtgtagccctggctgtcctggactcactttgtagaccaggctggtctcaaactcagaaatccgcctgcctctgcctcccgagtgctgggattaaaggtgggcgccaccatgcctggtttgaggatggttttaaaattctaatcttcaaaaaaaaaaaataataattcaaatcttcctgtctctacctactatgtgccaggttagcctttctaacccttttcatctggggttttctttttctctacagagctgggtcgacgagaagactccatggacaactcgatatggctccattgcaggcctagcagagctgggacatgatgttagtctccaggaagagctgggggaggggcagttacatttggtgtaggaggagcctctggtgaccttttagcctgggattctccccttccttcccaccaggtgattaagacgctaattctgccaaggctgcagcaggaaggggaacggatccgcagtgtcttggatgggcctgtgctgagcaacatcgaccgtattggagcagaccatgtgcagagccttctcctggtgatgaaccccaccgtacccgccccttcttcccaccagccccaccctcagttgccacaagcatggctacagtgttttagcaagcacgaggcacatcttactcttttactcaagaggctagcactgttgtgtacatggaaagcaaggcacaagcagaaagccttgatagtcaataacttctggaccacactgccttcatcctgtttgcctcactctatggcttactctgcccaaggctcatgaacaccaaatatgtcatcagcaaaccctgttcatgtcagttgatccttatggaaggaaacagtcttttttttctttgggggggagtttgttgactcctatagatgtgatcttgctggatagtttggctagcctgaacttgtaaggtagacaacactagccttgtggcaatccttttacctgtcttctgtgtgctgagattataggaatgcaccaccatacccactgaaatcattcctttttatttttaagacttttttatgtttatgaatgtacaccatgggtagaggtgcccacggaagccagaggaaggtaacaaacctggaactagagtcccagatgtctgtgaataaccaccctgagggagtgttctaaacctgagttaccctccagtccccacccccattctttttgttgttatgctgctgggaattgaacttggggccatatacttgtttgcaaagcattctaccaatgacgctatattctccttggccctttttaaaaaaaaaaaaaaaaaaaaaaaaaactttgagatacgccacctgctcaggctagcctagaactccttcctgcttcagctcaagtgctgtgtccagaggccattgcttttcactgtgacttctaacagtaacactggatgggctcctctcatctttgtgggaggataccagcccttactctgccttctctacagaaacactgtgccccagtactggccaagctgcgccctccacctgacaatcaggatgcctaccggggagaatttgggtcccttgggccccttctctgttcccatgtggtgaaggccagggcccaggctgctctacaagctcagcaggtcaacaggaccacactcaccatcacacaggtcagctgctgagggaggaaatgtacccaggtttgggatagcgtttgtcatagccagcagtctcagggagctggacctctcccacgcccaatgaagagctagctacctggagtggctcaggtctgccttcaatgttaacattttcttcctgtgtctgttctcttcatagcctcggcccacactgaccctttcacaggcccctcagccaggccctcgcacgcctggcttattgaaggtccctggctccattgccttgcctgttcagacactggtgtctgcgagagctgctgctcctcctcagccttctcctcctccaaccaagtttattgtaatgtcctcatcttccagtgcctcatcaacccagcaggtatgtggagccagggtgaggggtgtgatgcccctggggaaacctccaagctgtaacctaatcccttcatgctcaaactcggacagcataagagctacttctcagtatcttagaggcctcaagctagcagcagtcttgaccatccattcactggggactacaagggaaggtgggagtggagggcatgtgtcaacagtagatacctggaaaaggattctgggggaagcaaggacaacatgaccctagaccctcctttctcgctcaggttctgtccctcagcacctcagctcctggctcaggctctactactacctctcctgtcaccaccacggttcccagcgtgcagcccatcgtcaagctggtctccactgctaccactgcacccccaagcacagcccctgctggttctggcagtgttcagaaatacattgtggtctctcttcccccaacaggggaaggcaaaggaggccctccttctcatccttctccagtccccccttcatcttcttcaccatccccacttgggggaagtaccctctgtggggggaagcaggaagctggggacagcccccctccagctccagggactccaaaggctaatggctcgcagcctactggacctggctctccccagcctgctctgtgatgtgtcacatgtgctgacctcctctcttgtgcagattcctacacactcaaacaacctgtgagggaggaaggaggaaaggttttccccagtgactttctttttagatattgtacagtaagttcctcagaataaaagttggatttgtaagtttgtgagcctcccgcatcacataaggtccgtgggaccttcctgtccaggtccaaagccacaaagaaaatgtcctcttcctgttcaactgcctgctcacattgctgtccatatccttgcttggggagcttcaaatccgaattacgtaggcgttgctgtggcttagatgtcgaacccacttgtgaggattggcattaccacaggcactaaaggacagtctgaggaatcgaacctggagaccggagcatgtgtgccgagggagttcaaaggagaggctggcaggacccagccccaagggagaaggtccatggttgggaagtccctgcaagccagggacatccatctgtaagtaaaagagtcagggaagatgtgaggctagacagctactcggcagcaggactgggctgtacaggaggtgtgtaggatcaacaaggcatacctggaaaaggccggagagttgagagcctccttgtacccggggcagatcccagtgaagggctccttctcccagctctgccttctgatctggactgctcagttcctgagacaggctggacggtagatagggaagatgctgaactaagtggccacttccttggtagagcagaggctctgcccagggagtcttcccagcgagcatgctgacctgatgacccctcggggcaggggaaggtgcagatgaatgttgagagcttggctgtaaagaggaaaggaagggtcagctccaggatggcagtgtcttacttaccctggacctttttgtttgcactgctcttgagacagtaaacagctgaggatgactttaaacttctgattctcctgcctcagcttcctccagtgctagaattacaggtgtgcaccaccacactgtttgtggtgctgcggatcaaaggcagggctctgtgtatgctaagcaaacactgcacactgatccatacctccagtctcttctctagtccttcataagagagttcagcagatgcattcccacatccaaccctttcccaaacaccacaacctctgactcaactggaatttaaagttgatggatgcaaatgactggtggttttgagatgggggtctcacttcacaaaaggtgaaccttctgtttcagtgtcccatctgctgggataacaggtacatactacacactacaaagctttagtggacccatctggaggatgagttagcaggtccttgggcctattttctgtcccgtgcagctgaactgggcttgactaactcccactttttttgtgtgttttgttttctgagacagggctttatgaagcccaacctggcctccaaactctctatgtattcgaggttggtctcgtgatcgcctgacccttctatctcccaagggctgagaaataggtatgtgccaccacgcgcaatttgaccagccccaacccttacctctttgggggcaggtcacaccgtaacttcaggtaaacctggagcctggaaagggtggcatacaattaaatcatatcctcctggcatcccatcactgctaacccagggcctccatgggaagagactgggtagattgtaccccaagaaggaaaggactgagatccatcccaacaacactagccaagactacatcgtatcatctctaccaccacccttccatagtaagccctggtacatgtaagcctcgggatggcatggagtagttctaaaacacaggaaatagtctcaccggcctgagccttggtcccactgcacagagggaaagagccggaaggggagtggtgaggggaggtcatcagagagctggtatctcatcacagtcagctgaggccagagagggacaggtcagcttggtcttacaccggtcctgcctccctccccttggtagatggaatgcaccaggaataagccctaaacctgacctcgccctgaggtggctgcaggcggaggatccgatgagactcaaactcatctagattgacagaactatggaatgacacctcatcaactcgaatccctggcccataacctgccaagagaaggagacaatgctgggcagtagtggtgcacgcctttaatcccagcacttgggtggtagaggcaggcggatttctgagttcaaggccagccagggctacacaaacacaaagaaaccctgtcttgaaaaaaacaagcaaacaaccatacacacacacacacacacacacacacatatatatatgtatatatatatacacatatatgagagagagagaggagacggttctcttgacccatatttcagaaaagagacatttccaacttctctccatattattctggagggagaaattcacgctcgccttacctctcagttctgactttccaacacaaaattcttctgtcaagccaatgcatatctctgtgggaggaaggacatgagaaaagggatagcaaataccaccatgcacatcacaaggaagcctgcgccacacctaaccattggttctcaccagaaccgctgggaaggaagctcttgagccgtatctctccttggacgtccaccttcaacaacgagccctagaggcagaaagtcaagctcagcctcccccaggtaccactgcccttcacgtccaggagtgggagcccagacttacattagatgcaatcagtacagacagtctctccaccacatccaaaaacacctcattcttttggctctaggaaagaaaggatctgagttatggagctgaaaatctgttttgttttctgggttgtttgttgtttgtttgtttgtttgttttcaagacagggtttcgaccatgtttctctgtgtaaagagccctgactgtcctggacttgctttgtagaccaggctggcctcacactcacaagagatctacctgcctctgcctctctgcctctgcctcccaagtcctaggatgaaaagcacgaacacccagcctggaaccctgtcttcaaatggacaggcaatgtcaggcatggtgatacatgcctataaactcagcacttgggaagctgaggcaggaggactgccacgagttcaagaccagcctaggttacaaggtaagagcctgggttggaggaccaaaggaaagcctatctcaaaaaaaccaaaagaacaggaactgcagagatggctcagtcaaaaaaagtgcttgtcacataaatatgacgatctgagtctgatcctcaaaatccatgtgaatgccaaggtactataggtaacctatagcctacaccagagaggtgaggatacgcagacctgaggctcattggatcagccaacccgcctagtcaatgagcttcaagctagtttcaaaggaggcggatggcgttcctgagaatgacagcaaaggcctggtcctttagcctccacacaaaagcatgctctgcacatacactcatgcctaaaataaaagaggcagcagaagggacaggagagttgaagcagagtcctgggatgggaggccaggggtaaaggaagaaatacacatcaaagggaatagaaagataatcgagtcctaggacaacaacaacaacaaaaaaccctcatcaagtctggcctcacggatccttcccttacctggtcagaacgactggacaggacagggcggctggctgcgctgcttggggccactttattctgctgtgtctctgccccgaactgcaaagcgtccaaagcaacaaaccttcagctttgatgctcacagccaaccctcctgcccctcttctttcccagctactgaccaatccaacactgctgaggtcaaagaggctgaagggcttgctgaccacagcttcagtttggatgaagttcctcagcatttctgtggatgtagtctgcacatagccataatcctaatggacagaaagagttgaaatggtgtggccgcaacctcccaaccacacactccatgaggacatttcttcatggtagcacggaataagagaatgaaattgaagtccttggagctggggagctggttcagtgggtaaaaggcttgctgagcaagtgtgtggacctgagctcagtccctgaaatgtaagtaaataagaaggtggacatgataatgagcatctataatcccagtgctcccattcagagacgagaaatagagacaggagaatcccaggaagcttgcaggctcgttagcttagtgtacgtgcactggggaacaaagggagcttgcctttcacttctctttttttttctttgttatttttatttttattttcaagacaggatttctctgtgtagccctggctgtcctaactcattctgtagatcaggctggccttgaactcaagagattcattcacctgcctcagcatcctgggtgcaccactatggctggcttctatttttattttgagacaaggtctcatgtaaccctggctggcctccaactcactatgtcgactgggaatgcctcaaaaatcaaactgatccatctgcctctggatgctggtatattaaaggcacgcaccaccatgaccagcaaaggactctgtcttgaacaaggtagaaggtcaggaccaatacccgatattgtccaacaggaaagagaaggacacacaggtggagaaacggagccagggagacagacagacatcctgtgagatagctctgctggtgcttgctatcaagcaagccaaccttagttcaatcccagggacctagacagtatgttggttgggaacacgcaaaagaaacttattttaaataaaatcatttcatttttagactccatttaatcataaggagaagctaaattcaagatcccaggctctgggggagctgaggacttcccaatagctgaacggcttctgttgtaaatagttgcctgagtccagacatctttttttttttttccccaagacaagggtttctccgtgtagccctggctgtcctggaactcactttgtagaccaggctggcctcaaactcagaaatccacctgcctctgcctcccgagtgctgggattaaaagcgtgtgccaccactgcccagctgagtccagacatcttaggaacaacttgtacagttgtctgagtcccgccatcttagggacagctggtaagagaacagctgtttgagttcagacacctcaaggacaacttctccatcttgctggcaagatcaactaagctcgtgttctcaagcccagaaaactactcctaatctgattggtcaaagttcccttgctcaaccccttatgtcaaaatatgattggacagtgctacagctcaccccactcccctccactttgtggtgtcagcctttaactgctaggcaagttcaggagtctgttctacagccctgactgatcagtactggcttgattacaatacctttttgtcatctgcattgacctagtgcttgagttatggtggatctatattggatttagcagattctacaacaagtagaagatacctgatctccacacatgtgcagtgatgtgggcaaatacacacacacacacacacacacacacacacgtgaataaataaacttaaaaagaccaaagtttttgggctttaccagcacttcatccaggagttcgtagacaagcgccacattgcgtgagatggttccctcattgagtgagccacagtagtcacccaagagagtggctagcctaaggaaacacagcaaattatgtgtgaataaacctcacacgccctccttcttaagtgcctgtcccaactctactcaccgggaaagcagctccagaaggctgaaaggagagacgttttctaaggttgtggccaccaaatagagcccactgtgtctgatgtgaataaaatgacgatcaccgtgatactgaggcagagttgaggacagaggccattaagaaaagaccagaattgtagtaaggaaacctgcaagatggcaccctgaggtctactagtgatgggcgatgccccagatctaagacctggccgcctaacgtggaaaggtagtatctacctctcaaagttgttgatagtcaaaaaatagggtgcatggctctgtaactggcttcttgttagtactcaaaacatttataaacaaatcctccccacacacacacccccgcccccaagcttcctaccaagctgcccttgacagggaggaggcactcacccacctccacagttctaaggccctgcacaccaaccacagtagttaccatgacaaccggggactcgcctccaggcagtcccgtcagcttccggtagaagagctctgccacatcacgaccaccactgtccccgcggactagccaggtggaaagatagttaaggaacaggcgacacagactgatctggattcgatttctacccagctaccctaccccgtctcccgggtcaaaggatacagtctttatagatgagcggatcccccttggaagacagaatgaagaactgggaaatcatggcggttctggaggatagacgagaacacggtgaaagttgaacccaccccgccttgtggacgcggaacaaaaggccgcacggaggctggcgctttaagaaacactcctcccacacacacactcgcgagcattaatttcgaaccgcgggaaacagggtgtccaacccgccaggatctggcaatctttcaacggcccgccctcaagccccttgtcattcaatctagactcgtccattgattggttaaagttaggggctggcagcagttgggaaccccctatctgattggcgggttctcagccgcacgggtcacatgggtgacgacgtttcgcgccaatttcggttggccggctacgtcccgccgcgcgttcgttttctgcttccccagagagagatttttgagcccttcaagtcctgccacaccgtccccggcagcgatggcgcttaaggactacgcgatcgaaaaaggtgaagatctatagggctgggggcggcgtcctcggagggaaacttctacctgcacctgttgaggggtgctggagtcttggggtcgggcgggggagggggagtgagccgggatctgtgactccgaggacaggcgaactgcgcctgcaataagcagtgggcgtcaaggatggaggaagcaatcctccttggaaaaggtgatgtgtttgtgttatggagagaacccagtggagtccacaaaggaggggcgcgctcggtagagaccgggtgacttggttcaatacattcaatacgtgacccaagggactaggttactgggccagcctctgctgctcggggcgctagcgaattcccgcgtccactggagactggccgaagtccagaggcggggcttgccagaccgctacgcgccgcgattggttgttttcggccgccctccaagcggaagtagaggcgggcggaagtggcgctacccgatcttgggactgtcgtgtgtaaacagtgtccttccgcgcggtggcctcggagatagctgcagtaggtaggggcgtgcctagaattgggaggctaagcgcccggtggcgaaaggtggcagtgtggtggacccgaatggccctttggcgttctggccaatccccgctcggccacccgtctcgggcggaggaatcctgggctgtgaggcggctggaatctgggcccatgtgcttctttgtttactaagagcggaagcagtggcgggagccgggcatgagtgcagaggaggcctagtggcggacgtcctggcgggagcctaagaaaaagagttgtactggtagagcgagagccgaggaccttaagtcgattgggagcgagctgagagaattgaagaaactgagattcctaattaagacagagtgtggaattctcttgggaaggttgggtaagactcttgtagctgcccgaagacctatattcttctctgtgtaaaaacggacttgtgaaaaggaacactgcctactttggggagaacttggtcgatttgttttcaatgttcatttaactaactagttcataggtttcgtcttaagtgaaagtgggtttcttaggtttctgttaagagtttgaaataaagaatctaaaaggaaagttgattgtttattttatttatttttacattattttgttacattattgtgtgtgtgagatcgcacgggcatatcatagtgctggacacccgcaggactctgttctcttccaacctgtgggtgggccctagggattgaactctagtccttggcagcagtggtctttacacctcactgcaaagacttggtttttattttatatttgtagaaaaagttaagaagttcctccaagagttttattacgagaatgagcttggaaagaagcagttcaagtatgggacccagttggtaagtctcaggattggttctggggagtggcgtggcgtgttaagaacttgtataaggttatctcaagtctggctatcagtgaatgacttgattctgattgtttttatacaaagttgggtttttgttttgtttttagcttaagggttttcttagatgttttagtcgtgtttattcctatgtgtttgtgctcacaggggcatgccatagcatgtgtagaggtcaaaaggacaatttgtggaagtctgttctcccaccatgtgtgttctagagagcaaattcagatcatctggctagatggctatgtctaacctgctgagccacctcatccattcctagctcttagtttttaggggtagtctttgtgtggctcagaccaccatcaagaacacgctgtgtagctacatagctgaggttggctttgagctcctcactctgttgccttctgaatcctaagtgctgggattatagacatctaccaccatgatgtactgcattctgttctttccccagtggtaggatagtgactttagaagagcttttgtgggtgaggtgaacttgaccctaaagtgttagcatctcttctttacctcaggttcatctggctcatcgggaacaagtggcactgtatgtggacctggatgacatagctgaagatgaccctgagttggtcgactcaatttgcgagaatgccaagcgctactcaagactgtttggtgatgttgtgcaagagcttttgcctgagtacaaggagaaggaggtaggtggctggtttgtttctgagctcgtctgcctcgtgccctgttttctttctctgtcctgcctctcgccttttctttcttttaggtggtgaataaggatgtcttagatgtttacattgaacaccggctgatgatggagcagcgaagcagagaccctggggcagtccggaacccccaaaaccagtatccttctgaactcatgcgaagattgtgagtatctctgtgggaaagggcggggacttgctctccggggacttgctgacaaatgtttctcttttagtgagttgtatttccgaggcccaagtagcagcaagcctcgagtgatccgggaagtacgagctgactctgtggggaaattgttaactgtgcgtggcattgtcactcgtgtgtctgaagtcaagcccaggatggtggtggccacatacacttgtgatcagtgtggggcagagacctaccagccagtacgtatacaattctatgatggtgatttgatacctcgggtcgttttgactgataatatttcaaggaggtcttaatccttattttaaaagacacagagcagagatggttactgtggtgattgtaagacttcctgttttccttgtttgtagatccagtctcccactttcatgcctctgatcatgtgccccagccaggagtgccagaccaatcgctcaggggggcggctgtacctacagactcgtggctccaaatttgttaaattccaggaaatgaagattcaagagcatgtgagtttaggggatatgagtcctgcagctggttatgaaattataggaagaaagattgggagagaggtttacctagaatttttttatatttgctcttagtcagaaaatcgggaggtgatttaattgaagtttttttctggttctattgggaggaggataagaagaactcagcttccttcctgaagtcatctaggttgggatgactgaatcttaccatcaaatgggcatcttctggggtggtggtcagttgggtcaggtctgcctcgcttttctccttgtctcatgtgctctgtgtcatgccctcccccacacctcccaatctcctagagtgaccaagttcctgtgggaaacatccctcgtagcatcacagtggttctagaaggtgagaacacaagaattgcccagcctggtgaccatgtcagcgtcactggcatcttcttgccagtcctgcgcacagggttccaacagatggcacaggtgagggcgttttgaatgaggaaatagctgccttgcctcctcatccacccactcactcttcacacccttagaaaatgaaaatcagtgaggtggaacttgtggataaaaaattctcagggactctggtgatggggactttaaagggaactcttgtgtccagggcttactctcagaaacttacctggaagcccactggattgtgaagatgacaaagagtgacgatgatgtctctggggccggagagctgagctcagaggagctgaagcagattgcaggtgagggaccacgagctcaagttgagagttgagctccatcctagattttgtcctgaaggaaatgctatggcttaattttttgcagaggaggatttctatgagaagctggccgcttctattgctccggagatctatggacatgaagatgtgaagaaggcgctgctgctgcttctggtgggtggtgtggaccagtctcctcaaggcatgaagatcagaggtaagaaggacaagagacttaggagggagggtaaaaaaacatcccacgagagtctgtaaatgacaagagttgatgatttaccttagtggttgttgtgtcttagaagtagtctggactttaagaagggaccaggtctcaagtgctcttctctgttggtggacaacttgggtaaagagtatcactcaggcttccttctcatttgccaggaaacatccacatctgccttatgggagaccctggtgtggccaaatctcagctcctatcttacatcgaccgtctggcaccgcgaagtgagtgtgaacagggatgaggcttggtgtttggttgataaacactaaggcctctggaaggcctggggaaagcggttcctttcttcagcagtttgctctttatctttgcaggtcagtacacaacaggccgtggctcctctggtgtagggctcacagcagctgtgttgagagactctgtgagtggagaactgactttagagggcggtgccctggtgctggctgaccagggcgtgtgctgcattgatgagtttgacaagatggccgaggctgaccgcacagccatccatgaggttatggagcagcagaccatctccatcgccaaggcggggattctcaccacgctcaatgcccgatgctccatcctggctgcggccaatcctgcctacggccgatataatccccgccgcagtctggagcagaacgtccagcttccggctgctctgctttctcgattcgacctcctctggctgattcaagaccggcccgacagagacaatgacctccggtgaatgaagtagatgacacccatagagacagcccattttagtgactttggggcagggaggtaaaatcagaaagccactcaacttgtctgtgtgcagacaccttaaacacctttccttgtttgcagttcatatggagataggttggagctaagatcttgagggttttctgggaggcctgtctgccatgctttggagaagaggtggtgctaaaaggggatactgagtcaagattctcagggtgttagagctctaaagactgacgcccgtcttctctccaggttggcccagcacatcacctatgtccaccagcacagccggcagccccctgcccaatttgaacctttggacatgaaacttatgaggtaggaggggtggagatgggtatgtctggggagagtactggtctgtggcattgtcttatgccaagtgtgtctggaaagcattgagtcttgaaaggactcatctgcttatctatttcagcctcaaaagtagctgagcctgggtctctctgtagccaagggatcatcagaaactttttttctgttttgggatgacagagcagcaggccttatataatcctagctactctgaaacctgagtcattttggggatgtctccaaaaactacttccctcctgtatataaaggaacctctctcactctctaaatcctgtccgaggcaggtctagctttttggccataagtgcttccatggctcagatgactcgggtttctaaactggttttcacatggtctctgaagtctgtcaaggggttaagttaaatcctcccactacaggtgctttggtaaatgtcattctcctgaaaagttggaagttacttgaagtgtcctggcagccctgttttggagaaatccctcactgtccacgtcagcatagaatattaagtggggaatctcataaagcctgcctgctttcccgctttcccatgaaccttgtttcccacagacggtacatagccatgtgccacgagagacagcccacagtgcctgaatctctggctgactacatcaccgcagcatatgtggagatgaggcgagaggcccgggccagtaaggatgccacctatacttctgcccggaccctgctggccattctccgactttccactgctctggtgagtggtgggtccctgtcagctggaaagctgacccctgcctgccacctcacctaatgaccctcaagccgcctccttccctcctaccagccctgctgggactaaagtgctgacagtgcagatagtggtcctctctgtgctaccgcactgtgggtacttgctgctccagcagggcacgtgcaacgcccatggagggaaaggctgcttgctgcttgaatccatgagggctaggacttgaattcctggtgtcctagatatgatcttagaaatctccattctgtcctcccctcttggaccttagtcatgggggctccaaagtgctgttcgtgcaggtagtgtaattacctgacctactgctgagctagcacttcccgagcccccaggacacaacctctgatagtggccctagctgagcgccccaggctccatttgtttgatggggagcctagtggagttcagaagggtctggtctccctcacaggacagctgaacacccaccgggactggccagtgttgagaggcggagacttgggcaattgctggacgctgccctgggcattgcacttgtctcggtctgacagtgccggcccaacactgcagatgtgggggggcagggaggagtccccatttttgttcaatgagtaggcaaatgtggcttgcccaggcttgaagctggagcaaagaaagatccttgacttcattcccctcctcccctcctatcccaatcttttctatgccttccccttaggctcgacttcggatggtagacattgtggagaaggaagatgtaaatgaagccataaggttgatggagatgtcgaaggactcccttctaggtgaaaagggacagacagctaggtgaggattttaatgaagagtgagactggaccactgggcttattgacctggcttgccctcagggttttgatgctgattgctgctactgtttgtggccttgcaccttcaccttttccatccttgtcttttaggacccagaggccagcagatgtgatatttgccaccatccgtgaattggtgtcacgggggcggagtgtccacttttctgaggctgaacagcgctgcatatctcgtggcttcacaccagcccagttccaggcagctctggatgaatatgaggagctaaatgtctggcaggttaatacttctcggacacggatcacctttgtctgatagccagtttttacaccctcctgcctacaccagagggcatgctgaatgccccctcaagaaaaaatctcattctcccatgctgcacttttttattctgccaataaagtgttttgattgcctcttgcttgttaataactctgtagagtttttagtatgctctctcctcccctagtctctagtactgacccttactatgtgctagtcaatctgggagatagaaggccttgggaccactgtttcttgagatgcttccaattatggacatttcgtttgttagacccccacatctagacgtgatgacaccaggatgtgaagggcagaaagttgcgcctagcacaaggtatgacttaagtggaaggcctaaggatgaggtacatatcaccctcctaggtaccttcaggatatagaaaaacaaggacttgagataaccacaattacaaagatggaattcagcttccctccccttcctatttgagaaacatttgcagtgaaattaaattagcctgggaaagcaatctttctgtggagctgtgacatgaattgatcacagagcacaaaaactggaagcaagcaggtcgtcctatcacattttgtctacttcaacaaggggtcacctcgagtcattaaaaggtgggtaggtggtcaaaaaatgtggattaatgggtgaagcttccttaagagtccatgttgagaaaccagtgtggtgcctgagaggacaaagccactggaagggctgctaaggggctgctcttttattaatgagtttctctaaagggaatgtggtactcaggtccatggaacagctgtctgagccccacacaccatcccttccagaaccatcatcagaaaaacagtccccgcattcgccggccaatgccttgtcggtcgtagaggacgttgaacttgttcacaaactggttcattgtgttgcacgttttggtgatggtgccgaggtaggccatgagccccacgtcattgcattgctgggagggaacacaaagaaccagttccccaggggtccctcgtattagccagtgacacttgagtttcacctcctacctgtgaggtggtgtgagccccacctccccatcaaaggtgtcaacactcacatcataaaagtctgtcttgaacttgtcagtgctgagaactggaagacagtgacatagggcataggcctcccgcaggatctcatggttgaagggaacctctcctaaggacacaaggaggctgcactgatgtggatgctgtcacttttccaggagaggaaaaatgtttcaaagtgacaggcacctctcctacctgcttcagaggccttgacatattctaaaatgagcttcacacggctgtgcagcatcttgatggcactatgctgagctatcaggtgttcagccactgcaggggaatggggcaaatgaagggcggcctgtggccacacccaacccctacctccaaagactgaattcccctcccttaccagtggagttctccccactgcctgttgctgtcatccgggccacgtggtctacaccgatccgttcagcttcctcagtggccagagtgtaagtgagctcagcaaacagcattgtggcctgcagagtaaagagttctcagatagggagagtcaggaaacagacctaggcctaggcagatggctcagcaggtagagtacttgctgcacaactgaggatctcaatttagagcctcggaacccacattaagtgagatgtgacagcatgtgactgtaatcctggaacccctacagcaagatgggaagtggagacacaattcccagaagctcacaggccaacctgcctggcaaacaagtgagtctgtcccaaggtagaaagctaggatggacacccagggttgtcctatgcctgcacacggcatgcaggaaacaggctaaaaggtttgaaggttgcaggttatatattacctctccattgattatatcgatgacagactcaaaaacgctgacaggaagctgtaaaaacacagacggagacaagagaacagctcttactaaaagcaaatgcacttgaacttacacacatgccaggctggctttgaactcacaatcctgcctcaatctcctgagtgctaagattggttacaagtgttgtcaccacacttggctcatgctttctctaggttttacacacattacatatggaaacaccactgaagagatgaagtcacacaactgatgggtgtaaacagcagggtagagattcaactcaagctttctctaatacacataatgtcggtaaattagagcaaaggcatagtggcagatgatcaagaaaaaggggacattgggtcaacaacactcacatctgtgtgcttggtcatagggttcaacttcagaaagagcggactctcaattatctcacacacctagaagataaggcaaagcccaggaagagtcagtatctcctcttcccctaaccttctgttcatttccccaacatgcacatatttgagcttctatacctgcttatggacgtggatgtctgaggggtcaggtggcccccctgtggtataccaacccagaaactccagctccttgaaaacctgtttaactggagaagaaggggccagagtaaatattcctttaaacctctcttccttagtttgatgggcctggtgtgttctttccggttctcccctccctcctcatattttgggtcagtttaaaataactacacctaactaaccttgaacttctgacctcttgcctctatctcctgggttatatggtactgaggattgaactctggtcttcccgaatgttaggaaatgcactttaccccactgccctacatcctcaggccttttattctttaagacaaacaaaacaaaacaaaaatcttcccacttttccttccccacccacttctattcccctctcacactgctcctccttggtgtaataatattctttgtcaatgataatcttctcttccacggtgtgggacagcagctcaaaggagttcatcacttcgatatttcgcccctcctgcttcccgatcagagccccaatcactaaggggagagaaacagaagcgcaaggaaactaggtgaggaacaggcgtctcggaaaacctttcccgagtcggcgtgaatcaacgactggggaaacaataatttggaagaaagggcgcaggggagtgactggaggaaatctccaagagattttgagatttacacacaacactcaccctgcataggccgcccctcctgggagcgcatgcggatccaatggtctgagatgttaaggatgacaaggggatgaagagcgacggaaacactcccagtcactccggaggccatcacgctggggactgttaaaggtgaaaggaaaacatagcggctgagagctcgggcccacacattttcccctagacatggaagcaggggaccagcagagcccggccgtccatcgctgccctcaagttatcctgggacaggtttaagaagtactcaagaccacttctcaagggcaactccagaagtcggtctgcgcaccccgttacctgctgcatccacttccatgccgctgctgcctccgctcccattcgcccccgccgcagctgccgccgccattttccccgcgcccgccagccacggcccgcccctttccttctcggcttccgtcggggagcggtgcatgctcagtgtatacttggtgctgctaatgggcggggcagctgccagtacttagtagctcagggtgctctgcgtgttgtgctgctgctagcggttctcatgtaaaccagcctggccatgagttctgtagtgtgtatctgaagatggctttgaactttgatcctcttgcctttacctcccaaggagggctattagtttccaggtctcaagtggatacactgtcaatactaaacacagagaaaattgcgatcaaaaggaggaaaggctgtaaaagggaatggggaagacaatttattcaggatataaaatttttcatgttgcatataatctatagagacttgatcacttgtttgttgagatagggtcttacaatgttggccagctggtgggaacttgctattcgtctaggcagacttctaggagatccgccttcctctccttcctgaatgctgagattaaaggtgtgtaccatacccagcatgcctagcttttaaaacgatgtactgaggatctaaactcaggtcctaacacttcatcccctgagccatctccccagtagtaattactcttgaattgttcagcttcttcagtttcaagacaacctctttacacaacttagcaactgctattgggagggcttgtggcccacgcctttaatcacagcctttaatcgaggcgggcagacctcatgagttcaaggccagcctggactacaaagtgagttccatcacagccaaagctacacaaacaaaccctgtcgcacaaacaaaaaaaaaaaggtggggggaggggaagagttgccttggtcatggtgtctctttacagcaatagaacagtgattaagacaattacttgtaacaaaaaagaaaaccaaaaaaaaaaaaaaaaaaaaaagacaattacttgcccagcatggtggcacacgcctttaatcccagcacttgggaggcagaggcaggcggatttctgagttcgaggccagcctggtctacagagtgagttccaaaataaaaaaaataaaaataaaaataaaaataaaagaaaacgtttcctacttggacaataactaaggctaagcgacctgcttaaatagccaagaaagagtatttggtccacaatcattcatttggggccaataacagccatttttttaaatttttattttggtttttcgagacagggtttctctgtatagccctggctgtcctggaactcactttgtagaccaggctggccttgaactcagaaatctgccaagtgctgggattaaaggtgtgcgccaccaccgcccgggctactttttatttttatttatttattttttttactaatcacagtcactgaagtatgtgctttggaccaatcatggctttgcactgattcgcagtagtccttccactagggaaagggctcccttcctgtcacgctggaaatgctttcaggttcatctacatttcataggggtctatgacagcaaaatatctggtaacaactatgtcaaatacactggaaaatcagcttcaatctttacacagctgtctcaagacttctgttgtgtgtcccagattgctggtgctagtctaagggtcatctagctaacttatgagactgacagtccttttcctcagggcagcctggacagtgagagagatgggtacaatagatgataattagatagttaagttgccctattcccaatgtctttggttagttacatgaaaataaaccttgggagtttttatactataaacctaaagagatttccattagaggaaaaactgaaggaagggaaggtcatcattagtgctaacagcaatttaacaatattcttaaaacactcaacccctgtctagagctcaaggaaagctgggttcccttcatctgtcttggaatgattttttttttttttttgcagattttaataatgtattaaaaagtcaggcagtggtggaacacacctgtagtcctaatactccggaggcagaggcaggcagatctctggagtttgaggccagcctggtctacaaaccaaatgccagaacagccagggctacacagagaaaccctgtgtactggctgattttatgtgtcaacttgactcaggctggggttatcacagagaaagagcttcagttggggaagtacctccatgagatccagctgtgggatattttctcaattagtgatcaagggggaaaggccccttgtgggtgggaccatctctgggctggaagtcttgggttctataagagagcaggctgagcaagccaggagaagcaagccagtaaagaacatccctccatggcctctgcatcggctcctgcttcctgacctgcttgagttccagtcctgacctcctttggtgatgaacagcaatgtggaagtgtaagctgaataaaccctttcctccccaacttacttcttggtcatgatgtttgtgcaggaatagaaaccctgactaagacaccctgcctcgaaaaacaaaacaagctgggtgtggtggggcacacctttaatcccagcacttgggaggcagaggcaggaggatttctgagttcgaggccagcctagtctacagagtgagttccaggacagccagggctacacagagaaaccctgtctcgaaaaacaaacaaacaaacaaacaaacaaacaaacaaaacgaatgaaagaaagaaaaacaaaacaataatagtgtatagaagaacacctttgttttttactctattttgagtgtgtaagtgtgtgtgtatgtgtgtgtataatgtgcataccccagcataggtcagaggacagctagagtttcagaatgataccctgtttaattaattaattgactaagtaaaagagtctattggaacatgttaggcttgggcttaggactagtcaggctatactgacttgcagagcctctttcttcatcctcacagcttctgcaaaaaataaaaaataaactctgaccagtctgcaatcctcacttcccctaaggcggtgcaccaaaccccagcaatcggcggttacaggcggcacatctcatatgatagacacgcattagctaaagaaacaaacttttcctctttcccttggagctagagtcataggtggttgtgagtgtacagacatgggtactgggaaatgaactccagtcctggaataagagtgcgtgcctctatcgtgtactattgactagtcattcatgacatggaatggggttacctacctctctaaaacctgtaagatgcaatagtactccttactcctgttagtctcccggcctgaaatctcttcacaacttccagcacaatctctgtagcattaataatgcttaaaataaattgtttacccccaaaccacaatatgtctcagggtacctcttgaaccccaaatgtgagcctttataggaagctcattttaaatatgtgtttgttaattattatcatttgttttgagaccgagttttagtgtgcaattgaggctggcctcaaacttttgactatctttctgtttcaggctctaaagtactgcaattacagatgtgtaccccacgtcaggctcgtaagtgcagaatcacttatgtgtctcatgtagcccaagctggctttgaactcagtatgtactgaagaacgaacttgagtccttgatcttcctgccaccacctcccaaatgctaggaatacagtactgtaccatattgtctggtttatgcaccattggggatggggacccagggcttcagccaggctagtcaagcaatctaaaagcaaagctgtgggctggagagatggctcagtggttaagagcactgactgctctttcgaagatcctgagttcaaatcccagcaaccacatggtggctcacaaccatctgtaatgagatctgacgccctcttctggggcatctgaagacagctacagtgtacttagatataataataataataagtaaatctttaaaaaaaaaaaaagtactggctgctcttccagaggacccagattccatgcactcatatggccactcattaccgtaactccagttccagaagatgtgatggcttcatctgacctatatctgaatcaggtgtgtgtgtatgtgtgtgtgtatgcaggagaaaaacactcattaaaatactaaatcttcaaataaatattaaatctattaaaataattttttgtcttgctttttttgagacagggtttctctatgtagccctggctgtctggaactcactctgtgaccagcctggcctcgaactcagaaatctacctgcctctgtctcccaagtgctgggattaaaggcgtgcaccaccactgcctggttaaaataaatcttttaaaaactgagtgctgagtgctttaaaaaaaaacccatggtgctattttggatataatatcattagcaccaacataaattccaaattttaaaaatataactattatacttatcaagcagtggagaaatcatgttaaaaaggtaatccttttttctactataagaagttttgaaataaaatattttcttaattagtgagaatgttcaaaataattaaagaaaaattgatgagtaaaaaaaaaaaaacaaaaaaacaaaaaaaaaaaaaaaacaaaaacgggggctggagacatggctcagtggttaagagcactgactgctcttccggaggtcctgtgttcaaatcccagcaaccacatggtggctcaaaaccatctgtaacaagacctgactccctcttctggtatctgaagacagctacagtgtacttacatataataaataaaataaatcttaaaaaaaaaaaaaccagaaaaacaaaacaaaaaccaaaacccatggtgcacttttatttatttatttttttgtttgtttgttttgttttgtatcataggccaggctggcctcacagagatctgcctgactgtgcttccccagcgctgggattaaaggcgtgcgccatcacgaccagccaatggtgcacatttatattaaaggattcttcaagtttcatatatttgctatggaggtgatggtgtactctctctcttgctatggaggtgatggtgtactctctctctcagagccactagaacttgtgccctgaatttcctggacctccaacttcttcagcttacgcatcgtcccttcccaacctggccagcaagtggcgcagtctggtgcccttgtttcccagcaccatcgagaacagcaccatcagcgtaccatcgagagatgaagacctcccattttcctagagagagcaagtgggcatttgttgtcctgggtggtgagaaaggacgacccggaaacgatatggggaggggcagtttccgttctttgttctgttctccgttgtgtgggtctgtaacagggtccaacaggacctgtttcgtgtccggccccctaagtcttacgtccctgtccccagggtgagtggggccatctcccggactcgcggtgaggtggaagttgtggtctccggggaagggggttggtgttcacacgtccgcggcccgccggggttctgggcccaccttcctcctgcagtcgctgtccagctccgcaaccctagctgcaggcgcgcagcgtgatcccgggtgtcgcgtaatgggactccgggtctgcttttgtgtctcttaccgtccccagccccagtgtttaaaattcctagcgtcgctacggaggtctccctctctttaaaacaactgatgacagattgccaccctaacttggtactctcagcacaccgatttctgtgtgagggcaggagaaggaagtttttccttaattggatcggaaaaccagacagtagttctgggtcgcagtgagaactagggcttgggaggaggtgcgaactcgggtcctccgtaacctcaccaagatctcatgtcctatggctatgaatagggtttttttgttttgttttttgtttttttttttaagcttactgactgataccttttcgtggacatgctggggccggctccctgcagaagtggccgagtatgtccagtgcattagctggctaaaacattgagaacctagttgaacacagagaaccttagtccatttcagctctcttagggtgtactgaaaagacagtatgtgatggtctttgctggtagttcctagcacattcctttaccctccgtacttcttaagtacctatattagacataaactgaacccgatttccccattttgaccccttaatcatacagaactggtagaacctaaaacagaaattctcaaccttcctcatgctatgaccttttaatgcagtttctcatgtgatgacccccaaccgtaaagttattattgtcactacttcataaccgtattttttttgctactgataagaacagtaatgtaaatatctgtgttttccaatagtcttaggtaacccctgtgaaagagtcattcaactttcaaaggggtcacgacctacaagtttgagaaacaatgacct

SEQ ID NO: 1784 - DNA, 2396 bp, Mus musculus
cgccaatttcggttggccggctacgtcccgccgcgcgttcgttttctgcttccccagagagagatttttgagcccttcaagtcctgccacaccgtccccggcagcgatggcgcttaaggactacgcgatcgaaaaagaaaaagttaagaagttcctccaagagttttattacgagaatgagcttggaaagaagcagttcaagtatgggacccagttggttcatctggctcatcgggaacaagtggcactgtatgtggacctggatgacatagctgaagatgaccctgagttggtcgactcaatttgcgagaatgccaagcgctactcaagactgtttggtgatgttgtgcaagagcttttgcctgagtacaaggagaaggaggtggtgaataaggatgtcttagatgtttacattgaacaccggctgatgatggagcagcgaagcagagaccctggggcagtccggaacccccaaaaccagtatccttctgaactcatgcgaagatttgagttgtatttccgaggcccaagtagcagcaagcctcgagtgatccgggaagtacgagctgactctgtggggaaattgttaactgtgcgtggcattgtcactcgtgtgtctgaagtcaagcccaggatggtggtggccacatacacttgtgatcagtgtggggcagagacctaccagccaatccagtctcccactttcatgcctctgatcatgtgccccagccaggagtgccagaccaatcgctcaggggggcggctgtacctacagactcgtggctccaaatttgttaaattccaggaaatgaagattcaagagcatagtgaccaagttcctgtgggaaacatccctcgtagcatcacagtggttctagaaggtgagaacacaagaattgcccagcctggtgaccatgtcagcgtcactggcatcttcttgccagtcctgcgcacagggttccaacagatggcacagggcttactctcagaaacttacctggaagcccactggattgtgaagatgacaaagagtgacgatgatgtctctggggccggagagctgagctcagaggagctgaagcagattgcagaggaggatttctatgagaagctggccgcttctattgctccggagatctatggacatgaagatgtgaagaaggcgctgctgctgcttctggtgggtggtgtggaccagtctcctcaaggcatgaagatcagaggaaacatccacatctgccttatgggagaccctggtgtggccaaatctcagctcctatcttacatcgaccgtctggcaccgcgaagtcagtacacaacaggccgtggctcctctggtgtagggctcacagcagctgtgttgagagactctgtgagtggagaactgactttagagggcggtgccctggtgctggctgaccagggcgtgtgctgcattgatgagtttgacaagatggccgaggctgaccgcacagccatccatgaggttatggagcagcagaccatctccatcgccaaggcggggattctcaccacgctcaatgcccgatgctccatcctggctgcggccaatcctgcctacggccgatataatccccgccgcagtctggagcagaacgtccagcttccggctgctctgctttctcgattcgacctcctctggctgattcaagaccggcccgacagagacaatgacctccggttggcccagcacatcacctatgtccaccagcacagccggcagccccctgcccaatttgaacctttggacatgaaacttatgagacggtacatagccatgtgccacgagagacagcccacagtgcctgaatctctggctgactacatcaccgcagcatatgtggagatgaggcgagaggcccgggccagtaaggatgccacctatacttctgcccggaccctgctggccattctccgactttccactgctctggctcgacttcggatggtagacattgtggagaaggaagatgtaaatgaagccataaggttgatggagatgtcgaaggactcccttctaggtgaaaagggacagacagctaggacccagaggccagcagatgtgatatttgccaccatccgtgaattggtgtcacgggggcggagtgtccacttttctgaggctgaacagcgctgcatatctcgtggcttcacaccagcccagttccaggcagctctggatgaatatgaggagctaaatgtctggcaggttaatacttctcggacacggatcacctttgtctgatagccagtttttacaccctcctgcctacaccagagggcatgctgaatgccccctcaagaaaaaatctcattctcccatgctgcacttttttattctgccaataaagtgttttgattgcctcttgcttgtt

SEQ ID NO: 1785 - protein, 715 aa, Mus musculus
MALKDYAIEKEKVKKFLQEFYYENELGKKQFKYGTQLVHLAHREQVYVDLDDIAEDDPELVDSICENAKRYSRLFGDVVQELLPEYKEKEVVNKDVLDVYIEHRLMMEQRSRDPGAVRNPQNQYPSELMRRFELYFRGPSSSKPRVIREVRADSVGKLLTVRGIVTRVSEVKPRMVVATYTCDQCGAETYQPIQSPTFMPLIMCPSQECQTNRSGGRLYLQTRGSKFVKFQEMKIQEHSDQVPVGNIPRSITVVLEGENTRIAQPGDHVSVTGIFLPVLRTGFQQMAQGLLSETYLEAHWIVKMTKSDDDVSGAGELSSEELKQIAEEDFYEKLAASIAPEIYGHEDVKKALLLLLVGGVDQSPQGMKIRGNIHICLMGDPGVAKSQLLSYIDRLAPRSQYTTGRGSSGVGLTAAVLRDSVSGELTLEGGALVLADQGVCCIDEFDKMAEADRTAIHEVMEQQTISIAKAGILTTLNARCSILAAANPAYGRYNPRRSLEQNVQLPAALLSRFDLLWLIQDRPDRDNDLRLAQHITYVHQHSRQPPAQFEPLDMKLMRRYIAMCHERQPTVPESLADYITAAYVEMRREARASKDATYTSARTLLAILRLSTARLRMVDIVEKEDVNEAIRLMEMSKDSLLGEKGQTARTQRPADVIFATIRELVSRGRSVHFSEAEQRCISRGFTPAQFQAALDEYEELNVWQVNTSRTRITFV

SEQ ID NO: 1786 - DNA, 2442 bp, Mus musculus
gggagccgggcatgagtgcagaggaggcctagtggcggacgtcctggcgggagcctaagaaaaagagttgtactggtagagcgagagccgaggaccttaagtcgattgggagcgagctgagagaattgaagaaactgagattcctaattaagacagagtgtggaattctcttgggaaggttggaaaaagttaagaagttcctccaagagttttattacgagaatgagcttggaaagaagcagttcaagtatgggacccagttggttcatctggctcatcgggaacaagtggcactgtatgtggacctggatgacatagctgaagatgaccctgagttggtcgactcaatttgcgagaatgccaagcgctactcaagactgtttggtgatgttgtgcaagagcttttgcctgagtacaaggagaaggaggtggtgaataaggatgtcttagatgtttacattgaacaccggctgatgatggagcagcgaagcagagaccctggggcagtccggaacccccaaaaccagtatccttctgaactcatgcgaagatttgagttgtatttccgaggcccaagtagcagcaagcctcgagtgatccgggaagtacgagctgactctgtggggaaattgttaactgtgcgtggcattgtcactcgtgtgtctgaagtcaagcccaggatggtggtggccacatacacttgtgatcagtgtggggcagagacctaccagccaatccagtctcccactttcatgcctctgatcatgtgccccagccaggagtgccagaccaatcgctcaggggggcggctgtacctacagactcgtggctccaaatttgttaaattccaggaaatgaagattcaagagcatagtgaccaagttcctgtgggaaacatccctcgtagcatcacagtggttctagaaggtgagaacacaagaattgcccagcctggtgaccatgtcagcgtcactggcatcttcttgccagtcctgcgcacagggttccaacagatggcacagggcttactctcagaaacttacctggaagcccactggattgtgaagatgacaaagagtgacgatgatgtctctggggccggagagctgagctcagaggagctgaagcagattgcagaggaggatttctatgagaagctggccgcttctattgctccggagatctatggacatgaagatgtgaagaaggcgctgctgctgcttctggtgggtggtgtggaccagtctcctcaaggcatgaagatcagaggaaacatccacatctgccttatgggagaccctggtgtggccaaatctcagctcctatcttacatcgaccgtctggcaccgcgaagtcagtacacaacaggccgtggctcctctggtgtagggctcacagcagctgtgttgagagactctgtgagtggagaactgactttagagggcggtgccctggtgctggctgaccagggcgtgtgctgcattgatgagtttgacaagatggccgaggctgaccgcacagccatccatgaggttatggagcagcagaccatctccatcgccaaggcggggattctcaccacgctcaatgcccgatgctccatcctggctgcggccaatcctgcctacggccgatataatccccgccgcagtctggagcagaacgtccagcttccggctgctctgctttctcgattcgacctcctctggctgattcaagaccggcccgacagagacaatgacctccggttggcccagcacatcacctatgtccaccagcacagccggcagccccctgcccaatttgaacctttggacatgaaacttatgagacggtacatagccatgtgccacgagagacagcccacagtgcctgaatctctggctgactacatcaccgcagcatatgtggagatgaggcgagaggcccgggccagtaaggatgccacctatacttctgcccggaccctgctggccattctccgactttccactgctctggctcgacttcggatggtagacattgtggagaaggaagatgtaaatgaagccataaggttgatggagatgtcgaaggactcccttctaggtgaaaagggacagacagctaggacccagaggccagcagatgtgatatttgccaccatccgtgaattggtgtcacgggggcggagtgtccacttttctgaggctgaacagcgctgcatatctcgtggcttcacaccagcccagttccaggcagctctggatgaatatgaggagctaaatgtctggcaggttaatacttctcggacacggatcacctttgtctgatagccagtttttacaccctcctgcctacaccagagggcatgctgaatgccccctcaagaaaaaatctcattctcccatgctgcacttttttattctgccaataaagtgttttgattgcctcttgcttgtt

SEQ ID NO: 1787 - protein, 610 aa, Mus musculus
MMEQRSRDPGAVRNPQNQYPSELMRRFELYFRGPSSSKPRVIREVRADSVGKLLTVRGIVTRVSEVKPRMVVATYTCDQCGAETYQPIQSPTFMPLIMCPSQECQTNRSGGRLYLQTRGSKFVKFQEMKIQEHSDQVPVGNIPRSITVVLEGENTRIAQPGDHVSVTGIFLPVLRTGFQQMAQGLLSETYLEAHWIVKMTKSDDDVSGAGELSSEELKQIAEEDFYEKLAASIAPEIYGHEDVKKALLLLLVGGVDQSPQGMKIRGNIHICLMGDPGVAKSQLLSYIDRLAPRSQYTTGRGSSGVGLTAAVLRDSVSGELTLEGGALVLADQGVCCIDEFDKMAEADRTAIHEVMEQQTISIAKAGILTTLNARCSILAAANPAYGRYNPRRSLEQNVQLPAALLSRFDLLWLIQDRPDRDNDLRLAQHITYVHQHSRQPPAQFEPLDMKLMRRYIAMCHERQPTVPESLADYITAAYVEMRREARASKDATYTSARTLLAILRLSTARLRMVDIVEKEDVNEAIRLMEMSKDSLLGEKGQTARTQRPADVIFATIRELVSRGRSVHFSEAEQRCISRGFTPAQFQAALDEYEELNVWQVNTSRTRITFV

SEQ ID NO: 1788 - DNA, 2326 bp, Mus musculus
cgatcttgggactgtcgtgtgtaaacagtgtccttccgcgcggtggcctcggagatagctgcagtagaaaaagttaagaagttcctccaagagttttattacgagaatgagcttggaaagaagcagttcaagtatgggacccagttggttcatctggctcatcgggaacaagtggcactgtatgtggacctggatgacatagctgaagatgaccctgagttggtcgactcaatttgcgagaatgccaagcgctactcaagactgtttggtgatgttgtgcaagagcttttgcctgagtacaaggagaaggaggtggtgaataaggatgtcttagatgtttacattgaacaccggctgatgatggagcagcgaagcagagaccctggggcagtccggaacccccaaaaccagtatccttctgaactcatgcgaagatttgagttgtatttccgaggcccaagtagcagcaagcctcgagtgatccgggaagtacgagctgactctgtggggaaattgttaactgtgcgtggcattgtcactcgtgtgtctgaagtcaagcccaggatggtggtggccacatacacttgtgatcagtgtggggcagagacctaccagccaatccagtctcccactttcatgcctctgatcatgtgccccagccaggagtgccagaccaatcgctcaggggggcggctgtacctacagactcgtggctccaaatttgttaaattccaggaaatgaagattcaagagcatagtgaccaagttcctgtgggaaacatccctcgtagcatcacagtggttctagaaggtgagaacacaagaattgcccagcctggtgaccatgtcagcgtcactggcatcttcttgccagtcctgcgcacagggttccaacagatggcacagggcttactctcagaaacttacctggaagcccactggattgtgaagatgacaaagagtgacgatgatgtctctggggccggagagctgagctcagaggagctgaagcagattgcagaggaggatttctatgagaagctggccgcttctattgctccggagatctatggacatgaagatgtgaagaaggcgctgctgctgcttctggtgggtggtgtggaccagtctcctcaaggcatgaagatcagaggaaacatccacatctgccttatgggagaccctggtgtggccaaatctcagctcctatcttacatcgaccgtctggcaccgcgaagtcagtacacaacaggccgtggctcctctggtgtagggctcacagcagctgtgttgagagactctgtgagtggagaactgactttagagggcggtgccctggtgctggctgaccagggcgtgtgctgcattgatgagtttgacaagatggccgaggctgaccgcacagccatccatgaggttatggagcagcagaccatctccatcgccaaggcggggattctcaccacgctcaatgcccgatgctccatcctggctgcggccaatcctgcctacggccgatataatccccgccgcagtctggagcagaacgtccagcttccggctgctctgctttctcgattcgacctcctctggctgattcaagaccggcccgacagagacaatgacctccggttggcccagcacatcacctatgtccaccagcacagccggcagccccctgcccaatttgaacctttggacatgaaacttatgagacggtacatagccatgtgccacgagagacagcccacagtgcctgaatctctggctgactacatcaccgcagcatatgtggagatgaggcgagaggcccgggccagtaaggatgccacctatacttctgcccggaccctgctggccattctccgactttccactgctctggctcgacttcggatggtagacattgtggagaaggaagatgtaaatgaagccataaggttgatggagatgtcgaaggactcccttctaggtgaaaagggacagacagctaggacccagaggccagcagatgtgatatttgccaccatccgtgaattggtgtcacgggggcggagtgtccacttttctgaggctgaacagcgctgcatatctcgtggcttcacaccagcccagttccaggcagctctggatgaatatgaggagctaaatgtctggcaggttaatacttctcggacacggatcacctttgtctgatagccagtttttacaccctcctgcctacaccagagggcatgctgaatgccccctcaagaaaaaatctcattctcccatgctgcacttttttattctgccaataaagtgttttgattgcctcttgcttgtt

SEQ ID NO: 1789 - protein, 610 aa, Mus musculus; identical to SEQ ID NO: 1787

SEQ ID NO: 1790 - DNA, 28800 bp, Mus musculus
  misc_feature (1)...(28800): n = A, C, G or T/U
ccggctctctctgcgtcgcccaatctatgaactccatgggccacctttgtttgcccaccaggtttcaccaaagtaccttagccttcccttcctgtcaccgctttagagtgttgtgtagtaactgcccctttgaaggctgagttcttgtctgtaggacgaccatgtggcccagagtacctttcagagtgcctgagctatttaaaagcattcaaagatgtttggataaattaactagatttgactctttgctattttctgtttgctactttttgttttgtggtactccgaattgaacctagaatcttgtatgtgctagatacagcttataccactcactggggtgcattacctaccagccccttatgtttacttttgagacaaggcttcactaaatcttccaaattagctttgcattctctatagctcgggcaaaccttaaacatgcattccttctgcctcagcctccttcatagctgggattacaggcttttgtcacccttatcgtttatattgacgatattatattcaagaagtttataaatcccctggaggtggtggtggcggcgcggcggtggcggcccgcggaggcccgcggacacctttaatcgcagcccttaagaggtagaagcatggaggatctccgtgagttcgaggccagccgtacagagctagttctaggacagcctgagctacacaaagaaaccatgtctctggaggcaaaaaagtttgtaatcaacttggatgtatgatacaggagaaacttagacaggttgtttgctctaggacatatccctatttcttattcttggggcactatgctagggtgggcaagcactctatataccactgagttatatttcagctcacttttttttttttttcgaggcagggtttctctatgtagccctggctgtcctggaacgcactctgtagaccagactagcctctaactcagaaatcctcctgcctctgcctcccaagtgctgggattaaaggcgtgcaccaccattgccctgctccacattttactttttgagtcagggtctcactaagttgcccatgatagttttaactcactgtgtaactcaagtatgcaccaccagccacacctatcattttcttgtattttatatatatacatgaaatacacacacatatacattcatggaggcattttgccttcatgttttgtatcctgtttgctgtgcatcatgggtgtgtgtagaggccaaaaaaaggacttcagattccctgggactggagttacagatggttgtgaactgccgtgtgtcggctggtcctctgtaagagcagccagtgctaaccatggaaccatctctcccgcccaattttctttctacttccatccgtccctgatgtaaagttaagtcctggcactgtaactgggtttgtgcgttgtgcttggtgggagtggtcttaaagaggggtaaaagtaattgggtgtgtggaatgtgcttgtaagcccagcgcttaagaggattgcttaagtttgaggctagcctgggctacatagcagggagaggtaaagatatacagttgtaaacagtgttcttgaaattatcccaacaacatgtgtatttgttctccaaccacacatgcttggaggtgatgccgggaggggacttgccattgtccctgtctccctggccggcagggcctcctcttgctcctgagaaaacaagggttgagagtaactcagactctttctttctttcttcacaggatctagcagcagaaagcagctctacttccctgcaaaggagctgggcaccgtcgccatgaagttcatgctgaacctctatgtgctgggcatcatgttgaccctgctttccatctttgttagagtgatggagtctctgggaggcttactggagagcccactgcccgggagctcctggatcacgaggggtcagctagccaacacacagcctcctaagggcctgccagaccatccatcccgaggagtgcagtgaacctccctccctgcaggcatcacagcttcagcatgtccaaccacacgttccatttctcgggaggcagcatcaagtgtctccaaaggactcttactaggcctggaagggctgttcccttaccctggaaaagagcctatttcccctagagctgtgagtgggctgtctgtggctctgggatggaggtgtaccagttccagctgttgggagaatggattttggtttcgtttgtttcagacctctgtcctaaaggactcttttggacctaagtatcttctgttggtttaccattgagtctcttccctgagagttgtttggatggcatcaaaggggttgtggtttgactgtgaagacagagggtggactatccagtgtccaggtcaagttgtacatttaagttctttctccagtgtaatgcacatgtgtttgtatataatgtctaaagggctatgggatgatcaggcctgcttagggtatgggagttccagccactgtgtggcttaaacatgaatttttctaatgcaataaatgtgaatatatatgtttccactgtttgtcctgttgacatgcctgcccttgaaattagtaaggggaagtttaaatcctaaatctataataagtaagctttatctctatttttatttttgaggcaggatctcactgtgcagccctggttgtcctggtagtcactatgtagaccaagctggcctcatagagacacctggtgcctcttttgcttctctagtgctgggatcaaaagtgtgcaccactacatttggccatttttacatacatacatttatttatttatttatttactccagaagagggcgtcagatcttgttacagatggttgtgagccaccgcgtggttgctgggatttgaactcaggacttccggaagaacagtcagtgcttttaactgctgagccatctctccagccccctgtttttactcttgagatagtctatggtagctaaggctggccttgtcccccggattcacctgcctctaccttctaagtgctaagactgtaagcttctgtctaaacttagtattttcaaatttaggagcaagaaagtgtccaaggccttgtttagaaactgaatatggattgccagaaattccaaggacagctagggctgcatagcaagactgaactcaaaaagttttgtttaaatgtaaacttgcgggctgggcctttcaaccctgccctaacagccagttatctgagcctaggcaagactcaaccttggccctccatggttgcccctatggattcagccagctgtaggttcagatcttgattgtaagggctcaagattgaacttagggcattatatgtaccaggaaaacactctaccaaggaaactattttcagcgctgaaaatatatttttttttgtaaattatgtccactattcttttgtccatgataagacaccttttcttgtcatttcttcctaaacaaaacagaacaactttagtatttacattgcattaggtattattataagtaatctggagataagtatgtgttaacatacagttgggtcctttgcagattatatgccactttatatgagacagagttgtggcataatcccctccccactcccagaactgtttgctcttgtgactggtcggactctgtaaaggaaatctgccctctccccgccctgcctcagtctaaatgagcattcttgcaggcctagccatcttgttctcctcaatggcttagccagctaagtggctgtttgattgttgtcagtttaagtcagctactgaatgtctgcacggtgcatgtcatttgcctgtgagagctcccgaagcaatctagattggccttgaaacctaggatccttccaccctagcctaatggatctggggttatagctacatgccgggtgctcatttctgcccttgcccagcactgagcttccactcagcagtggaagaagggctgttcagttttgaagcagtctcactacatagccctagaactgataatgagtagctgacaagtgacccagactgacctcagagtcccatctgcctcaaatgctgggattaaaggtgtgggtcattacaatgggcaaagaggcttccttcccacaatccacctctctgatccctgccctgctatgaaagtattcactctgccttaggtttcgctctcatctctgtgtttatgaatttgatatacttttgccaaacaaaaagaatggaacacagcgtcgcgccctctgctcaacagctctgcttccttggcgttcttaatgcagctgactgatagctctggcttagggattggttttgactattgctgggtggtagtcagtatattgccaacctccacattctagatacatggttcattattagcccctttggggataagaaattatttatttattgggtcttgctatgcagcctaggctggcctcaaatttgtgattcagttattggggttaaagttatgttgtcacaccttgcttctgaggactggcaaactagccttgactttgctgaggttacagaaggttgatttcattagcgtagtactgtcagtcatgtatttgggggattagacttagccgctaaggcactgatcaacaagtcagatgacctcagtttgatctccaaaacctacatggtggaaagagagaatattcccataggcttgtccttgaagtctacaggtgcactgtgacatactggcatccccaacccttcacacacaccaccaccaggatacacacagagtaaatgtagatgaaaaacttaacgtaattggagaactggcaagatggctcagtggataaaacctcttgctgccaagcctaatggcctcagtttgattcgaggacccacagcattgaagatgaacaccatctcttgcaagttgttccctgaccttcacaaatgtgtctcccccaaaataaatgtaaataaataagtgtataagaaaaagtataactggaaagcaaacagtggcacacacctgccttctgtgtaagccaatgttggttgtgagagggtcttgctatagtctgcacttcctttgaattcttggcagtcctgccttagtctccttattagtggggttacaagtatgtaccaccatgcccagctagttccgatatttctatccatcaagggcacactaggttataatgtagcaagatcagtaaaaatctcaatggcttagaatcattgcccgggtccctaaaaagaagcaggtgcctaaacagtgcatccccacctatttctgctgattggtaccccacaatcatcaggctgctgtgcacttgtccgtccatccccctgcacccccccatttctccttatctcccagactgctattaacctggtctcccattaccatgtgttagatgtgtgggaatgtggcttatactctttttttttgtttttgtttttgtagagcttggccacactggtagagaaacttgtgccttgcccagaacttaagtttgaacctgatattgtaagtaaatgtcatttaacatttttttccctttgagggaagatatagtaagggtgtcctacctacaggagaggtgtgaggtgtgagttgaatagttatctaccaggaagttatctactactagtggtagtcagcagtattcttttagtattccttcatttgtttgttttgcgacagagtctcactgggtagcccagaatggccttaaactcacagcaatcttgcctcaatctcttgccctgggactcactagaagctcactgctgactccctgtggctggacggggctatggaagatgattctgctcaatcagtcctgatgtaacatgcctattctagactggaatatgtaaggactgtttcccaacctatagcaacctcccccaacaccctgctttggtaactaaaattgatctgtgtgggactgtattggagttgggtgttaatgaaaagctttgatttccgccctgtactttcccgcgtgtgataagtggtgcatctgtgtgtatgtccttgtatgggcttgaccttgccacgtgaggctgccagaggaccatttaacaatgcagccccagctatgtagctcatgtaggccttgcatttgtgactcccttgnnnnnnnnnnnnnnnnnnnnnnnnnnnnnnnnnnnnnnnnnnnnnnnnnnnnnnnnnnnnnnnnnnnnctccagagggaaccaacttacaaacccgtgatcctaccaaagaaaaaaccaagggcccagagaagggctacaaaccattttccaactagaagatctggtctctgagggagcctagggcataaccaaacaagaaaaaatgatggactttggtcattttcactatgacctttagtcttgggtgttaacaaaaaatgcttactcttattaaccaagcaattcaggactcaaccctcgtgttgggaaaccccatttcctgaaacacccggctacaaagtgaagcacaattccccccacattaacactcccatggcaaagagtcaaaaagccaaccaaggaacccaagggaaggtgtctcaaaggaagacaccatatatggagcctggtcattgagaaacagcataatccgtcggcacagcgctcatctaaagaactgtgcaataacgtccaagcatctagcagataggtagggggagaaaagaaagaagaaagaaaagtattttcaaactaatgggaacaggttttagaattctataaaacttcaatattgaaaatagcatgagacgagcctatgactagacggttcaaatacgctctgggaactgggaagtggttcagtgggtaaaggcactttacctggcaattatgacaacctaaatgccgatcccaaaacacatagaaaaagcccatcgcagcagccagtgcttctgagatcacaggcccaggagaactgaaggaagcttgccgctggcccaactaactcggggtacacagcgcaaagaggccttgtttcaagatgaaaaggtaatgcccgacacctgaggcctgtcctctgacctccactcatagcacgcacacggctacaccccttgcaagaacacacagatggctcagcagttaagggcactggctgttctttcagaggtcctgagttcatttctcaacaaccatctgtaatgggatccaatgccctcttctggtgtgtctgaagtgagtgacagtgtgatcacatacataaaataaagaaatgaatcttaaaacaaacaaacaaacaaacaaacaaacaaaaatcacacgtgcagatatactcacttatcacacagaaaaaaaaaaagaaaagaaggcaggaaaagaaaaaatatgtctgaaagtgggtgagggagtttcattgcaatgaaggtgccaccgatttcagaaatctccacaaaggggctggcgacttgactctgagggttaaggcatccgctttagagctagacagacctgtgttcaaccccctaaaggaggaaggagagaaccctcagattgtcttctgacacccacgagctccaacagcacacacagttttttaaatcccagcactcagtagagggtggaggatctctgtgagttcaaagccagcctggtctacagtgtgaattccaggacagccagggctacacaggaagaccctgtctccaacaaacaaaaatagaagtaaattaacagtaagatctggttctgtggtagaattcctaacacacccagtcaaaatattttacagtttcttaaattgatgtgtcccttttcaaatgtgtttattgaccaggtggtggcacgagtctttaatccatccacttgggaggcagaagtatggggccctctgagtttctggggcatccaggacaacatactcaactatatgataaaaagaagaaaactataaatactttgaagtttctctccaaaaagtttttctagttggaaagaaaatgtgtgtgagtgagggatgcataaagcagtgtgcacaagaggtcagaggacttgagagtcagttttttccttctgtcacttccatcttgggagtctttaaactcctatcaggcttggcagcaagcgttttttgccagctgagccatcctgccgaccccccctccctcccgaagcctgactttaggtaaacaatttgaacttacaaagagcttttgtgtgaggcttccagttatgaaagaggatcaatgcctgtgattttcccagagtccttcgttggcggacctggccagccagctcactgtctggggaaggtcatcgctcggctgcctggggtaagggccagtgtatagaatctggaagtttacagctggtttgtgatcatctcccagtcctgtgtaccccttcctggcctcctccccctttcctactgttagcctttttttgatgtcactcctgccattgtgagctgacaggccctcccagccctggaggacatgcgaaaccataagcatcagggagctggagctgggaggtgggggggagctgtagttccaccgacaccttggagttgggctgggtctgtgtggagccccagagatgttccccagcccattcttcttaagaaccaatgagtaaaattaggggcctccctcctgcaatcagggacccaggccctggagtggaactcggagtagtggatggcctgctttgtcaactgattcattctccagaattcaacttgttctctgactctgtggtgtttgagagcacctttatccaggtacctcctgcatctcacggataagagtctctcctcccacagcctgttcccagtcatttccttttgtacttgtagtgtgagggaattccctgcacactacatttaaagagttacgtagtgttcggaacaagagagaagttttgttttgttttgagtcagtatttcactatgtcgccttggttggcttagagctctgtagattaggctgacctcaaactcacagagatcctccagcctctgcctcctgagtgctgagattaaaagagtatgccactacacccaacttacatatctttttaaatgttttgttgttgttgtttttaagatttatttaagttttaattttgtatttgtgccctcgagggcagtgcccagggggtggggtcagaagagggcatcagacccctgggggctgaagttataaacccttataaacttcctgacattggtgctggaaatgaacaactccaggtcctctgtgagatcaataaacactcttgtttgaagctgagacaaaaggatggaccatctagagactgccatatccaaagatccatcccataattagcttccaaacactgacaccattgcatacactagcaagattttgctgaaaggaccctgatatagctgtctcttttgagactacgctggggcctagcaaacacataagtggatgctcacagtcagctattggatggatcacagggcccccaatggaggagctagagaaagtacccaaggagctaaagggatctgcaaccctataggtggaacaacattatgaactaaccagtaccccggagctcttgactctagctgcttatgtatcaaaagatggcctagtcggccatcactgggaagagaggcccattggacttgcaaactttatatgccccagtacaggggaacgccagggccaaaaagtgggagtgggtgggtagggaagtggggctgggagggtatgggggacttttgggatagcattggaaatgtaaatgaggaaaatacctaattttaaaaaaagattatggtaaaaaaaataaataaacactcttaatggcaaagctgtttctttagctctgaaagcagtctcgtggagctcagtttaactgtatcaatggtaactgtctaagcaagctctaagacccatttggaacagcaatgcatgattacagacacccagggcatcctctcgggacttcaaacattgagaaatgtgtgtcagacagcaggggtcctgggaactctatggaaatcactgaggtttgggtaagaataagagcaggcagagaaggtacccaggttaaggtgatgagcctgggctgaatggaggggctatcaggaacccacctaaacaaaggggtcaagtggcagggagttgcagggggatggtgggaacctttccaggtaggtgtagaaattcaatctgaggttctcaccgcatcgatccacttcccattacggtgccagtttgggaaaactgtgtttggcgtttccagtgctccactctccggtgctgcctaagtggacagctaggtttctagacacaacgcagcgctatatggggttgttattcacaaaactttatgtctgagtgactggggagaggaacaaaagagaccagtagccggcaatgctctagctcacccatctgagatgaccctgcctggggtctgcagccttccttgccttgtctgctatttctttctgacacacgtgtctggggctgatttccaggtcactaagcaaggaaactggatggatgcctatgaaagatctgccactatgatccttggagtaacctcttctgtgccctccttgccactccccaatatcctcctgatggccaatgtcacctggcctcacggtccgttttccacctgtagcacacttggtgcccctgtcatcaccctcagcaggtaaaggaaggctggagggagggggctggggggatgattggcaaatgtatgcacactgtgcaggtgggcaggcttcaaacggaaaggaagggtagtgctccagggcagtgctcttcctgagctccatctgtttgcctaatgtcagttgaatcagcatctctttgcaacactgttcctgtctccagctcaatggttgaagatcttagcttcccttgaattttttaaggtcttgtttggtttggtttggtttggttggttttggtttttgtgtgtgtgtgtgtgtgttttatttgttgttgttgttgctattgttgtttgaggcagaatctgcttgcgtaacctcgtgtgtgtgtgtgtgtgtgtgtgtgtgtgtgtgtgtgtgtgtgttatttgttgttgttgttgctattgttgtttgaggcagagtctgcttgcgtaaccttgtcttgcctggaactcactttataagaattcctaaagagcccagccttggcttcccagtattttgtcagtgtggatgtgggaaatttttaaagagaacttttgggagttatttctctcctactttgtgggccctggggattgcactcatgtcactagagttgacaataagcaccttcacctttggagacaacttgccagcccataaatggagatattaaagtataatagagctatgagatattgagattgaaaaaaaaaaaaagatgccaccaaacccagcatggtaagcctgtctttaaaaagggtggggatgtgttgggagaggtgacccttcctcaagtcctaagtgagtttccacaacccatgtcaggcagctcatagccacctgtaactctgacacacacttctagcttccagatagcctacatatatgtggtattcacacacacacacagaaaaagaaaagaataaaaagattagtgatgtagctcggttggtagactgtatgcctagcgcacacacagccctagctaggttcagcaccacataaactgagcatggtggtaccagcctataaccccagaacttgggaggggcagacagagtatcaaagaaaagaaaaaagaaaagaaaagaaaagaaaagaaaagaagagaaaagaagagaaaagaagagaaaagaaaagaaaagtgcaaagcttcagcatacagagacacccactgttcctactggttgcttcaaggagtcaaagatgtagggaaaagcttagaaatgaggcaagaaatctttgttctaatccctgatcggggcaattgaacaaacttaagagtattttcgcatgggctttgctttctgagacagggctcctgtactttatgctgactttagatgcccagtccttctgccttagtctcccaagtgctaggatcgcctctgtgactagctcaccgtgcatgtggtgtgtgtgtgtgtgtgtgtgtgtgtgtgtgtgtgtgtgtgtgtatgtgtgtctgtgtctgtgtgtgtgtctgtgtgtgtgtctgtgtgtgtgtctgtgtgtgtgtgtgtgtgtgtgtgtgtgtgtgtgtcagggtgcaaggccagaggatgtgttggatgtccctgctctaccacaatccatcttattgccttgaggtggcctctcactgaagaacactggttgactaggttggctggcctgtgagctcccaggatctgcctacccgttttggcatccagccctgaggttacaggcatacatggcatccctggctctttaaaagcaaaacagaacagaacaaaacaaccaaccaaccacgagtgcttggggttcgaactcaggccttcacgctcacatgataagttgcatgccttggtctatcaactcacctcccccagtcagtcacagaacttccccaaggctttactgcaaaatctgaaatgagtgtttaataatacttatctttctctgtccaagagttcttgtgagcattaagtgagatattatgcactgatagcagcaatggtgattgatgggaacagattcttttcatttaattttttttttttgagacaaagtcacgtagcccaagctgaacttgaactcctgcccttagctcccaagtgttgggatttaggcatacacctaaaggcatgtgagtctttactaaggaacaagatcctgcgaatgaatgagaagggagtcagatacctcagcagctagtagtcccagtgccagggcaggagcctcctccagggagccgcagacaccaacacatgtattccccgcttatgctcaggattctccccctgaagtatgtggagctgcaaatctatgaccggacgcagcgcatcctccgcgttaggacagtgacggagaagatctactacctgaggctccacgagaaacatccacaggctgtgtttcagttctggatccggttggtgaaaattttacagaaaggtctgtccatcaccaccaaagacccaagaatccagttcactcactgcctggtgcccaagatgtccaactcctccactgaaacagcagtaagtgcccccccccccggcggtctgcgcagaaatgtatatatccatgtatatactcatacactcacatgcacgcactcgtatgttcccagatgcaaatggacacctagcctttcatagatgccggtcactcatccatagattcactcaacaccttggatcagaaatattcaggaaacaaacactgctcccttctcactgttccctgaacaatacagtgggatagtctatttacatagtattgtgttgtgtgaggcatgtgcaaaagctatgtcattgcaaataagggacttgattataggggaggtgtcttagttagggttttacttctgtgaacagatgccatgaccaaggcaagtcttataaaggacaacatttaactggggctggcttacaggttcagaggttcagtccattatcatcaaggtgggaacatggcagcatccaggcaggcatggcgcaggaggagctgagagtcctacttcttcatctgaaggctgctagtagaatactggcttccaggcagctaggactagggtattaaagccacaatgacacacctactccaacaaggccacgcctcctaatagtgagccaagtatatacaaaccatcacaggggggcccctggagccaatccccatggatattagtggcgagtatgtatgttactgaatacaatgctgttgatcacgggcacttcccctcatttaggcatcactccctcccctctgaaacacgtttgaaagactcctaaaatgaggggttagaggggttaggtgacatctctagttttcagtgaatttgaacatagctacatatgcatttataggcttttattcttttgacatttttttgtaaagatgggacctcaccacgtagccccaggctggcctcaaactcaagatcttcctgtctcagttcccacgacttccctttgttgtgggtgggtggaagcagggcctctagcatgctcgatgctagacaagtgttctacctgctctatcgctgagctagggcctttttatatttccttggttgagttttttgtagttgttgttttgttttgtttttttttttactgtatacacgttctgttattgcaacaactctcgctctgtagctcagactgggcaggaattcactatgtggcccaggttgccctcacactttcagctattctcctgctttagcttcctcctgctgggattgcaagtacacaccacaatcctgagctcctgtggggcatgagggttgcctggaccttcccagggcagaagcaaggtggaaagcttgctagagatggctctaaatttgagatcttaaaaccgaactcttcccctgcctttattaaggtgtgtgattttggtgttttgatagtcactggtttttggagatcagcagctcttgggtccacattttactctctggatagcatggcctccccagcacatctgagccctgcctgagagagagagagcacagctgctccgtggggagcagggcccctgacttgcatctccctatacagactgaaagcagcctgcctgcatcctcccagaacagcgaggccataatgctgctggcagccgagcggaacagcagcagtctcttagaactctcaaacagacaccagacctcaagagacaggtgagtcccgtgttgtcagccctggccttgccctagcctaaattcatgggcccgtgactctatcaatccagtcctttttattgtagataggcagccacacgactttgtcccctaaacttggttgcaagcttgtgctcagaaaaggttctgtggcatccgagcattgaagtgttcattccacagataaacttcccgttttcacaaggcagatacacaacaaaaggaacgggaaatgagtaaattaattccaagaaatacagactaataaataagtcagttggctactgactcgctaacccctgctcacaaaggcctctctggcagcctctgctttgctctctccagctcttggtaaaatggacagtggccaaggctgctcctaagtccacgtctcaattaattccctagcaaacagccatgacttccatgacttccatggtcagggcagacctaaggcgtaggctgtggtcaaccatnnnnnnnnnnnnnnnnnnnnnnnnnnnnnnnnnnnnnnnnnnnnnnnnnnnnnnnnnnnnnnnnnnnnnnnnnnnnnnnnnnnnnnnnnnnnnnnnnnnnnnnnnnnnnnnnnnnnnnnnnnnnnnnnnnnnnnnnnnnnnnnnnnnnnnnnnnnnnnnnnnnnnnnnnnnnnnnnnnnnnnnnnnnnnnnnnnnnnnnnnnnnnnnnnnnnnnnnnnnnnnnnnnnnnnnnnnnnnnnnnnnnnnnnnnnnnnnnnnnnnnnnnnnnnnnnnnnnnnnnnnnnnnnnnnnnnnnnnnnnnnnnnnnnnnnnnnnnnnnnnnnnnnnnnnnnnnnnnnnnnnnnnnnnnnnnnnnnnnnnnnnnnnnnnnnnnnnnnnnnnnnnnnnnnnnnnnnnnnnnnnnnnnnnnnnnnnnnnnnnnnnnnnnnnnnnnnnnnnnnnnnnnnnnnnnnnnnnnnnnnnnnnnnnnnnnnnnnnnnnnnnnnnnnnnnnnnnnnnnnnnnnnnnnnnnnnnnnnnnnnnnnnnnnnnnnnnnnnnnnnnnnnnnnnnnnnnnnnnnnnnnnnnnnnnnnnnnnnnnnnnnnnnnnnnnnnnnnnnnnnnnnnnnnnnnnnnnnnnnnnnnnnnnnnnnnnnnnnnnnnnnnnnnnnnnnnnnnnnnnnnnnnnnnnnnnnnnnnnnnnnnnnnnnnnnnnnnnnnnnnnnnnnnnnnnnnnnnnnnnnnnnnnnnnnnnnnnnnnnnnnnnnnnnnnnnnnnnnnnnnnnnnnnnnnnnnnnnnnnnnnnnnnnnnnnnnnnnnnnnnnnnnnnnnnnnnnnnnnnnnnnnnnnnnnnnnnnnnnnnnnnnnnnnnnnnnnnnnnnnnnnnnnnnnnnnnnnnnnnnnnnnnnnnnnnnnnnnnnnnnnnnnnnnnnnnnnnnnnnnnnnnnnnnnnnnnnnnnnnnnnnnnnnnnnnnnnnnnnnnnnnnnnnnnnnnnnnnnnnnnnnnnnnnnnnnnnnnnnnnnnnnnnnnnnnnnnnnnnnnnnnnnnnnnnnnnnnnnnnnnnnnnnnnnnnnnnnnnnnnnnnnnnnnnnnnnnnnnnnnnnnnnnnnnnnnnnnnnnnnnnnnnnnnnnnnnnnnnnnnnnnnnnnnnnnnnnnnnnnnnnnnnnnnnnnnnnnnnnnnnnnnnnnnnnnnnnnnnnnnnnnnnnnnnnnnnnnnnnnnnnnnnnnnnnnnnnnnnnnnnnnnnnnnnnnnnnnnnnnnnnnnnnnnnnnnnnnnnnnnnnnnnnnnnnnnnnnnnnnnnnnnnnnnnnnnnnnnnnnnnnnnnnnnnnnnnnnnnnnnnnnnnnnnnnnnnnnnnnnnnnnnnnnnnnnnnnnnnnnnnnnnnnnnnnnnnnnnnnnnnnnnnnnnnnnnnnnnnnnnnnnnnnnnnnnnnnnnnnnnnnnnnnnnnnnnnnnnnnnnnnnnnnnnnnnnnnnnnnnnnnnnnnnnnnnnnnnnnnnnncaccccaccccacccccaccatgagcttcttgtcatcttggctgactttaaactccagatcctcctgccttctcttcccaagtgctggcggtggagtgtgctagcacggcttcctgcatgctagtcaatccctagactgtgcactcagccacacccccattcctaccctctttgttttgtttgcttgtttgtctcttttgttttctttgactcggggtttcactctgtagctctgaatatacttgaactggccataagcctgccttggcctccaaaaagtttcctttctccggacctgaagttatgactcattggttaagatcacttccagaggattcgggctgagttcccatacccacaggacagcacatgtctgtaactctagtttcaggggatccatcaggcttttctggccgccttagacaccaggcacaccaatggtgagcagatacacgtgaaaatgaaacaccctgtcttagttagggttccattgctatgaacagataccataaccagagcatctcttataaggacaacattaattggggcagcttacagattcagaagttcagtccattatcaaggaggaaacatggcagcatccaggcaggcgtggcccaggagaaactgagagttctacatctttatccaagggaagtcaagagcagactgtcttccagccagcaaggaggaggatctcaaagcccatccctactgtgacaaatcctccaacaagaccatacctcctaatagtgccacttcctgggccaaccatatttaaactacaacacacccatacacataaaataataaaaatatttatgctttcctagtgggatacacagtcatcactttttcttatcatttcctaatgatttaagttgatttttttcctcttcatagctttcttaggttattttgttgtttgagtattttgttttgttgttgttttttgagacaggagatgactttgaactactgatctgtcctgcctccactttccaagtatgggattataggagtgcattagcagaccaccatattgactcctgtttgttttggattttctgattagttggttgtgtttggtttgtttttgtttatgagacagtgtcttattgtatagttcttggctggcttggaactcactatgtagaccaagttatctttaaactcactctgctttctgcctctgcctctgcctctgcctctgcctctgcctctgcctctgcctctgcctctgcctctgcctctgcctctgcctctgcctctgcctctgcctctgcctctgcctctgcctctgcctctgcctctgcctctgcctcgtgttgagattaaaggcatacaccataaggtcctaagacaaagttccactgtgtaacttgggctagcctagaactggcagacaaatatgtgctcttaaccacttaaccactccagcctttaaaaatagtttaaggagaatgttttgtgtgaatgggcattttgcccatagtacccatggggaccagaaaaggacatctgagtctctataactggagtcatagacaggttaagatgccatgtaggtactgggaacccaacccaggccttctggaagaatagcaagtgctattaactgctgagacattgttccagcccttaagtggatttttaacaattatttccttcttctctgttgctttctatgacctgggaatctctgactccctcaggcacactgatactgccacagaaacagacaactccggcaactgcaagtcaaccccactggtggcatcttcagctagtatgcccatgagagctgctttgacccacagtctctgggaacaagaggactcaaatgagaacttcctgcaggctcctgtagccagctccctaggagagaacttgttgggaccctaatacctagccagagtcgggtgttggccctgtcttctatgtctatgtgtttgcgctgcctcctacaatgctgcttcctgcagtgggccaagtaaccatgggagcgatgatatggttcttacaccaagatgctcctctacttccaccaataaacctccaatggagtcctcgttgttggaggctgtgttttgggggaggctctgagcagttggggaaaagatggctagaatcacaccttcctcctcctttttctaaacaaatgggaagaaagctgtgacaccaaaacaggagctacacaggaggaagagggggaggaggaggggaggggagaggggggaggggagaagggagaggagagaggagagaaacagaggcaggaagctggaaagaacctggatgtccctcaacagaggaatggacacagaaaatgtggtacatttacacaatggagtattactcagatattaaaaagaatgaatttatgaaattcctaggcaaatagatggacctggagggcatcatcctgagtgaggtacccaaatcacaaaagaactcatacaatatgtactcactgataagtggatattagcccagaaacttagaatacccaagatataagatacaatttgcgaaacacatgaaactcaagaagaacaaaaaagagagagagagagagagaaatctccaaaatgatacactatagtaatcagctaggcgataaccccacccatctcaaataagaactcgagtgtttatctctcaactcactgtgttaggctaactcttggccatggccatggacaagtgtgttgccaatggaataccttaactgtttcctcctagtgaaagtaaattgggaaatcttgtatgtttgtgggtctctgagcaagtattgcacacttacagggggataatcaaagctgttcccatcttctagacaattagtaatatttgttcagaatatatcactataatacccaaacaacatgactcctctgatgccctgtttggtgtgtgatattgaaatcatcaagagagaggggcaagtttcctgtccttggagaaagcctggagcagctactgaactctgttttaaagacaaagggggagggcattgatgtttagatgtttagggcatttgtaccacacagtccacacatagaggtcagaggactggccttcttgtatctcacattgcctgtgttgccaggaggaggaacatggttgtccctttggcaggcaggcctggctggtctgagtactaaatcctggcaagactgagttgtacaagacactcagagagggtatctaatgtttatggctttctttctgcctccatggaatgcaaaccaaatttcctgcgaatagtgtgctggttagtctcctgtcaacataagctagagtcatagggacagggaaccaaaaatgagaaatatgccctcatcggattggcctatggtggatcccccccccatgggcattttattgattaatgaatggtgtgggagggcccagcccactgtggtggtgccatacttgggcaggttgtgtaaggaagcaggctgagcaagccagtaagcagcatttctccatgacccctgcttcagtcgctgatactacctcagtgagagataataaagtggaagtggaaataaactgtgttctccccaagttgccttgggggtgggtatttatcacagcaatagaaagtaaatttggacagaaatatttgccagtaaataagctgactattgccattactgaagaaggtcaactagacgctagacccaggtgagactaatatgaagtgaccatacttcccaaagtacaatacaatacacatttaactctcaaaatatccttgtgaggataaatcgtaaggcacctggcattcacacacacttggagtccctatctttgagatcttaagatctcactctgtaagccaggctattcttgagctcacagccatccttctggctcccttcccaagtgctaggattaaaggaagagccaccactctcagcttccatccccacttctagtgcctgactttatgtctctgtcagttctcacttgaactgttggggtaattctattggtgtaaccctagtatcgccataacagtaatgggtcacatcattggattctaggctatatgcaaatatgctgctatatttttacaaaggtatttcactcaatccacaccaccacagcccacctggaggcagatactcattagcacattttgttaaggatgaagccacagagaggttatttgaggtcacatagggagtaagtagccaatattttaactcagtctgtctgattccaaagcttacaacatttatatgcatttgattttgacagggtctctctgtatagccttgattgtctcgaagcttactatatagatagatctagcttcatttctgagatcacagacatttgccaggtacctggccagagcccaccctttgggtgagcctgtgatctttcccagtcccccacttcttccatacttccaacagagtgaccttttttgaagcattatatacataccttccagagtttccttcttcatacaaccaacccctttgacatgaaatgactggaacctcactgatcaccacatgctctctatctgcttcggtcccctagaaccttatgcatccatcatgccaaattccttgtgggttcctacatttgcattgcctttagatactgttaagacattccatacatgttcactctatccaatatacacttgctttttctatacctgccccccccgcccagatactggcccttgctgatggaattccctgagactagtgttgtctgtacttgcattggattgtcctgttcttaagcttattgtagttatttcttttccttagtggaacaaccaactctaagaacagacaccattttggaatcaattagaatactcgaaggagaagctagctctcattcaaaccaaaaggaactcattggaaggatgtgggttgtcttgcaaaactgctaaggcatttgtggaaatgaccatagatgcaattcaattataatgaagagattcattgattagctgctagcaggatggacaatccctaactaaatttgagactgccatgagaagaagggttgagggaaggagttttaaggtagaacaccacaaaaagacctttagtatgtaggcaagcatgcaaaaactagtctcttctgccaagttaagtgattaaagcaattcaaaacaatctttgggtatctgtgtaagcaagttacagaagcaaaaaaaaagcagttggtcatatgacaaatagaaagacacagttgtatatgtctggatgaggatcacagagtcagtaattgggaacttatcttccagggattggagtcagacacaaacagctagtgggtaccaagatgtatgcctagcataaatggagtttctttagccagcactaaaccaaagggacaagggaagggtttttcagagcgtgacaccagtgcaggactgggatctcagggagtctcagagtgtgacaccaggacatccctgaggagccagggaggggaagctaactggccatctgatcagatgctgcagtaggctggatggctctcctaaggggaattaaaattgttacaaaggaataatggaattctggtggctgatgacaaatgtccagtgcagtttgcttctgttatctggtggcaaggcaagtaggattttatttacttaattcttactttatttttagtttatatttatattatttattttatttataatctattgacttacctttttttgagtcagtctcttaatgtagctttgtttggcctgagtagaccaggctgacctcaactttgtcaatagagatacactcacctctgccaaccaactgctgggattaaacgtgcatgacaccacgtctaaccgtactttcttattttttatttttgagacaaggtctcacgctggagcctgggctggacttgaacatgtgctaatgagactcattcctaaacctcccaagttctgggaaccaccacttccatgggctttgagaatctatactctctgctaagtttcaaatttcaagttctccagtgataagctgtcctaatagtcagatgacaaggaggtcaaatgacataggataactacctcgtgactttttctcttcttggaaaggacaagtttggtttttgtttggggtaaaacaaaaccaaacagaactcggagagctctcagccacagtgcaacctatgaggtctggcctctgtttcagcccattttgaaacccagggcaggtcaaatgataattaatgctgatatttcttcatttgttgtgctgatgaaataaactttctttgactgatcccctttgtgtattttgggtgtggtgatggttgaagtctggtccatctccagtgtgagaggtgcagacgtatgtgtgggagccagagagaaacatcaggtgtcttcttcaattccttttccattccttttatttacttaagtctcattagtattgctgtgtgcaagacgtgagcacacatgtgccacggcagccatgtggggaccgtaggacacctttcaggagtcagttctttccttccatcctgacatccaaggattgaacctgggtcatcaggtcaggtttatgcagcaaaagcctttaccctctaattcatcttgcccaccctccatctttttgttgttgttgtttgtgttttgtttgtttgtttttgtaattatttttttccaagacaaattctcttcactaaccctggagatcaccaactgactagactaacaagccagcaagtctcagggactgctgttctagggctgtttctgcctccccagccctaggattgcaggtacacagcttcctggctttttacatagttgtaccataggtcctatagtcttaagtgggtactggggatcttatgcacatgcactgaacaagttactgacagaatctcctcaacctagaggtgctattttgggaggacacagaaacttttggatttggggcttagttagcatagtaggtctacagagaataggtctatgaagattataccaggccctggttccaggctccttcctgcttcctcatgggctgtgatgggcaaagcttcaccacacactcctgcctcctcttattccaaccacaccctcctctatgaaggaatgagattctaaaatagcccttctttcttctcatagactgtttccgtcacagtgtcatgaaagtaactgacagaggtaccaagggaattgtgggaagtctgcctgcttctccattaaatcaccttcttcaagtgttgctactctgtgccatcccctgctacctatattctataacatccaaagccatagacactctttattcaccatttacacctgtgaaatatgcctgcatttcaaaatgatacactgttgtcattttaagatagggtctctggaaaccaggctgacctagaacttactaggtaactttgaattcacagtaatctttttgcttcatctttccaagtgttggggtttcaggaatgagccaccataccacttatgctgagctagggattaaacctgggactttgtgcattccaagtagttaccaactgagctgttatccccaactgagagcgttccagaatctgtaacacttccgatctcatgaatttcagataatattcaacctgtatttattttatcacataatataaaattattaaaggagggtgtggtggtttgaatatatatgccccccatagatccctgtgtttgaatacttggcccataggaaatggtcctattaggaagtgtgaccctgttgaagtaggtatggccttgttggaggaactgtgggtatgggctttgagggtctcctattctcaagttctgcccagtatggaacatagtctccctctgctgtctttggataaagatgtagaactgttaactcctccaacactgtgtctgcatggatgctgccatgttctccctatgatgataatggactaaacctctgaagctgtaagctagccccaattcaatgagttgcgttggtcgtggtgtctcttcacagagacgaaacccaaactcagtcagagagcctggagagatggctcaacctttaagcatacctgaggatcagggttcgttcccagcatctacacagtggctcacaacacctgtaacccagttcgagggcatctgaccttctcgggtaccaggctcatatgtggtgcacatacatccattcacgcagaacattcgagcacataaaacaaaacaaatacatcttttaaaatatcgcaagaaggccagtgctttgttagagttttctagtggggaagcccttcaaccaaatcccaaatccctgatgtttttgccgtgtgatatatgccctcttctgttggctgagcagggtctccatttcatttgggcactgctgcttcctgcccttactatgtggaaggcatccttggcttaccggtaaaagtggtccactccgaatacctggccagaagtaccgcatttccctagagcagcagtgcttaaccttcatcattgggtggcattgtttaacataacttcccaagttgtggtggcccccaaccataatactatttttgttgctacttcatagctgtagttttgctactgttatgaattgtaatgtcaatgtctgtgtttacccagagtctaagatgacccttgtaaaagggtcgtttgataccccagaggggtctcaacccataggatgagaaccactgctctagagtaagaagcacgaaaactaacgtctgcctcgggtctctcgggtctctggctttcctattttttttttttttttttttttttttttttttttttttggtttttttggttttttcgagacagggtttctctgtatagccctggttgtcctggaactcactttgtagaccaggctggcctcgaattcagaaatccgcctgcctctgcctcccgagtgctgggactaaaggtgtgtgccaccatgcccggctggctttcattttttttttgtttttttgttttttttttttgtttttttgtttgtcgtagttgctttgaaacagagtctctctatccnnnnnnnnnnnnnnnnnnnnagggggtaagagctatagagaggtatgaacgacaggatatagagtaagttgtacgcaagagtgtaatgttgaaagggggaaaggatatatatttaaagagaggtgtagagtataggggtgcttatgacaacaatgaaggcgtggtttattagactaaatgcagggatgggattaaaggaaaacagtgtggccaagagataagaggggcaggagtggttcgccaaaaaaagaaaaaagacgtgttggggtggtccacccgtaaaaaggaagaggtagtggaaaaaagagaccaagtggggtttggcgaagggggtgtgtaagcaaaagccttgcggtgggtcttaaggctgagcggggtgtgtcctacaataaaaaagtcttaatagccaggggttggccttggaaaagagacctctggggtgcaggccgcgtcccatgcggggtcggttatccattattcacgggcacaataatattagaaaggggctctggagcacagaagttcaaagtgtccgagagttatgggtgtcacggaagtacatgagaggggtgcggtacattgaagtccctcaaccgtggcagttccttgacctagcacgtaggcttcagctgcatttggaaggttggacagtcgcgccacagaaggtacggtcatagagttaattgaaggaagggcagtgatctggctcggagatctggggtcacgaaaggcagcagggactcagggaatgggcctatacatggcccccgacccaaacagattcagtcacaggacgcttcccctgtcaagtctcagccctctggtggtgtcactgccccaggtgaataatcactaccacccctacttctcaacttcagatctgcaagtgatagaaaattttcacataacatgtggtagtctcagcgtctagtgttgctgggctcccctgaatccatcccgggttgggggtgggagtggatcagagccctgtcaatggaactttaatcaccatggagactgggtcaccaagatgggccaggggaggggaaacagtctgggggggtgggataaaaactagcaccatatttaagtccctgtcacctcttccaactcctgagtgccttctgtggggactctgcctgtgctgggagaaatacttgaactttacctcttacctgctgcttctcagactctgcctgggttttgcttccttcctctcctctcctttcccatcccccacttcctatgaaaggtgccatgggagaggctacagggccaactgctgagccacctgccccttttctgtctcctttagtaaaattcccaagcaaactggtcttccttttttgtttcgacttaactgtttcaaaaccaagacctcacacagaacgcacaaccaatgcaaaaaaaaaaaaaaaaaaaaaaaaaccacccagacaagctgtaaatgtgtgtatagttccggcatggtagcctgcaaaaggactgtagatgataacaattttaaagaagaaaaaaaatgcctttaagttattttatgtgttgggggtttggtttggttttttgttttttgttttcttttttattctttattgcttgtttttgaaagatggcacgttctagcccggaagtcaatgttttaatgtatttatttatttatttatttggttgccttcctgtccaagcttccactgactgttgcccccgagggtttattgtcatgttctgccttttttttttctttccttcctcctgacttggggaccttttaggggagggctgtgacgcttgctggggtgttggggctccggtgggacagctgctgtagcccccttctccaggggcccccttggctgcttgctggagtgggtctagggtctgctgactgtacacaagacagttccggtgtggtgtgccttccggatcctctctggggctgtgctttgagcagagtgcagcccgccggttttatctgagtaaagtatactgtacaggggaataaaagagatcttattttttttttatacttggcattttttgaataaaaaccttttgtcttaaaaaaaacaaaacatgtggtagtctgctttctttacaggaattttaatccagcaacatggctgcttgggcaagcgatcatgtcccttctaggtctatatgatcctgccagaatgaagatacaccctgaattataatatgctctggctggaatgcagacacacctttaggacatacttctaacccctaacaataaagataaggttaatttgtttgtagaagaaaaaaaatcacgtttgaaaatgatgtctaattgcggggcagacaaaattatgagtcagagaaaaaatttgacagaatgagtcagagataggctatgcccaactctcacaggaacagacaggaaagagaggctactttagagcagtgcagggagagagatgtgtagtgtgtgtgtgtgtgtgtgtgtgtgtgtgtgtgtgtatgaatgtgtgtatgtgttagttttagcagtatagttttacagaggcaggttgcaaaaagaacaagctagacacagatggagacagaatgagccagagaatgagaaaaggcagatgtttagaacatattgccagttagtatgaggccaagcagagcaattcagtcagaagatgagagaagctaggttgaatcagtcagcttggaagattagattgtatggtggctaaaagctcccaagcctaggcttagagagagaacagagaaagaaatgctttgggctcagccccagctctgtattttcacagcttgggcacggcttctcatccctccatcaaataaaagtgaaatttacggctttctgctgtgacaaaagatctgagataatctatttaaaatgaagaaaggaggctggggacatagctcagtggcacagcacttgtttatcatgcatgaggacgtgtgttcaagacccagcatcactaaacaaataaaatgtaaaagagcagtgatagagagcttgtctagatgtgtgcccacgtgt

SEQ ID NO: 1791 - DNA, 1355 bp, Mus musculus
cagagaaggtacccaggttaaggtgatgagcctgggctgaatggaggggctatcaggaacccacctaaacaaaggggtcaagtggcagggagttgcagggggatggtgggaacctttccaggtaggtgtagaaattcaatctgaggttctcaccgcatcgatccacttcccattacggtgccagtttgggaaaactgtgtttggcgtttccagtgctccactctccggtgctgcctaagtggacagctaggtttctagacacaacgcagcgctatatggggttgttattcacaaaactttatgtctgagtgactggggagaggaacaaaagagaccagtagccggcaatgctctagctcacccatctgagatgaccctgcctggggtctgcagccttccttgccttgtctgctatttctttctgacacacgtgtctggggctgatttccaggtcactaagcaaggaaactggatggatgcctatgaaagatctgccactatgatccttggagtaacctcttctgtgccctccttgccactccccaatatcctcctgatggccaatgtcacctggcctcacggtccgttttccacctgtagcacacttggtgcccctgtcatcaccctcagcaggattctccccctgaagtatgtggagctgcaaatctatgaccggacgcagcgcatcctccgcgttaggacagtgacggagaagatctactacctgaggctccacgagaaacatccacaggctgtgtttcagttctggatccggttggtgaaaattttacagaaaggtctgtccatcaccaccaaagacccaagaatccagttcactcactgcctggtgcccaagatgtccaactcctccactgaaacagcaactgaaagcagcctgcctgcatcctcccagaacagcgaggccataatgctgctggcagccgagcggaacagcagcagtctcttagaactctcaaacagacaccagacctcaagagacaggcacactgatactgccacagaaacagacaactccggcaactgcaagtcaaccccactggtggcatcttcagctagtatgcccatgagagctgctttgacccacagtctctgggaacaagaggactcaaatgagaacttcctgcaggctcctgtagccagctccctaggagagaacttgttgggaccctaatacctagccagagtcgggtgttggccctgtcttctatgtctatgtgtttgcgctgcctcctacaatgctgcttcctgcagtgggccaagtaaccatgggagcgatgatatggttcttacaccaagatgctcctctacttccaccaataaacctccaatggagt

SEQ ID NO: 1792 - protein, 311 aa, Mus musculus
VSRHNAALYGVVIHKTLCLSDWGEEQKRPVAGNAHPSEMTLPGVCSLPCLVCYFFLTHVSGADFQVTKQGNWMDAYERSATMILGVTSSVPSLPLPNILLMANVTWPHGPFSTCSTLGAPVITLSRILPLKYVELQIYDRTQRILRVRTVTEKIYYLRLHEKHPQAVFQFWIRLVKILQKGLSITTKDPRIQFTHCLVPKMSNSSTETATESSLPASSQNSEAIMLLAAERNSSSLLELSNRHQTSRDRHTDTATETDNSGNCKSTPLVASSASMPMRAALTHSLWEQEDSNENFLQAPVASSLGENLLGP

SEQ ID NO: 1793 - DNA, 34665 bp, Homo sapiens
gggctgggcccagggtccccaagctatgtgcagcctggggtttggtccactgcatcccagctgccccagctgtggctgaaaggggacaatgtagagctcgggccctggctttagatggtgcaagccccatgccttgtggtgttgagcttccatgtggtgttgagcctgcaggtgcacagaagtcaagaattgaggttttggaacctccacctagatttcagaagatgtatggaaatgcctggatgcccaggcagaaatttgctgcaagggtggggctctcatggagaacctctgctagggcagtgcagaagggaaatgtggggtcggatcccccacacagagtccctactggggcactgtcctccagacccagaatggtagatccactgacagcttgcactgtgtgcctggaaaagccacagacactcaatgccagcctatgaaagcaaccaggagggagactgtaccctgcaaagccacaggggcagagctgctcaagaccatgggaacctacctcttgtatcagcatgacctggatgtgagacatggagtcaaaggagaacattttggagctctaagatttgactgccctgctggattttggacttgcatggggcctgtagcccctttgttttggccagtttctcccatttggaatggctatatttacccaatgcctatacccccattgtatccaggaagtaactaacctgcttttgattttacaggctcataggtggaagggacttgccttgtctcagatgagactttagactgtggacttttgagttaatgctgaaatgagttaagactttgggggactgttagaaaggcatgattggttttgaaatgcgagatcatgagatttgggaggggccaggggcagaatgatatggtttggctgtgtccccatccgaatctcatcttgaatttctgtgtgttgtgggagggacaggtgggaggtcattgaatgatgggggcaagtcttttctgtactgttcttgtgatagtgaataagtctcatgagatctgatggttttaaaaagaggagtttccctgctcaagctctctctctttgcctgctgccatccctgtaagatgtgacttgctcctccttgccatctgccatgatgtgaggcttccccagccacgtggaactgtaagtccaattaaacctcttttctttgtaaattatccagtcttgggtacgtctttatcagcagcgtgaaaacagactaatgcactctgcctcctggggttcaagcaattctcatgccttaaccttccaggtagctgggactacaggtgtggactaccatgcctggctaatttttgtatttttggtagaaacagggttttaccatgttggccaggctggtcttgaacttctgcctcaagtgatccacctgcctcggcctcccaaagtgctgggattacaggcatgagccaccgcacctggcctgcactgtgaatgtataatcccagtgattagatatggatattaatgttattcatttcctttttaccttattttatgtttgtttttaataataataattttgtaacatttgaagatataaatatccttaaatacttttacagtcatgttaaaaattcttcggatttcaaaaacaatgaaaaaattgataatgcatttggaaattgtagaaatatgagagagtcctaattttgaaaatgaggcactctgatacaggtcagttgtacaaggacatgagtacattagtactttgataccttcatgtttggcagttatagtcaggtacttcttttatgaatttaaaattagtaatttattttatgaccaacttcaacttttcaggagctgttattgtgaaagtttttttgctactatgagttttatccagtcagaaacaggaaccaattgtaaacaattacttctattgctgcaaacaatttttaaaaacctgccaaatatgcaatgccttgctattcaaaagaaaaaaaattcattggtttaactccatagtttttttgtttttgtttttgtttttttgagatggagtcttactctgttgcccaggttagaatgcagtggcaccatcctggctcactgcaaactccacctcccggcttcaagcgattctcctaagagtagctgggattacaggcctgcgccaccatgcccagctaatttttgtatttttagtagagacagggtttcaccatgttggccaggctggttttgaactcctgacctcaggtgatccacccaccttggcctccccaagtgctgggattatagtagtgagccactgtgccccaaaagaaaaaaaaatttcaaatttcataccttaaaaattatctcctttatgagataacacctgtggaaagaaaaaaaaaagaaaacattatttccttcaaactaacctggtaaagtttggaaatactataaatcctcaatatttaaaacagtgtagtaccagagtgtgaatagacagatgaaagcaatgtaaaataaattctgaaattggcctattatagttaagacttttgattatgagaaaggtggtattgtcctcatgaatctcaatgaggcttaaactgaccagcctatttaatagcacagccttccaccacatccatccccaacattcctggtccccctcatcctgttcttcttttctttctatagcactgaccacctcctaacacactatgcgattatttattgtgtttttttaattgttggaatcccctcgcataaacgtagcctttttattttgttcactgatctatcccaagcatctaggaaagtgcctaccatatatagtagatacttgataaacatttgttaaatgaatgaatctcaaatcagtggtgaaagatgtaacatcctatacaataagtgacactggacaattgatagccatctggggaaatacagacaacccacattggttctagactttacatcacacaccaggaaaaaatctagatggattaaaggcttaaatagaaagataacaaccgtaaaagtcattcaggaaaccatggggaaatgattgtataaccttggaatggggaaactttgtcaaaatatcatacaaaaatccaaaagccataaatgaaaatattgataaatttaactaccaaaagaaattccacaaggcaacaacacagtaaacatattcaaagacaaataaaaaactaggaaaaaatgacaactcagtctttgcaatataaaaagattgcctataaaatagataagaaaaagactaatagcctaatagaaaaattggcaaatgttatgaattaaaaattcatagaataaaaaccaatgagataaatgaagagatgcccaattaaaattacattgagatatcattttaaaaactttcagcctgataagttcaaaagctttatgacatactgagatggtggatttatgagaagcacaaactctcaaacattgttggtggaaatttaaatttgtatacttgttatgaagttcatcacagtagtatccatcagcatatacactcttcttttaaaaaaaatatttatttgttttgagacagggtctcactctgttgcccaggttggagtgcagtggcgtgatcttggctcactgcaacctctgcctcccaggctcaagtgatcctcccacctcaacctcttgagaagctgggaccaaaggcatgcaccaccatgcctaactaattttttgtattttttataaagatggagtttcactgtgttgcccaggctggtctcaaactcctggactcaagcaatctcacctcagtctcccaaagtgctgggattataggcgtgagccaccacacccaactcatatacatcctttcacacagcaattctactttcaagaattttttcttgttaccagacaggattagctaggttaagttgaggtaataaacaatctcaaaacatcaatggcttaaaattacaaagggcttttaaaaatgtctcactagtgccatggaaagactatccttaaaaaagtatctcaaaaatatgtttaagagaaaagagcaagttgaaaaaaaaatagtgccattagtcgttacatcagtgtacatctaagctgccatctggtggtggttttcttcctcctgaagaactcttagtgtttctcgtagttcgggtctactggaaacaatttttctcagcttttatttgtctgaaaaattctttttttttttttttttttttttgagatggagtctcactctgtcacccaggctggagtgcagtggcgcgattttggctcactgcaacctccgcctcccgggttcaagcgattctcctgcctcagcctcctgagtagctgggattacaggcacgcgccaccacacccggctaatttttgtatttttagtagagatggggtttcatcgtgttggtcaggctggtctcgaacccctgaccttatgatccacccacctcggcctcccaaagtgctgggattacaggcatgagccaccgcacccagctgaaaaattctttagttcccctcaaattttttttttttttttttagagatgggaatctcaacatggtgcccaggccaggtgggacttgaacttctggactcaagcaatcctcccacgtcagcttcccaagtagctggaactatagggatgcaccatgaactactaatttaaaataaactttctcctttattagtattttttagtagagacggggtttcaccatattggccagggtggtcttgaactcctagcctcaagtgatccatctgcgtcagcctcccaaagtgctgggattacaggtgtgagccaccacacccagacattcatctttatttttaaaggacatttttactgaacataaaattctctgagttggcagttttttctttcagcaatcttaagatgtttatgccttctggcttcaacagttggagcaagaagattgctgtaattcttatcttggttcctctggatatttttaaggttttctttctatcagcaatttgattacgatgtgcctcataaggatttatttgtgtttatcctgcttggggtttattgagctttgtggacttgtacatttatagttgtcactacagttggaaatttttaagccattatttctttaaatacgtttctatctcaagaagtacagttatctccaaatgagcgtcatctacatgtccacaactctgatcagaccactcttagagccagtaatgattattttaatacctaccatactttgtgtatatttactcctcagtaaatatttgtagagctgcacatagggaatttctttaacacctttaaagtttatttatttaaataagaaatacatgcccatggtaaatatttcaaatagtacaaaaatatttcaaatagtacaaaaaaggaggtattctgtgaaaagtaagtctttgtttcaccaaagataccaatccctgccccctccccgtcctaaggccatcactgttagcatttccttttttctcctcccaaaattgtctgtgcatgttcaagtatatatggatatatatccttgtgctagcatactatatacactgttctgcatctttttaaagtttaataatcttggcgatcattctatatcagtacatataaagtgggctttttatgaatggcctaacattacatcatacagatgtatcataatttaattaagtggtgccctgttggtggatattcaagtcgtctggtcttttgctattgcaaataatgttgcagtaaagtaaaatgtaaaataaaagtaaatgtcttacttacttaaaaacctattttaaaagtaaatgatggactttaggaggttaagaattaaaaattaataaacatataaataaatgaggtactctagcacttggggtcatgctgatgttcttgtcatctaaatttttggtttatatgctgcaaacattgtcaaagaaatttcctatttcttttacaaggaaaagagaaaaacatgtcaagaatagggagtactattataagaaagcaaaagtaacaactttgaaggtttgaatttctggtgttataaactttgtatgctaaaaagataaatgttagtttccacttctaatgatcaagtcttaggaagatataagccaataagatataagctgcttctgatggtacagcttcagggaaacaccagtgagaagcacgtgtctcccctgatgagaagagaagtgctaggagattgagcctcagtcacaggcagatgtgtgtcttgacagccacggtgtgtgtcttgagagtttaaaagatgtgaaagaatgatttgacccattggcttgctcgctgaataagcaccaaggcaagagagcctggtagttgtcctgcatagtctaggaaggacattctgagaaggataactaatacttcatccctcttcaacttgatgcaacctgaagagcaagtccttgggtgaaagtttcttgtccggtaccaaagataggagatagcaggtaaagggaacaagttggtaccatggcaatggtgtcccagtaaatttttattttgttttgttttgtttgcaagaacagtatgggataaacaatagcaaatatacagccttggtttccccaaatcctacaatctcagtgcaggaaggtcatcttcagcagtcagctcagaatagcctcaagggacatgatgtctacagcttctggcttcagaataatgtcctattactgtcaagtggcaccccccaccatttcttcaaaggctgtgataagttttgcacagatgagggcagcagaaaggaggtagttgctgctagacaccatccttctctgtatattccacactgaccttgctctaggcaaaggcccccaccacaaaaacaatagggtcactgttgaacaccagctctttttttttttttttttttttttgagacggagtctcgctctgtcgcccaggctggagtgcagtggcgggatctcggctcactgccagctccgcctcccgggttcacgccattctcctgcctcagcctcccaagtagctgggactacaggcgcccgccactacgcccggctaattttttgtatttttagtagagacggggtttcaccgttttagccgggatggtctcgatctcctgacctcgtgatccgcccgcctcggcctcccaaagtgctgggattacaggcgtgagccaccgcgcccggccctgaacaccagctcttacacctacctcgctgatgcctggaatggaaaaagaagtgccgattttctttttctttctttctttttttttttttagacagagattcactgtgtggcccaggctggagtacagtggcacaatcttggctcactgcaacctccgcctcccgggttcaaatggttcttttgccacagcctcctgagtagctgggaatacaggcgcatgccaccacacccagctaatttttgtatttttagtagagacagggtttcaccatatcggccagactggtttcaaactcgtgacctcgtgatcctccctccttggcctcccaaagtactgggattaaaggtgtaagccaccacacccagccagaagtgccaattttcatacatccaactgggaagtgatctgatgttggattcttttttctttcttttttttttttaggtggagttttgttcttgttgtccatgctggagtgcaataatggtgtgatctcagctcactgcaacttccacctcccaggttcaagtgattctcctacctcagcctcccgagtagctgggattacagatgcctgccaccacgcccggctaattttttatatttttagtagagatggggtttcaccatgttggtcaggctggtctccaactcctgacctcaggtgatccacccgcctcggccttccaaagtgctgggattacaggtgtgaaccactgcacctagccctttttctctttttaaatatacaattttaggatccctttttttttttttttgagatgggagtctcattctgtcacccaagctggagcgcagtggcacaatctctgctcactgcaacctctgccttctggactcaagtgatcctcccacctcagcctcccaaatagctgggaccacagggcgtgccaccacacccgggtaatttttgtattttttgtagagacgaggttttaccatgttgcccaggctgatcttgaactcctaagttcaaacaatccacccaccttggcctcctgaagtgctgggattacaggcgtgagccactgcacctggccttataatactctttattgtaaatttcatatgaccagttgattcttaccaaaagcttttgttgatttttgtcaaacgctgatatttctagccaacctatgattgcaactgacaagcaagtatagttctgacatgaatattggttgatattttgatttacattaatgagcaaggcaaaagtgaaataacaaagttgtgtattggaactttactcatttgtcaatgacgtgggcaacttcttcgctaaattaggtaagtcttcaaatactggaaggctattttctcagatttttctatgcccaaaatataatagctacagacacatctttaagtttaatctgcataattaacattttctctatcactttagtttagacaatcaacagaacaataaatcaaaccctgatttgtagcacttgctgatttcaagctagctaacaagatgaagttcctgaacacaccctgggaagagatatgcagcagcccaccactgtatactgtttcttttcttttcttttttttgagacagagtcttgctttgtcgcttaggctggagtgcagtggcaccatcttggctcatcacaacctccacctcccagattcaagcgatcgccctgccccagcctcccaagtagctggactacaggtacccacaccacacccggctaatttttgtagttttagttgagacggggtttcacccgttgaccaggctagtctcgaacgcctgacctcaggcgatccacccacctcggcctcccaaagtgctgggattacagtcatgagccaccaagcccagccaagtttatatcatttaagttttaaaggctgggcttggtggctcatgactgtaatcccagcactttgggaggccgaggtgggtggatcgcctgaggtcaggtgttccagaccagcctgaccaacatggagaaaccctgtctctactaaaaatacaaaattatccgggtgtggtggtgcatgcctgtaatcccagctactcgggaggctgaggcaggagaattgcttgaagatgggaggcggaggttgtggtgagccgagatcacgccactgcactctagcctgggcaacaagagcaaaactctgtctcaaaaaaaaaaaaaaaaaagttttaataattgctgtgtttaacaactggtttgtagcattcctgaaaatgtaacaaccagctctcgtgacctgttttggtctggctccagcatacaactgtgccactgccttctcctttgcccactgtttccaaataaataagcttctcagtttagttaacaggtgtccatttctttaaaaaaaaaaaaaaatctccttttctcccatgagatggggtagggaagatgaactccctttttcctatccttagacttccctgggcaggtgaacaagtcccatggaagtttggtgaggggcttcactgggaggcaagaggattaaagcctgtatgttcccgagagccttccttgcatctggccagctcactgctgccttggcataactttgggagggtcattttttccatttggggtaaggctgaatgtttacaaagtggaataggctgcattactgctggtttgtagttggtggaaagagggagaaaagagcctggcacatcctctgtccttcctcttctttttttttccccttttctgttgtcaccatcacattccttgatgtcattcctgccattgtgagctgacaggccctcccagccctggtggacagcccgtaagtaaatggggaggaaatgctggggaggtgggggcagatcacatcaacatcctggcattgggctgggtcggcgtggagccccagaaatgttcccaagcccattcttaccaagaaccaatgagtaaaatcaggggcctcccacctgaggtcagggaaccaggccctggagtggaacttggggtggaaaatggccttctttgtcaactgattcattctccagaattcaatttgttctccaactcggtggtgtttgaaagcaactttatccaggtaccctcgtggagctcagggccagctgtctttctgtttccaaaacctgttcctaggggttggttaggagatgctgtggccttttaaagccctgggggaagggggggcggggggacaaagaagccaccaaagctagagaaaaccagaaggtctgggtcccaagttcacctccatttgtgcctaccgtatgatagagctacctgcaggtcatctgttctagggaaattgatttatgctttacaaatgagagatcagagctcagtctccaggcagggttcacaggccctttctgggccacttgtccaaagtggatggttacagggaatgaaggttgctgttagaaactctgctctgaaatccatcctcctcagtctgggatggtttagaaacagccttgtttgaaagcaaagacactgggtaaataggtgttgcccagatcctaccattccctaaaaggatggtggtgacatgaccaatggaagtgagcctgggatggggccactgggagtggaaggtggtcgttttcgtaagtatcaagtcttaacgcgggtgctgcctgcctccctctagcggtctagcctgaacccgtgctcctgcgcaggagagcataaccagttaatcagccagtaagcacacactaaacatctactgagtgcagggcaggaggtgcagagaaaaatcagagtgtccctggccaggaagcctatgagtttggtttacctgttatttggtaactgtctaagcaagctctatgtcagagagcttgggccagctgatgcaccaggcatgactgcagagagcaggtgctgggggcattcaaggcattctctctggactttggcagttgaagaaggctttccagaagggtcttaagccattctttgagagactgctgagattttggtaagtggaagagcagcggggaggatatcccagacagaggggcttcaaagtacctaaggaaaggcagggaggctggaatgcaaggtctgcaagacacagacccattcaaatggagtgggaaagtagccaggggttataggagagaaggtgggaacagtttgaggtgggtcttgggcttaatttggagactcttcacagagcagcgagctgctccctaatggagtccccggattttggagagctgtgtttatggctcctgccgctccacggtccctttgctgtgccccaggagatgtgtagttgggtgatcagctggcaaacctgaggcgagctcattcctaacatacccttggtggagacagagcaataacatgggaagtccagtctcaggatccaatttctagtcatttctatttgggtgtaatgattcagctgcaaatttcttctcttaatgtgtgctttttttttgagatggagtctcactccgttgccctggcatggtctaggctcactgcaacctctgcctcctgggttcaagcaattctcctatctcagcctcccgagtagctaggaccacaggcgtgcaccacctcgcccagctaatttttttgtgttttagtagagatggggtttcaccatgttggccaagatggtcttgatctcttgacctcatgatctgcccgccttggcctcccaaagtgctgttttctttggcctaatattaaaactgtttagattctctgaatggacactaagtgacctgggtagcagcaaacttagaatgtgctagggagaggctgacccgcacagaaaagttcaaagtttgattttttaaaaaaaattttttgatagagacagggtctcactatgttgcccaggctggtcttgaactcctggcttcaagtgatactccggctttggactcccaaagtgctgggattataggcatgaatgaccgcacacagtccaaagtttacttgaagtgatgcaacccacatattagttatagttatagttgttatagtacagttacactgcttcctctctcccccttcctgcacatcaccatcactatcatcatctcaaagcagcattacccacaaacatttattgagcacttactctcaatgtgtacaaccctttgtgttttgcagaggatatgaatttcattcctcaacaagggctccaagaagtgtcacttttttttttcaaaatcaaaattcacttttctgggaacaccatctggtcaggctggtgggaaattacatttcagtcatccctggggctttccctcatccccagttccaccaaggactgggcaatggtgtcgatagttttacaaagtctagaacattggctgggcatagtggctcatgcctgtgatcccagcactttgggaggctgagaagggaagatcacttgagcccaggagtttgacaccagtctgggcaacatagtgagaccccatctctattttctaaaaaaagtgtagagcattgggagaaggccctctggccttgggaacataggcgtccctcctcatatgttccttatccaggtccctgtggctcctaagtggccacagctctggtgcttttctgccagccgtgcacagtgaggtggggggtgtcttagctgagacacagtgcccagtggtgggcatccagtctttctgtcctgtgatggccgccttctgcttcaagagaataggtcctcattccactcaagacccagcaacaagatagcccctccatcatcctgggagaagtgctccaaacctccctcaactcaagctgtctgggtcttccccattcaacagctttttcctcactttcctctccttctgggactttcttcacacaatctcccttttgggccactagaaaccagtgctggcttctcctgcccaaagatgggggaatgaaaacttcagtgccactcagctttttcttgctagtgcatctttttagttagataaaacagaggacccagagaagaatgacacagggttcctgcagccaatgaccttaaagtgtatttggggaggccaacgaaaaggatcaatagcaggtcagggcccagcccagtgtgtgcacacctgcccccaagatgatgtgccactttccagcatctgtattccaccccttgttttctgctcctttctgacccatgtacctgaggctgatttccaggtcactaagcccgggaactggagagatgtctgtgaagggtctgccaccgtgatcctcggggtcacctcctcggtgccctccctgccactccccaatgtcctcctgatggccaatgttacctggccccagggtccatttaccacctggagcacacctggtgtcgccccagtcatcaacctcagcaggtaaaggcttgagggagggcgggaagggatggaatgattgactgggatatgcattgctttgtagctggattttagatcaaaagaaaagatagcgttctttagtgcataaaccctgtagaactcattcattcatttgtttagcaacgatttatttagtatctttttttttttttttttttgagacagagtctcgctctgttgcccaggctggagtgcagtggcgggatctcggctcactgcaagccccgcctcccgggttcacgccattcaccgagtagctgggactacaggcgcctgccaccatgcccagctaatttttttttttggatttttagtagagatggggtttcactgtgttagccaggatggtctcgatctcctgatctcgtgatccacctgcctcggcctcccaaagtgctgggattacaggcgtgagccaccgcgcctgaccttatttatttagtatctatatttaccaagcactgtgctttgtgctgggatagggcagtacccagtccttgtctcgagcctggtttttgagaatcttggcttccttttctgtaaatgtgtgtgtgtgtgtaagtgtgtgtgtatatatgtgtgtgtgtgtatatagacacgtttccatgtcttttaaaatctttttgtaaatatcatttcgataatttctttagtaatatgagtgaattaaaattcacttgacaagtccctaatattagacatttagaaatgtttctttgtcaatatagatagagggggtttccaaggaaaaggtggggatacaaaagtcaaacacgactatgaaatgctgagattgaaaaaaaaatactagatatacaggagacagctatccttttccttgccctttcgacacagtaagtcaggatatagggagaaagagtcctagaaactgagtcaggaaaccttagttccaggtcacacttaataagatctaaacttgggcaaatcacttagcctctctaagcctcagcctcgaaatctgtaaagcggaattaatcatacttatcttggcagggcacagtggctcacatctgtaatcctagctctttgggaggctgaggtgggaggatcgcttgaagccaggagttcaagaccaacctgggcaacatagggagatcctgttactaccaaaaaataccaaaaaaattaggtgggtgtactggcatacacctgtattcctactaaagtcctggaaattggagaagagtcagtcttagtaatcacccccactttcattacatgagctttctcccttcagcatcccccaagcagagaggtaggaggccagtgacgctgagccacctctaggtgggcacccacatggtcgattgaaaccacgggctcagccgggcgtggtggctcacgcctgtaatcccagcactttgggaggccgaggcgggcggatcacgaggtcaggagatcgagaccatcctggctaacacagtgaaaccccgtctctactaaaaatacaaaaaattagccgggcgtggtggcgggcgcctgtagtcccagctactcaggaggctgaggtgggagaatggcgtgaaccccgggggcagagcctgcagtgagccgagatcgcgccactgcactctagcctcggcggcagcgagactccgtctcaaaaaaaaaaaaaaaagaaaccacgggctctcccatggaaatgtcctgattatgtccaggcttctccccctgaagtacgtggagctacgaatctacgaccggctccagcgcatcctgagggttaggacagtgaccgaaaagatctactatctgaagctccacgaaaaacacccagagattgtgtttcaattctgggtccgcttggtgaaaattctgcagaaaggcctgtccatcaccaccaaagacccgagaatcaaattcactcactgcctggtgcccaagatgcccaccaactccacagaaacaacagtaagtgggcctccttccgggacctgtcgagaaataagtatatataagtatatatgtaagtgtctgtgtatatatatagacttgtttccatgtcttttaaaagctctttgtaaatatcattttgataatttctattcagtagtatgaatgaattaaaatttatttgaccagtccctaatattaagacatttagaaatgtttctttttttttttttttttttttttgagacagagccatgccctgtcacccaggctggagtgcaatggcgcgatctcggctcactgcagcttccacctcccgaattcaagcgattcttgtgcctcagcctccagagtagctgggattacaggtgtgtgccaccatgcctggctaatttttgtatttttagtagagatggggtttcaccatgttggccaagctggtcttgaactcctgtcctcaagtgatccacccaccttggcctcccaaagtgctgggattgcaggtgtgaacctctgtgcctggcctgtatttgtttattattgtaaataatgctaaaacaagcatttatatgtatgatctacatttctgattatattctcagttaggtttttagaagtagaattcaaacagcatgaacattttcaaggctcttaacacatattgccagattatttccataaatatcataccaaattatactctcaccaatcatatgagtgtctgtagtctggatgcagtggctcacgcctgtaatcctaacactttgggaggccaaggcaggtggatcacctcaggtcaggagttcgagaccagcctgcccaacatggtgaaaccctgtctctactaaaaatacaaaaattagccaggcatggtggcaggcccctataatactactcaggaagctgaggcaggagaattgcttaaactcaggaagcaaaggttgcagtgagctgaaattatgccactttactccagcctgggcgaaagagtgaaactccatctcaaaaaaaaaaaaaaaagattagtatgttactgtgtatcttattacaattaagaagtaaatgttttaatgcatttcctagtataataggtaaagaagtggcatctctgattttcaatgagtttcagcattgttgcatacatatatacatatgtaacaatcgttacatacatatatacatatgtaacgattgttacatacatatatacttatgtaacgattgttacatatatacgtatgtaacgattgttacatatatacgtatgtaacaatcgttacattgttatgtatttgtagttatatataacacaagattgtttttatatatatatatattaatgccatatatatggcattgtctgttgtgttctttggccatttttctattggcaatcttgtgtttctctaaattgatttgtaaaattaaacttttttttttttgagatggaatctcactctgtcaccaggctagagtgcagtggtgtaatcttggctcactgaaacctccgcctcccaggttcaagcgattctcctgcctcagccttccgagtagctgggactacaagtgtgcgccaccacgcccagctaatttttgtattttcagtagagacggggtttcaccatgttggccaggatggtctcgatctcttgatctcgtgatccaaccaccttggcctcctaaagtgctgggattacaggtgtgagccactgcgcccagcctaaaataaaactttttatacattgggattttggacccttacaaatttttacaaatatttcctcaagtatttgcccttcctctttggtttatttagggtacgtctttgatacacataaggcctttccaggtcctgcttggtgtagaagcacaggaaggaaggccaatagattggactgttcaaaaccttcagatttcagaatctaaatgctttcctcctctcacttaagttctgtgcttcaagtatgttattgactctgaaggtcagcagttttacagcctgacagccctgcctctgaacgttcagatctgcactcaggacagagcagccactgcagttgaccagggagcaggtgtgaccctgccaggggtctcatttcttgttggatgattctcgggacttaatgctgaaggaacaggttcccagggttagggtgtgaaactcaactgtaatatcacaaaccccttcaaagttctaccccgaggaggccaagaactctctgagcagacctagccatctgacgctaaatttctccatccagcctgaaaacagcctcctgtcatccccccagcccagcgagcccctcgtgctgctggcggctgagcagaccagtggcagtttctcacagctctcaggaaagccccagctcacagcagacaggtgggtcctctgtggggtcagctccagatcccttcctccagtgtgaagtcatggggtcaacgaacctatctcagttccttctttgtattctttgtattttagatagtcatgcacatggctttttctgtcaattttattgtaagcctgcctttgaaaacaaggtctttggctctttgatctgaatattcacttcttaggcaaactccagtgttttctaatgacaggtgttcaataaaaggaatgagggatgagaaaattaattcaaagaagtgtaagctaacaaagcaggctcatggtggagttagctattgactatttccaatccaagctcacaaggatccctggggtaaaaccctagttctctttgcctcatctgcctcttcttttttagttttctttttcctttctttctttctttttttttttttttggagacagagtttcactcttgttgcccaggctggagtgcaatggcgtgatgtcagctcactgcaaactccacctcctgggttcaagtgattctcttgcctcagcctcccaagtagctgggattacaggcgaccgccaccacacccggctaattttttgttatttttagtagagacagggtttcaccatgttggccaggctggtctcgaactcctgacctcaggtgatccacccaccttggcctcccaaagtgctgggattacagatgtgagccactgcgcctggtcctcaccagcctcttctgcaaaatggacagaataagggaaacaaccagtagctccaaagtctcattaatttactaataattgtattagattctttctgtaacaagtaatagaaactcaaagcaagatagtgcaaccaatatgctgcacaagtgcaacttgtagggtatcatcaaaatgcaaatttattttgtctgcccttcataactttttcagtgggagaaggtttcctcttgcccctggataaaagctggctttctgggcaggccacatagcatatgggctctctctgagaatataaaaggtcctttggtccatttaaattgcaaaagcagcctcaattctgaaattaaaatatctaatgtctgaaaactatcaaaaccctgaacttatcacatcttcttaccctcagtctggctccctatcaaggtgacctttcctaggggggaactgggttgtcactcttctctttctgtttcctaatatttaaagctaccttttttctcttaggagctttctttcttttttctttttccttctttctctcgtttctttctttctcttttatttccccctcccctcctctcccctcccctcccctcccctctcctctcctcctttcctctgctctcctctcctttcctctcctctcctttccaacagtgtctcactctgttgcccaggctggagtgcagtgccatgatcttggctcactacagcctcaatctcctggggtcaagcaatcctcccacctcagcctcccaagtaactggggctacaggcatgcaccaccatgcctggctaattttttaaatttttagtagagacaaggtcttgctatgttgcccaggctggtctcaaactcctcagcccaagcagtcctcctaccttgacctcctaaagtgctgggattacagtcatgagccatcacagctggccaggagctttcttgggttctttgaaatctcctttctggcccctcaactgcaacacctccctttcatctggccacactgcacccctcccccacaacccccctggccatggctctgcagggaccatgctcccccaggcactagctatcccctttaaggagtcctcctgggtaaggcttacagtggctccaggctggtgtacacttgcttgctctctctcatacagtccacatctggtcctcaggaatcatcctctcatattttgaccagccattggagaggaggaccttgcttcctaggcacagaaacaactcttctcccagagtcctagagccacagctcaagccccctgggttgtccaaggaaggctctctctttcagcttaaggaaaaggagccagcaactctttacaaaggactctctccccacgtgacaacccaagcccttggttaccaaggctggcaatcccttcaggcagcccagctcactctcacttctctgatcttaaatttttagtccccgggattttgtctttgagtcataatacattatattctcaacacatcaaagcagtacttaaggtttgaagagttgtttgttcctccacagggcaggccttagctccaggctccctcctcctcctctgtggctttctctcctcgggttgcccttaacattattgcatgtgtgcatattgtcactgccccacatttccatatttctacatgtccttaaagcactggagctggaaaaaggcatgattagaaagtgagttggttttttttgttttgtgttgttttttgagaaggagtctcactctgtcacgtaggctggaagtggtgccatctctgctcactgcaagctccgcctcctgggttcaagcaattctcatgcctcagcctcccgagtagctggaattacaggcgtgtgccacatgcctggctaatttttgtatttttagtacagacggggtttcaccatgttggccaggctggtcttgaactcctgacctcaagtgatccgcccacctcggcctcccaaagtgctaggattacaggtgtgagccactgcacccagctgaaagtggtttttaagttaaattttaacaatgttttctttttcttctattgctttcaataaccccaaaattccctgggctcctacaggaacaatgacactgccattgaaatagacaactgcagcagctacaagataccctctccagtggcatctccaatcaatttgaatatacccatgagagctgccttgagccacagcctctgggaacaagaggactggaatgagcaccttctacaagttcatatagccagttacctaggagagcacttcttgggagcctgacacctaggcaaaacatgctcttccttgcatacgtgtacttgctaccacctcttataatgctccttttccactgtgagccaagtgaccttgggagaggtaagatggtgtttccaacaaggtgcttctctacttccaccaataaacttccaagtgagtccctaatttttgcaggttgggctatagggaggctccagtttgggaaaggactgactgagaacaggagcagtttttggaaaaataggtgggaaaagttactgtctgtgtgtacagagaactacctgagactgggtaattttatttatttatttatttatttatttatttatttatttattttggagatagagtcttgctctgtctccaggctggagtacagtggtgcgatcatggctcactgcaacctccacctcctgggttcaagcaattctccagcctcagcctcccaagtagctgggactacaggcacacactacacctggctaagtttttatattttagtagagatggggtttcaccacgttgcccaggctggtctccagctcctgagctcaggccatccagtcacattggcctctcaaagggttaggattacaggcgtgagccaccaggcccagcctcgagtctgggtaatttataaagaaaagaggtttaattggctcatggttccccaggctgtacaggaagcatgactggggaggcctcaggaaacttacaatcaaggcagaaggcaaaagagaagcagacctgtcctacgagtctggagcaggagaaagaaagaagtgggaggtgctatgcacttttaaacaaccaaatctcgtgagaactcactatcatgagaacagcaaggaggaaatccacccccatgatccaatcacctcccaccaggcacctcctccaacactggggattaaattcaacatgagatttgggcagggagacagatccaaatcatatatcagtctgctcagttgaaaccacacaatagccaagcaaagccaagaaagccagtccaaggctggcttggaaagggcctctgaggagaaatcaactttcaaaggggcagggggaaatagaggttgagctactgcaagcccaaaataaaagaaatcctgagaaggatggtaaccagctggaagattcctttgtgttgctccactatatcaagcaagaaattgagtctttggctgggcgcggtggctcttgcctgtaatcccagcactttgggaggctaaggtgtgcagatcacttgaggtcaggacttcgagaccagcctggccaacatggcaaagccctgtctctacccaaaatacaaaaattagctggatgtggtggtgcacacctgtagtcccagctactcaggaggttgaggcaggagaattgcttgaaccaggaggcagagcttgcagtgagctgggatcatgccactgtgctccagcctgggtgacagagccagactccatctcaaaaaaaaaaaaaaaaaaaaaaagaataaattaggtcttcattgccctgtgttagtgtaaagctatgaaggctcccctggctcatacaacatttcattgctaatgaaaacatggtgaggaagatattgactgcccatcaccagaaattctgattaatttgactgtttcttacccagaacctaatgaaagtgaactggaagacatggcatctttgagtattgggaatggggcaggagctttggccaacctttatacacatagggaatacttacaaggaaaataccatgactcctttttttttttttttgagacagtcttgttctgttgcctaggctggagtgcagtggtgtgatctcagctcactgcaacctccacctctcaggttcaagcgattcttgtgcctcagcctcccaagtagctgggattacaggtgtgaaccaccagtccggctaatttttgtatttttagcagacacagggtttctccatgttggccaggctggttttgatctcctgacctcaggttatccaccctcctcggcctcccaaagtgctgggattacaggcatgagccaccacgcccagccccaccacgcccactccaatatttaataagtatttgtcaggctcctgctaggtgctagacactgcgtttgacgctaagtatattggagagaacaagacagacggacaagttacctgccttgagggagggtctgggagagatgccaagtcctattttggagacatagtgaagccattaatgttgacctgatgtctgagccacccagtctgcaaatgaaagctggaggccctgctttccagcatgtgtggttcacatcctatgtggtgcagaaagaaagaacatggttgccctcctcttgtgcatgctcagttgggctgagcagtcaaatctggctgaattgagtcagaaaagacatctgagttaagaggatgcctgatgcttgttggttttgtcttgcctccagtaaaattaaaaacaagtttcctttcagtatgttacaatcaaataagctgagcattgttggtgctggtgagggacatctagaagctgaacttagaaaagactaatgtgcagggtgattgtacttccaaatgcatgcctgttgtcctggtatcattattaatacatacccatttcactctgagaagtgtccctcagtgaatcacaaatcatgtggccatcctatctatatggcatacttataaacattgaaaggcttgtcatccccacttctttgtcttggtttaagccttcatcagccctcacctagactattgtattaatagtaaccccaggccaggcatggtggctcaggcctgtaatcccagcactttgggaggctgaggcgggcagatcacgaggtcagaagtttgagaccagcctggccaatatggtgaaaccccatctctactaaaaatacaaaaattagctgggcatggtggcgcacacctgtagtcccagctactcgggaggctgagacagaagaatctcttgaacctgggaggtggaggttacagtgagcagagatggcgccaccgcactccagcctgggcgacagagccagattccgtctcaaaataaaataaagtaaaatagtaaccccaattggtctcccagactttatcatcatcatcatcataatagctaacatctttagaaatttgctatcttctaagcactatgctgactttacaaagatcacataaaccacaccacaagccattgagaagtagatcttattattacattttataaatgataaaccggagccacagagaggttcaagaacttgcttaaggtcacacaggtagtaagtagcagagccaggacttgaagccagtctgtctaactccaaaatccaaattactcttgatgcctctccaatgtcttcccaactcattcccttttcatacctctaacagagcaactttttgacacataaatctgacagaaaggaccaggcacggtggctcatacctgtaatcccagcactttggaaggccaaggtgggcagatcacttgaagtcagaagtttgagaccagcctggccaacatggtgaaaccctgtctctactaaaaatgtgaaaattagccaggtgtggtggtgcgcgtctgtagtcccagctactcaggaggctgaggcaggagaatctcttgaactggggaggcagaggttgcagtgagccgagatcactccactgcgctctagcctgggcaacagagcaagattccatctcaaaaaaaaaaaaaaaatatctgactgagtttcctccttaataaaaccagaccctttgacatgaaatgactagacccctgcctctctctccagcctctccactggccactgctgccatagaatcttatgctcccaccatgccaaatttcttgtggttccctaaatgcgccatgtttgaagatactttgaggacattgtatatacttttgttctacctgagatacatttgcttactttctccacatattgccctcatgacacttatccttattgatggatttcttcaatgctactattgtgccttacatgtgccttgtattatagcatttttatagcatttctcacccaattgtggctatttgtttacatgtctgtctccttggtggaactgtgaactctgtcataacagatgccattttatgtcagttagacttctttggttgccagtaagagaagctgactctaatctaaaccaaaaggaattcattggacggatgtgggttggctcacaaaatcaaagggacaactgcggagccgatcttggaatgctctgacaccagaacagctctgtgaattcagataggggtagtgaattgaccatttcatcaaatgctgcagcaagctaggtggtttccccaaaggaaattgaggagtgttacaagaagaccattaggggaacggttatctggtggctgataataacaaatttccatggcagtctctttgctctctgttggaagaggtactccaccatgggccttgagcatctctacacatccttgctaagcgtgtcaaatttcaagtcctaactgtcctctgtctctggaggaggagacaggtttggttactgtttgttgtaaaaattactgagcccttcaccatgggtgcctcagctgtatgcaaagccccttgtattgctgggggacagagcaactggtactgccatgctggtgctctggctgtttgctgttggcaataaactattctgttttggttcattgaatctctgtctactttgggcacctatgtgatcatggtaaatcaacctgcttgcttgcctagtcatttttttagagtattgttatgccttgacatcctctatgagacctagattcttctcggacactgtccaaacccacatacaatctttttttttttttggagatgaagtcttgctctgtcgcccaggctggagtgcagtgatctcggctcactgcaacctccacctcccaggttcaagcaattctcctgccttagcctcccgagtagctgggattaaaggcacgcgccaccacatccagctaatttttgtatttttagtagagatggggtttcactaggttggccaggatggtctcgatctcctgacctcatgatctgcccacctcggcctcccaaagtgctgggattacaggcgtgagccaccgcgcctggcccccctggtttcttccttacctttgtatcacaaaacttctagaccaaacagtaaatataaacgccacaagcataccctatgcacaaaatgagagaaggatttaatttaaataacatacatcactgcaaagaaagaaatacaggtggaagttttagttctttctgcttcttggttacaagtcagtagtagttgtcatttcttacttccctcctatactaccattccaggtacctcttgctttgactgggttcattccctggtagggagtccacaaactttcactcctgaaaatcctaagcccttgatggttttgcacatgtagagttgtgtgatcttcttttgactgggcaagagctgtaaagaggcatctcagtttcctctgagtaccattcctactcctctctgcccccattctgtagaaccatctttttgcttttaataataacggtcccccctccccctcccctccccctccccctcccccctccctctccccacagtctccctctccctctctttccaccgtctccctctgatgccgagccgaagctggactgtgctgccgccatctctgctcactgcaacctccctgcctgattctcctgcctcagcctgccgagtgcctgcgattgcaggcgcgcgccaccacgcctgactggttttcgtatttttttggtggagacggggtttcgctgtgttggccgggctggtctccagctcctaacctcgagtgatccgccagcctcagcctcccgaggtgccgggattgcagatggagtcttgttcactcagtgctcaatgttgcccaggctggagtgcagtggcgtgatctcggctcgctacaacctccacctcccagccgcctaccttggccttccaaagtgccgagattgcagcttctgcccagccgccaccccgtctgggaagtgagaagcgtctctgcctagccgcccatcgtctgggatgccaggagcccctctgcccggctgcccagtctgggaagtgaggagcacctcttaccggccgccatcccatctaggaactgaggagcatctctgcccggccgcccatcgtctgagatgtggggagcgcctctgccccgtctgggatgtgaggagcgcctctgcccggccgtgaccccgactgggaggtgaggagcgtctctgcctggccgccccatctgagaagtgaggagcccctccgcccggcagccgccccgtctgagaagtgaggagcccctccgcccggcagccgccccgtctgagaagtgaggagcccctccgcccggcagccaccccgtctgggaagtgaggagcccctccgcccgacagccgccccgtctgggaagtgaggagcccctccgcccgacagccgccccgtctgggaagtgaggagcgtccccgcccggcagccaccccgtccgggagggaggtgggggtcagcccccgccggccagccaccccgtccgggagggaggtggggggtcagcccccgcccagccagccgccccgtccgggaggtggggggcacctctgcccggccgcccctactaggaagtgaggagcccctctgcccggccaccaccccgtctgggaggtgtacccaacagctcattgagaacgggccatgatgacgatggcggttttgtggaatagaaaagggggaaaggtggggaaaagttagagaaatcagattgttgctgtgtctgtgcagaaagaagtagacatgggagacttcattttgttctgtactaagaaaaattcttctgccttgggatgctgttgatctatgaccttacccccaaccccatgctctctgaaacatgtgctgtgtccactcagggttaaatggattaagggcagtgcaagatgtgctttgttaaacagatgcttgaaggcagcatgctcgttaagagtcatcaccactccctaatctcaagtactcagggacacaaacactgcggaaggccgcagggtcctctgcctaggaaaaccagacctttgttcacttgtttatctgctgaccttccctctactattgtcctatgaccctgccaaatccccctctgtgagaaacacccaagaatgatcaataaaaataaataataataataataataataacggtcaatccactctaacaactccaaaacccccttctacacataacaccatgctctcctaatggtaggaggagacaaaaatggcagccgcagttcagttttcagttggtggaatgatttttgtgcacctggtgaaatcactttcacccttaggtattaaaatctccaaacttcatacatgcaattaaaaattattttttatttttaaaaaatctttttccacatgttctatgcaatttttcatacaactcttccttaagaaactcctagaggatgtacgcaattaaaatgaagtcaactcagaaaaacacggctccaggaaagtggtgggttcaatgtaggaaaaaagtgaaggcaatatccaggtgaagagagatgaagagagagtccagaatgacaggagaacagcagccccagaaagcagtcagctcttactggagcaggagagaggactctgctaaatacatctccgcaaagatcaaattgatggaatacctgatgtgtttgaatgcactgagagacttacgcttatggcaaagtttaggggtgtgttaggaataggactattaagccaagcaaacaaaaaataatataaatattaactccgagaggaagaagttgtacaaaaaaagaaatataattcaagtatgtactatatctttgactattcataatactgtacacatcgaatatagattgaatcaaagcagaggatggttgaagctcaatttgggggatgggggaaaggggaagggaaaaaaggtgaagattaaacccttcccttccatggctggaagttctgtgccccagaattcccttggttcctgcatgttctccaagctgatctacatctaagagctcatcacgtctggtttccaggtgggtttggccagtgggaaacccaggcaggagatcagagaggatgaggagaatggggtcaggacaactatttcctcccttgtggtgacataaggtaggctgttaacagagggaaactgtcagaagtatttgaaccagagcaactccatcttgaatgggggctgggtaaaataaggctgagacctactgggctccattcctaggaggctaggcattcttagtcaaaggatgagataagaggttggcacaagatacaggtcacaaagacaccactggccaagacccaccaacactaagatggtgataaaagggacctctggtcgtccccactgctcattatatgctcattataatgcattagcatgcgaaagggctgctattctctaataaacttgctttcactttatggactgaccctgagttcttcttgtaccaggtccaagaaccctctcttggggtctggatcgggacccctttccggtaacaaaactgctcctctcgtggtggcttcctctactagactctcctgtatccagtaaccactccctcccttcatccttcagatccctggtatggacttagctagcttgatgcccccttcctgaattgtgtaacgtgagcaggaacatcactcatctccatgcaggcgttgtcgcagtggggccaccatcctggccaggcagtcccggccatgagacagtcgctgggcttccctccagcttactgctttttggttctggcctattctccatgcctggttcttttaaccttcagttggtatgaagagctccccaatagtcttccaataaattcccttcggcttgggttggctgcatgttttctacgtgtacacccatgaagtctaattgatgtggttctgtgcccagaaacatggaagctgcgtagggaaacgtgccagccatatgtgtgtacctgccagtgcctgggtcctactagactgacccagttaaagtgtctatttcttgttaaataaatccctttctgccatagccagctgtggctgctccacattgtttctccttcaaaatgagggaagaaacaacagcccttgctgactgggctcatccttgaagttgatttctcagaatctatttcttagatgaaaacaccacacggattggtgaaatttctaatggccaatacacacaccatttaaaagagaaaagaaacaaaacattgttatccggagttaattatgctccaccaggacatggcatctgcaaaaacaatccccaagacaatgtaaaaatgcatcttaaagtttctgacatggaattcagagaaaagagaaaatgtcctcaaggaataacacccaaatggaccctcttaaaagatgtggtggaaattatatggaagcttcataaatgcctttgtaagtcttgagaaaaataagcagcgggttaattagggctttactgttgtaggtgaggcagccggcagggaagcagagaagctgggagcatgaatgtatagaaacgcgtggttctgggttcattagtgacctcccagaaacacaggtcatcaatttagagaaaacaaaacacaaggggctcatctcgagaaatccaagaccatggcttcaaaagtggttccaatcactgagagtggtaaagcttcataatttaaaatgaatatttagagttattaaggctgaggccatttacagaagctgtaacttgaaaccaccagaattaccacaatctacagatagtctaagagaaggcggttctggattttgctctgtctctgattcctgcctgatttagaacaaatcgatttatttccccattggggatacagataattttcttttagtaaactatcactgaatttttaaattatgtccaaagaaaacattgttttgtggtgttaataattgcaacagcagccagaaacacaccatatatccattacatgcaaagaaatagtcacagttagagtattctaagttgcttttataatctttctaaagtctccaaattaagtacactgccttggacaaggaaggaaagaaatgtctgtgacctccatccctcctctcactccgttcaagggccatatctggatgcaagaggaatgtggtgttttggggtcctgccactctgtctgtagtcatcgtggtgctgaagcttaagttccatgagcagaagctgctggagcaggtggacttcctgaaatgggaggtcacggaccacagcctccacgggctgcctccctggctgcagagggaggccgacccgtgctgcagccagcggagccttgcatgccagagctgcccaaacactgctgcacaagctgtatgctctgggcctggtgcccacacatggcttgctcgaactctgcgacattgtcagggctttgtccaggccttatccttgtcgttgtcgctgctgcctcctccctaccattctcctcaggctgcagggccttcatggagcaaagccatgtgcttgtaggccctggatgtggttaccgactccacctttctttgtcacatgccgcatggaggactttgtcacctgggtcggctcatccaagatcaagcaacacatgccatcatacaacggggagtgcaatgacttcgatctggaagcctagctggtctcctagtctccacggctgcctgtcttttacagatacgacaaccaatgctggagattctataagggcgctccccacaagagtgtcagcaggttgtagtttcttaggttcctcaatggcaggccatgcacagagccaaggaggggagagggcgtggtgcctgttttcaaggaaattttcttagtattcttagtacttggactactgattattaaatgactgtgccttgggagacagtgaaaagtggtttggtgctgcactgtagaattgttagcttcttgtgttggaaactttttagtgtaaaagcaagaactctggccgagcatggtggctcacgcctgtaatcccagcactttgggaggccgaggcgggcggatcacttgaggtcaggagttcaagactagcctagccaacatggtgaaaccccgtctctactaaaaaatacaaaaattagccaggcatggtggtgggtgcctgtaatcccaactactcgggaggctgaggcagggacaattgcttgaacccgggaggtagaggttgcagtgagtcgagattgtgccactggactccagcctgggcaagagagtgagactctgtctcaaaaaaaaaaagaaagaaagaaagaaaaaaaccagcacatggactttagtccacgtgtaacatataacccatgataatgtaagtaaactttgataggacaattctataaggggtactggtcacaagaatttttcctctctgagcataagaattcagtccacccagtccatgcatctatatataacaatactttgggaggttataagcacaggaaaagggtttgtggagaatgactaaactcacaaactgaaatgaagactaaatatattttgcaaggcagttaatttaggcataaatatagtcactcaactgtgaatatcatgcatggagttctgaaggctgaacttccagccttcttcactaaagactgaaatttgctttgctcagctcttttctggactcctttcttcctagttccgttggtctttgtgtactgacattatctctatagcaagttgccttcttgctttaaggtctataccagtctcacgtttagctgcaaacaatgagaagccaatcaacaagggcttaaggaactctattcactatgtctaacctttaaagaaaaagatgttactatctttgcaggccaaaccaagtctttggtaatacgctgggtatcttctctaagctcctgctcccatcccaccccaggccaggccaagccactgtccaccctccaccatcctgctctctgccccagaggctgggaacctctatggactgtatcaagggaggcgcatgctgtccggctttggttggatttgaccagtgggaaatcaaggaggactgggtaggagagtctcaggctgcagcacagttccaagaaagtttcagcagactgacaatgaacccttaaattcagtgcacgttagaggaatctgcatctccccggaatggggtctccctgcagctggaggtctgaatacagcatcttcatggtcaccacaaggagaagtatagattacaccactgcccaagtccacctgaacatttttaaattttatttttattttttttctttgagacgggagtcttgctctgttgcccaggctggagtgcggtggtgtgatctcgcctcactgcagcctcgtcctcccaggttcaagtgattcttatgcctcagccatcccagtagctgtgattacaggtgtgggccaccatgcctggctaatttttgtagattcttttgtagagacagggtttcatcatgttggccaagctggtcttgaacacctggcctcaagtgatctgtccgcctcggcctcccaaagtgttgagattacaggtgtgagccaccatgcccagccatatattattttatttatttccttttcctccagtagaataaattccatacctatactacacattgtgcaaaataatatttttcaggttttaagacattcccaaggaagtgtagatgcttgtgtggaatttccctcccttcctccctccctgccttcctaacttccttttttttttttttttttttttttgacaaggtctcactctatcacccaggctggagtgcagtggcacaatcatggctcactgcagtcttgaatgcctgggctgcagctattctcccacctcagcctcctatgtagctgggactgcaggtgagcaacgatgcctggctaatttttaaaaatattattatttgtagaggtgaggtcttgctatattgcccaagctggtctcgaactcctgggctcaaagtgatcctcctgcctcagcctcccaagttgctggaattacaagcgtgagcccctgtgcctggctgcttctgtggaacttctatacacctttttgtccattgtgttttgaaactgcccactgcccctctgtgtctcatttttctaatctgtcccataatctctatgtcctcttggccattttagatgtctttgtatcaactttctctagtctttctgtcaacacagttttttgtctggactgagatgtgtaacaagattattaacttttttcaggtctaacattctaagtcaggccaggtgtggtggctcacgcctataatcctagcactctgggaggctgaggcaggaggatcactcgaggtcaggagttcaaaaccagcctcctgggcaatagaacaagaccctgtctcaaaaaaaagaaaaaggattctaggtcaatgagtcccagtgggcagaactccaccacagaaggtgtttggaagttcttaaatgatggggtgtttggggagtcaccatggctggagggcactaacggcattctggcagttgagggccatgatgctggaagccctacagagaataaataatgatcttcttatgccactctgaccattctggcaggtgaagaacatgtttacaactacttgagtctagaccctaactcccccaacccactcacccaattttaa

SEQ ID NO: 1794 - DNA, 1467 bp, Homo sapiens
gtaaatggggaggaaatgctggggaggtgggggcagatcacatcaacatcctggcattgggctgggtcggcgtggagccccagaaatgttcccaagcccattcttaccaagaaccaatgagtaaaatcaggggcctcccacctgaggtcagggaaccaggccctggagtggaacttggggtggaaaatggccttctttgtcaactgattcattctccagaattcaatttgttctccaactcggtggtgtttgaaagcaactttatccaggtcactaagcccgggaactggagagatgtctgtgaagggtctgccaccgtgatcctcggggtcacctcctcggtgccctccctgccactccccaatgtcctcctgatggccaatgttacctggccccagggtccatttaccacctggagcacacctggtgtcgccccagtcatcaacctcagcaggcttctccccctgaagtacgtggagctacgaatctacgaccggctccagcgcatcctgagggttaggacagtgaccgaaaagatctactatctgaagctccacgaaaaacacccagagattgtgtttcaattctgggtccgcttggtgaaaattctgcagaaaggcctgtccatcaccaccaaagacccgagaatcaaattcactcactgcctggtgcccaagatgcccaccaactccacagaaacaacacccagcgagcccctcgtgctgctggcggctgagcagaccagtggcagtttctcacagctctcaggaaagccccagctcacagcagacaggaacaatgacactgccattgaaatagacaactgcagcagctacaagataccctctccagtggcatctccaatcaatttgaatatacccatgagagctgccttgagccacagcctctgggaacaagaggactggaatgagcaccttctacaagttcatatagccagttacctaggagagcacttcttgggagcctgacacctaggcaaaacatgctcttccttgcatacgtgtacttgctaccacctcttataatgctccttttccactgtgagccaagtgaccttgggagagagcaactttttgacacataaatctgacagaaaggaccaggcacggtggctcatacctgtaatcccagcactttggaaggccaaggtgggcagatcacttgaagtcagaagtttgagaccagcctggccaacatggtgaaaccctgtctctactaaaaatgtgaaaattagccaggtgtggtggtgcgcgtctgtagtcccagctactcaggaggctgaggcaggagaatctcttgaactggggaggcagaggttgcagtgagccgagatcactccactgcgctctagcctgggcaacagagcaagattccatctcaaaaaaaaaaaaaaaatatctgactgagtttcctccttaataaaaccagaccctttgacatgaaatg

SEQ ID NO: 1795 - protein, 288 aa, Homo sapiens
MSKIRGLPPEVREPGPGVELGVENGLLCQLIHSPEFNLFSNSVVFESNFIQVTKPGNWRDVCEGSATVILGVTSSVPSLPLPNVLLMANVTWPQGPFTTWSTPGVAPVINLSRLLPLKYVELRIYDRLQRILRVRTVTEKIYYLKLHEKHPEIVFQFWVRLVKILQKGLSITTKDPRIKFTHCLVPKMPTNSTETTPSEPLVLLAAEQTSGSFSQLSGKPQLTADRNNDTAIEIDNCSSYKIPSPVDINLNIPMRAALSHSLWEQEDWNEHLLQVHIASYLGEHFLGA

SEQ ID NO: 1796 - DNA, 41178 bp, Mus musculus
gcttacaggttagagggcatttttgtttcatagatcgcttaagcacagtaatttagacttaaaacagtgttagtcatcacacgtgctacaagaaagccagctgaacaagccaactcctccatggcctctgcttccattcctgcctcttggctcctgccttgagaacctgccggacttccctggatgatagactacaagctatacgatgaaatgaaccttttcatacacaagttgcttctgctcagagtgttttatcacagcaacaaagccacaattaagacaatggtcagcaatgacaagaatcaaacattaggaagatctggaaagctctgaatccttgaacacttttggtggaaatgtaaaatagtacagaagctgtggagacaatatggaggttccaaaaaaaaatgttcacccagaatgaccgaatgaccgtatgactcagggattccttttggggaatattctccagacaattgaaagcagagggaagtgatatatttatatccacgttccaaacatgagtcataacagccaaatgatagatgcaactcagttgtccatcagtggactgtattagtcccttctctgttgctataacaaaatgcctctggtctggatgccttatacataaaataaatgtatttgactcatgattctagtgactggaagatccaaaaagcatggttccagcacacacacacacacacacacacacacacacacacacacacgacacacactgtgtgaccacttgaaagaaaagcatatgataaaccaaggagcatataaaatgggccaagcacatgggatgacttgtctctaagagccagctcctatgtaacttctcacaagaagaagaatatgaccttggataaaagtattaatcaccttcaagatataatcagctctgaaggccccatcctctctccccatcatcacaccagggaccaaactcttagcacctgatcctttgggaatccatccaaaacaacaatggatgaatggataaaatacatgaagtgggggtcagggtggggctgcagagatggctcaatggttaagagtactgggtgctcttccagaagtcttgagttcaattcccagcgaacacatggtagctcacaactatctgtagtgggatccgatgctctcttgtggtgtgtctgaagacagcggcagtgtgctcatataaataaaaacaaacaaataaatctaaaaaagaaaaacacagaaagaaaaatacataaaatggaatattattcagccttaaaagggatggggattctggttcatcctacaacatgaacgaacctcaagaggacatcataatgtgtgaaataagccagacacagaaacgtgaacagggtgcaatccatttgtgcgagacatttacagtaaccagcttcacagaggagaaagtaagacagagcttgccaggctgtagtaaggcaaactccagcctgggacctggtttcctttctttttaagacaaggtctcagtgtgtagttttggctggcctggaacccactatggtggccagactggccttgaactcacaaacccatctgcctctgtcttctgagttctgggagataaggcatacaccgccacacctgacaagaagccacccttcttggccaagtctctgttccttgtctgtagtaatttgaaaagaaaactccacagttgaataatgcctttgaagaaatgaaattgaagagtcaccaggacaccagggcattgcttgaatatggcttatggaacacataacgagatgatttcaactttataaaataaaacctgagtgatatttatagcgtgcctctcctgtgcacagctcaagtaccccaagatttatgttaggtagagatgagaaaagcatcctcatgtgatagatatggaaaacatgttctaaaaaaaaaaattgaaatgacagatctctgtagggttgtcaacttgaggcttatcaagccgcatccctcaggactcatattacttaattctttgtcaacaacttggttaagtggattttataaatgattcagaatatatctgagtggctggaacgagaagtgaaaacgttcttttttttttttttttttttttaaaaacagccttgacagttctccctggtgacatcaccaaggcaaagatgctcagcactcccacagtgctgggtcttttcctcacaaggtggggacgggaggcggagctcaagcccattgagtctggttgcttctcagaaatcacaattcattcagagatgttaaaatgttgaactcaagagaaagagaaggaaaaaagaaaaggaaagaatgaaacatacaccagtgtccatccatcactaggggagcaaataagtacattttgctatgttatacaagaacatgctgtacagcaatgaggaatcatactatgaactgggcacttaaaaacctataatatagccgggcgtggtggtgcacgcctttaatcccagcactcgggaggcagaggcaggtggatttctgagttcaaggccagcttggtctacagagtgagttccagtacaaccagggctatacagagaaatcctgtctcgaaaaaaccaaaacaacaaacaaacaaacaaaacaaaaacaaaaaacccaaaaacaaacaaaaaacctataatctatgtaatttggtgtataaatatacatatatagtttaaattaaaaaaatctcctcttctgggctagcaatactccttctaagagccatagaccatctaacaaaaacctcaagagctgtcctgagactgcttttgagttgttggtcatggctgtccaagagactcttaaaacattatagactgttgctatgctcttggttgcttcccagaggtagacacaagtctttattgctgaagacaccattcacttgacacagggccaagaagcccctgagctgaaacttacctgaaagtctcctctattcaagcttccaaaggggggaaacaacaacagtcctacccagctataacgcctatgaaccacagaagcaaccagcatggcgccataaccttgagggttgtagcagcttgcataccttagccagaaccagcagatctctaagcggacctaattccctctcaacaagaagaaaatcatgtctggtactgggaacctagtaccaaggattactgaagtcacagatcttcaaaatggacctacaactgccactttattaagccagcatgatccctaactacactctacatttttgtccttataaccacagataagtgtagccttcacccttcatcaaggaaacttccctttgcaatagacagtgaccactacagaaaaccacacccgatcaaagcacagagctgtggagtgcagtcccagtggattcctctacaaaacactcgcatactttaaggctcagggaacattgtgggaaagggagggcagaaagatggtaggaaccaggggaacaggaaatttgctatgcgattgtgtctcctaggaatgtcagaggccacaccccccaaatctcaccaacatgacttcctaaacaagagctgaacaaggatgacaccatgctaacccaaatggattgggggaagctcacaaagcctcaggactacacaaagaactacaggcagccaaggaatgctgagaggggaagaacttgccttcctcaggaagagcacaccaactggttattcaatactacagtgtgggcctgaaaacatatatacaagtaactttacatagacttagcaggctatactcgcatatttaggaatataaacacacatgtgtgtatgtaacaacaattaacaaacaaacaaaaaaaggggtccatgaatttgaaagggagcaaggaggggcatgtgggagggtttgaaagggatgaaagggaagggggaagtgatgcagccatgttataatcaccccaaatcatttaaaactataggcaatgcgcacacacacacacacacaaaatttaaagggaggaattgtttatttgggctcccagtttcaaggtttccaatctgtggttaggtgacattaatttgggtctaaggtgaggctgaatatcacggctgcagagtatgtggaggaggggaggaggggtttgtttacctcagaagagataggaagcaggggggggggggagaaaaggacggcttcttccaagactgaagcaagctcttcaaacagacattctcattctttttcaagaactgagaaatggggcccagcaagggtggtcagaccacagcaagacctaaaccggcagggacacaccaaatgctgaagctccacgtctggcatctagggctcacgatggaatcatctgggcttcactagccttgggtagcctgcttctccatccctgccactggtagtgtgtattgcttctctcgttggtcagctccattccagggctgaagcttctcttggtgggtttactactgtcctatttttgttcttttctgaatccccagggctgggcctctactccctccttcttttcactggaagccccgcctgactacaggagatggccacttccggctcatattccccactgccaggagtctcaactagggtcacccccatagactctcaggaggctcccctgtcccagtttcttgcttgttccagagatgaccccacccctgacactgaacttcattctctcccagctttgccacacacacacacctgatccccatctccatgaattgtagtgcactgtgtgtcttcagtagtctcttagaatgcttgttctaagggaaagcagctgtcacctgagaaactcacttaccgtggggccatcatgatgtgggaaagaatagataagagactctgtggagacagttgtatcatctagccaagatagcacgattcaggtcacagccaatatctggctgcagctgtgtgagacaccacaaagcgagcagcccagctggatgctgagcaggcatgcaagatcaacacagagtgctgagagagagagaaaatggatccttacttgattggttgttgacttttgtttttacttccaagcattggtgtcattcatagcttgttattgagtaactagaatagaaatcctggaataacagccgacatgaagatttggggttttgttttggggttgcagtctggagacagcatggagcagggcttaaagaaggtagaggccaaagaaagcagcatgttagagggctttataggagaagtagatgccagcgagaggctagactctagagatactgtgaggcagagcctatgaggttaaacagacagaaggacagacagacaaaggtgtggtggtgggaagggaaggaagactgaaaacctttcaggattttcccaaaagagaaggcgtgataggtactgcccttcgcagaaaggccagtgaggcggtagatcaggtagatcatgtatgcactgaagttgagggactcgagaataaagttaggggaaagctcaacttggagttgaaacatgagggagattgtggtgataaccccagatacccacccatagtcatatatgaaatgacagaaggctcaatcaccaatggtccatgttaaggacactaagaggaagtggcaggtatggaattttgaaagaaaaactcagtagttagaggaactttctatttccacaaaggaaaatggaaagagcagaatcttgtagaggaattttaatcccgcagcgcagctgctctggcaaagggtcacatccaaacacagtctaggtctgtgtgatctggatggaaggcagacgtgctctggattacagtatgatctggcttgctatagacaagctcttagtgcacacctttaatccctaacaatgaaggtaaggttagtttgtagaaggaagcagccatatgctaaagtggcatcgaattgagtgacaaatcagaaaaagatttgacagaatgaatcagagataggatacacccaaccctcaggagagcagacaggaagaagctactttagagcaacactgtgagagaaggtgtgtgtgtgtgtgtgtgtgtgtgtgtgtgtcagttttagcaggacagtttcacaaacacgagtggcaggggaaacaagctagacacagagaacgagaagggtccagaagattagaacagattgccagagttagtatgaggccaggaagagcaattcagtcagaagacaagagaaaccagattgaaccagtcaccttggaagattagaaggtatggagactagaagtttccaggcatatgcccagggatagtcaggacagagaaagaaatgttccgggctcagcccagtccatgtatgtgcacaggttaggtacagctctcctctcatcccttcatctgaggaactaaaagtgaaattgatagccttggccttagaaacaggagcaagatgaagtcagaagcagctgagagaccaagtcagatgagctggtgatggaaatgcttgataaagtcattagggctctcttgagactactttccttaatctggttttgatctgaggcatttaagaagctaattgaagggtttacaaagcagactaagagacagtggctaaacactcaaaactggtcaaacttctgaaagcctgtggagttctcagccaagaatgggacatttatatcacaccccccacctacaaagctcagggaacattgtggaagaagtgacagaaagattggggaggtctgaggagaaacagtgtcctctatacttgacagaattattgctctccggaactcaaagcagctgtggttccctgcaaaaactgcacaggatgaagccagtcaacagtccagcattggtggattaggggcacaagagccttcacctctagctgaggcgttaccatctgttgatggctgctgggagaggggtagtcagtttttcttgggtgtgttgtccctggtatgttgatcatgcctagtgggtggcccctgaccattcatatgtagactgcatcgcatcaatgtgtttcaatgggtttcatataagagtatacaaagttggaagggggacaagtgtgctgagtttcatgctctggacaaggggtggaggtacatatttaacacagcaaagcagacctggcctccaggttttcccagcatcccccagtccctaccgggcatatcccatccccaaccctggactttccagcccaggggctgggctgtccttccctaggaggtttttctattcattatccattggtctcagcttttccccctccctctttccttctctctaccagcatactttctctttttctctcccccttcccctttctctcccttcccatggcaacttccctagcctcctactttggggcccagtgtacttggcctcccgagagcagtttcccaataagcctgtatttatatatattttaattgggcttgaatttgctcatttctctggcggaaaaataatcttttaaggtgcaggatacatgaagagttaaggaaggagggaggggtaagtatgattgaataattgtatgcatgtatgaaattctaaaaaatatattaaaggcattttaaagtagactaagaatattcattactacttgaagacatttgtcattaaaatgaagaaaaagaaaaataaactttccttacttctttctttcttttgctttggtggggctttttgctggttggttggctggttggctggttggctggttggctggttggctggttggctggttggctggttggttagctggttcggtctggttgggtctttagcatgcttgcaggctaaggagaagaaggaattcacagatagttttgttggcctgaattctctgaaccagtgagggcaggaatagagcagtttctagagtgagttaatgaatagtcttctactcactagagtgtggcccacagaccaggagacctggcacgaactcaaagcttgttagaaatgtttaacctgtgtttagtttgtagaagaacccagagtcagcatttgaacaagagcccaggtcatcgatatgtatagtaaatatattcttactaaaaactgggataggttaagacagaaatacggaggaagatccagagcatatgcagacactcagactccttcttcgttcatttacttaagtctgttttgatttttatctgagactcaggaagagatgattagaacgcccttcaagtacttccaagtttggtgtgtgcatgggagcggtagatgagaagtgaagctttgtgtgccgtgaaataatctccagtccaatcagagctaaggctcagcttttctctagccagaagcatctacagatgtcaccgcttagacatcaaacttaggtgtcttccttatttggttggcagtggctctgatatttttgggcttagtttcgtggttcagcaaattgttaaagtctctcatgtggctctatcatgtagccaggcttgagaactgaactaagtcaaagtgaggcttcccagccttggagtttcaatgacagatgatcctgggttccattccctatggatttcagtttaatcaggctgaggtgacactttaaagatgacctactgatgtcactgactccgtccctctaagtacttccccttcctcaacagctctcagcttcagctacagaaatcacccggggaaactctgagaatgccaacgttcaagcactccagtcaaaactggccatacctggatgggagagatgcttttgtggttgagagcactggctgctctggcagagaacccaggttcaacttggagcactcagggaatggcttacaacctctgaaactccagctctagatcggatgcctttgtctggcctctgagcgcacctgaaagacatatgctgcgcacatacaatgctcacgtcagcatttaagtgttgaaaggaagcacgtgccttttacccttcagctgaagtcttgtggcatcagttactgagcctcttggtgttcactccgattcaacagcaatagcaagaaagactgcatggtgaccatcaactatgtacataggccagtgcctttgtgttctgtgtttgtacacctagcaagaccagtttttcatagatgcgatgaattaacagccctatttcttcctattatgtaagactagtgctactgctcagaactgtgccccttcatacgtgtgattgcatcagcagtgacaccacatgatgggaggcaatttaggggataaacataaacactccgaagttttcctcaagattcacaactaacttgccagtggcttccccaacttgtgacccagagatctcatcagaatcctggcgcctgcatgctctaaatgatggttactgagcacaatttttatttgtggtcctgaactttgaattttcaataagctctagtgcattctgaaattgggaatgtctgtctttcaaaggagactagaaacaagaactatggcaaaaagaatgccttttatcagttaaattcaatatttaatgagcaccttaagctggcaaaatgccagcacaagacatgtgttcagtgtctctacaaaaatcacgacataaagcaatacatttactgtattagtctattctacaacaactattagtaagacaggcctatcttcccctgtgatgagagtggagtactaagccaatgctctaaacaggcagtttaagccaaggctcaatctcaaaacttttaggttcgctgttgtcctagaattcggtttagatgttacaggaatttctacattctctcagttgcaggtgagttgttacagatgctagaatactctaatgagaagtcagttacagggagcacacaagctatttcgttgaatcccattccaacctttatggtactgaacacgaacagcattgggacttcatttcccagaaggcagtgcgacaccgactcacgcgagccttcgggggaaacttgcctgtttttttcacgcctgccgtaaaggcgcgcggtctgctgggacatgtagtttggttagccctaggacgccccctcaaatgaatgggaccgggtatgactgagaactacagctcctggtctggccgcgtcggtggcagctgcggaggaagagttgatcaagacggccctcagggagggaaccgctggcggtggtgatgttgcgcgcggattttctagggtagcgaactgaaagggcgctttttctgcgcgctggctccccgtgccccgcaccggccatgcgcccggccttcgcggtgggcctggtgttcgcaggctgctgcagtaatgtgatcttcctagagctgctggcccggtgagtgaccctctcgggccgcgcccgggttctcgaagctggtccggggttgctagccctggccgcctccctagtgcgctgcacgggatacccacgcagtcagctactctgcagccctggcactcctccattcgttagcatccaggtgacaggaacatccagagtgctgctgtcggcatctccaagccacactttggggagtttgaagcctggagactttctcacgtgaccgatcctaggtctctaggagcaccctctccaactactactcatccaactctagcacctttcgctgaccagtgaatgaatgacacgtgtctgtctggagcaaaacttttctcacagaaagttttgtgtgtgtgtgtgtgtgtgtgtgtgtgtgtgtgtgtgtgttgacatgttttgcgaaacatttgtttttgttggtcgtagagatagatggttgtgagcacttggcttagactcatatgtgagtgatgtggtgcagataacaactgagctgtcaccatggtccctgggcatttcgcacatcacagtctttcgttgagaagcgtgctctttgaagtgtagattgggaacaggattggctttgtggtgtggtgtcttgcaaataacgttgggtaactatgtgcaaagttcagtaggcagaagttagaaaagagacaggagatgaactggaaaacgattaggactaaacagctccagttagttatttaaggtttggagcttcggtctcctttttcagacagttcaatactcagttcagagtcactagctacaggtttctatctatatactgcttagggcaaccctgtgaccaagagttacattgttttgttgaaagtgaaacagatgcaaagttgggcatcttttcactatttggaagtggcagagcaaaaatgggctggactgtatctgtctaagctcctagcccagtaacatttccagatgccttccatttttgaacttgagttttgaacatggtgtgatgtctgttggaaatttatcctgtttgatactgttggtttgaatccttcagaagtaagcagtttatttatgatcaagtctgtatgtgttatagtttgcttttagagagcttaccgttttattatgcagagtgttgatgaagatcgattgtcttgggagtggacaggaagatgaaaatgaaaaagaagtttctggatacacttcaaaggcagaaaactttggaattcaatctatttaatatatttttaaataagaaagtgatatatattcaggctagctatagaaacaaagtcagataattgcattgaatatgccactaaattatgtgaaacctgtgtgttctagcttgtgagctcttggctaaaacacttttctcaaccatcagaggggtgggtgataacagcttcatccccatggattttgaaggtgaatgagaaatgcctacctcacgttggtgacttccctagccttctcccttacaatttgtctcagtgcaggcgtacgttgtttttgtgagggtccagaaaagttctgtgtgtatccagaaatggattcctttctctttataaagtcttttcattctttataggaacttttatttagaattttattaggatcaatttgtaaatgaatccaaattccttatttaactttacatatatataaatctgcatttttgcatacaactgagggttttccttaagacgtaaggaagtgggcttattaatgcaatgtatagtacattagactgataacaacgtatgcctgatttgcttaagtaaactcttcacactgtcgagccgtgaaagccgacccgattcgtccagatagcctttaaagttccttctagatatgatcttgagatttgtggctttaatcttgagaaatcaccgtagaaacttctcagaaaagcagaagctgtgctttttaaatggcttccttggaacactcaggtgttaactctaaatacaaaggctgcaaagacttgttgaaagaagggagtgttgagccatttcccccccagttgaaaaacagattcagtttcttcttgctgacctttgtagacctagaattggtgccagtgataaggtgcaaaccttgtgcactgcgtaagcagctacacagtagtgagtgaggtcttgattcccttcttaaggagcttatggtcaaccttgaaagcatgatacatatgtgtatatgctatacacacacacacacacacacacacacacacacatacacatagagagctaatgaagcaggtaaggtattgtgtgtcttaacatcaggataacaatctgaaagattttatttttccctttaagacatgatggtgaattcaataagaaagttttatatccaggaaagaaaggaggtgaaaacgtctgcccaagtcattcctttcaaagttgctgggttgtttgtttgttttttttttttaattgaaatttgaatttttgccaaagaaagtcctaagtaagagaaggtgtctgcaattaatgattataagtcttaaataaagcttaagagaaggaaagattctgggaaagcatttcaagtttttatttattagaactttatttattcgctttaaagcgatttattccagctaacagaacccttttccttgagccgtgccagcagtgtgtccctaagatgctctccgagttagcttaaaggagtgttgaatgtcggatcgtaggaaggcatcacgcacctcctatgcaaagacaaaaagtagactagagttatcagaggaccccatgggagggagaacaggaatgtgattcctggtgagatttcttctggggcaccctaaagttagatggtggtaatggttgcccatgtaaagcctggtaacagtagcactgatataccaacccaagccatgcagtctgacctaacacagtacatgtgacctccatgtccttagccatgaactgtggataagtaaaggaaaatagatcaaatgaaggatacaagtctaaaccgcttaagctttttaaatcttttacacaaatgctaacatgccagagcacatttgcttaaagtggtgcctactcccaccccaagtaggtcctacacagctagaagtcttcaaaatagtgacagctgtcctttctctgcccccccccttttcccgtgcgtgtgtgtgtgtgtgtgtgtgtgtgtgtgtgtgtgtgtctgtgcgcgcgcgtgtgcgagctcacgcgcacatagatgaaagggacactgtccatcttctgagcattttatgatggcactgtgttcttcctgctttcatgcttggctcccaagtgcttgttttctttttctcgagggcagggatccaggtcgtgcctgctgggagctccttttcgctgtgcagagtagcttcccaggaactaccctgtaagagctttgacccaagcttttagtagaaactggaagggaaagccagagaagtgttgacacaccagtgtgatgcttgacacttgatgcatattttcttactgagttctcctggcaacagtatatagttttcattttataaagggagggggggggggaaaggtgttgcgtgtgattgtttaaaagggtacccagtgggctaaggagatggcttacagttaaagtgctcattgtacaagagtgagggctagagcgctaatccccagaactcacacgcagtgcctgtaattccagcctggaaaggcagagacaggcgatcccagagcaggctggctatctctgtgagttctggccttgattgagagcctgcctcagctaatgaggacgatgaaccagcaaggctgattctggacatcaacattagcacctcaggcttacacatgtacatgttcacaaatgcactcccacacatgcagacacccatatgcacacatgaacacacagtacacacacacacacacacacacacacgagaaaagggaggcagagaaaagacagccgtcactattttgaagacctctctgtgtgtaggagccttggctggtcatcttcctggttctaattgcctttctggtatgtggcagagactgtgttaagtgctttcctgggacctgttcatccgtgcaacaataaaccagagagagaagcactcatactgtctccattttaaagaaaatggcatttagaagtttactaccgtccacaccacgcagtaagtgacaaaggtgctcttgcatgtcagcaggaaacaacgtggagcaccatcgttctcagctctgtgccgccacgaacgcacagaacacacacgctcttgcacacacaagtacaggcacacccttttcccgtgaggatccagtgggggaacccttgaaagtctagattcccagggccccaccccaggacagtgaaatcaggtctgggagggtgaacctctctgggaacatggcttcttcctccacactgagtaagtagttggcagagccgctgagctatatccctagcccccgtcctttttatccttataattttgagaagaacaccgcttcactcccccgcagtgctaggcttacaggctggcactgccctgctcagcctgacccgtgggttcccagagatcagcctggactgcctagagttaaatgtctgctctcttgtattaaccaatggttttaattagcttcttgcttgaatgagatgaatgtcttatgcaatcatttatggattcctacaaagtttagccatgtctcttgaaccaagtaactctgaaaggcaaattgttgaactgtgtctaaagcagttaggtttcgagaaacctccatcggcagcagagctctaagtacagctacgtgttccagatggcaagcctagctctgggagatgttgtcttccttgcctcttactgtgcatgaggggtgcggttaagggtttgcactggggatgtagctcagcgggagagtgctcgtctagtgtgctgcctagttttatgttaacttgatacaagctagggttattggaaaagagggagcctcgattgagaaaatgctctcataagattggactgtagacaaatctgtagggcattttcttaattcttaattagtgattaatggggggagggccctgtgcattgtggatagtgctattccttggctggtggtcatgggttctataaggaagcaggctgagctagtcacggggccaagccagtaagcagtatctatccatggcttctgcatcggttcttgcctccaggttcctgctctgtttgagctcctccctggcttcctttaatagcaaacagtgatgtggatgtgtaagcccaacagaccttctctttccaagttgctttggtcatggtgtttcattacggcaataataaccctaactaggacaccttgcatgttcaaggtgtctagtttttatatcttgtcattagtattcagtattcatagcaccagtagagaatggagttgactttaatagatagcactgtattaacgtataactgctttaatgagcctcgttcagtggtgtcaggtgggtgtctctggttaagatgaagacagactctaaagctggttgatactagtcttagggggaatttggatgctcacctgggacatctttagtgatagaacagaactgggggaggggcagttaaaaaaaaacggatcctgtgactgattttcagagcgtctcaggagggatgtcagaaataactttctgacatgtgttcatactatggaatgtgctcctaatagtcaccgtggaagactcccggctctcccatagagcactgaaaaggatctgttgaattcctgggttatctcttgactgtctaatgtattgactcaccacaataagggttgaggggagctgccatgtgctgcagcaggatttctcagccatttttagtttattgtctcagccccagaacccattttttgatagtttttcttaatcacccttacatagatacacaattatgttgatttatgtacagacacagctatctgtgtcctatttaaatagcaagcctctttcccaccccgagaactatttttcattcattgggggtagtctaaagccacatccctatcaccacctggccagtgtgatccatgggatgtgagagccaagatgaggaagtgggctgccgaaacctatccactctattattttggtgatgtaaatataacaggttgtagtgccctttaactgagtctgtgcctcatttttttttctcattgttattcactatgcaggacacatccaggatgcgggaacatcgtcacgtttgcgcagttcttatttattgctgtggaaggcttcctttttgaagctaacttgggaaggaagccaccagctatcccaataaggtatgacacattcagtcttgtggagtccttttgaaacctaaaaagcagtagtacccacacaactatgagctccttgtttctcaagtctgggtaacagtggagacatgagtctcatgaattacactgttacattctagaaccctacttttagaataaaattcctgcccaccacatttaaatagttgtgatggagataagtgtatatatgtgtaatacagggtcagaaggactagggtgaccacagtaattattgatgtattcgttctttgtgttgatagaattattgatcatgctaagaatggtactgtcatgcaccttgggaataattggcttttggaaataaagaagcaataagtctacagcatggcaagtcactaaatgtcactgaactgtttgctcacaaatgggtaatcttatgttgtgtgaatttcacttcaattaaaagaaaatgattgacaagctaagaaaaaaatgttaatgccagaccaccgtctgtcagtccaggtgtctccacaggcctaatgcggttgttcttgtgttggacaacttgatagaggtgtcctcctagtagcaagtgttcaggagagtggtgtcactcagtttccttgggagtgacagtccctggtgaatgtctccaagtactcaagccatccttgttcttttgctgccttccttggtagcttgctgagttttactaacattaccttaagtttctgttactgtaataagaagtatcttactttcctttgggtttagtgtccgaataaactatctgtccctgcaggccagcatttacatcacggtgggaatctgatcacctttttttttaagctgctttgggtcttgggattcccccacctgctttcttggagcagggtatttggtggtaacatggtgtatataatagcacccctgctggctaaactgtctcctaccagtgctcccatttcagcctctacctcttcctctcactatgtaaccgtggctggccttgagctcacattgtagaccaggctagcctcaaactcacagagatccacctgctcctgcctattgaatgctgagattaagggtgtgcaccagcctgtccagccggcctctaccatgtcattattgcaccctgtccctcttgctgccattaagtcccccatggtctcatcttcattagcatattcccttcagagattatttcattttgcttaggtctttcatctccacagtttgtaagctatgttatgtaagtatccacatggaagaattaaattaattatactgaaagaccttgataaatgctgtttcccagtggtgtctcctcatgaggacatttggcaagaagccttgtaaactgactaacagatgtgacttagaggttgtgaggaggctggcactagtggtcttgcatgcctgttgctttcttctctatgtgagttgtcaagttcctcagactggtaacccagcctgggccgtgcttacccactgggctgcctgcccagctccgtatctaaccagaaacaagagagaaaggaaacgtgaggctcagggttgttttattcttcagatgtgcagatacaaaactgttcagaaatctgcccaagggtgaatattttatgaacagtacagaaccattgtttatttttactcttgattgtctaggcatttatttaaagttttaaaaatatttttgaatgaatcctagaattgctgatatttaatcccttgacctacaagaacatgacaaggtgataaaaccacatggaaagatgagatgaaaacacaaatataaaacgctttaatctgtttgcttgctcttacttacccatagcatccatttacttattatatgtgtccctttcccttctgagtcaccactgtagaatctctttagctagtctcagccttgaggtggagctgagcaggaccttgaacccctgaccctcccgtttcccctctgtatgtggcactggcgacgtaacccaggaccttatccatactaagcaagttactcttgccaaaggggcttcatctccagcccctaggatattttttctttaatttttatcctaattttaagataaaattctgaaatgacaaagactctggccaggcagtggtgacacacacctttgcctttaatccctacatttaagaggcagaggcaggcagatctctggtagttaaaagccaccgtggtttatagagccaaccagagctacacagagagaccttgcctttcaaaaataaaataaaataaaataaaatactctgattttaagtataaattctattcaaatcaaggggtagcctcctggctcagcctgcagaataattgtcacgttagctaggctgaacataatcttgacttagcaaatctttggggtctttttttttcaaaattgagaaaaaataatattatatacatatctgtataggatagatttaaggtagtcattctccagaggcctatgaaatatatttacaaggaaattaaatattaaaaaggattacctgttcacttaaactctcttgctattggttaggcaacattaaacatagtcaatggctcagactttccccatgctagtctgactttgtcaaggatttgtatatgtacttacatttttggctttatgtgataatgtactccaagtgtcttgtaaagcgaatacatgtatttccttctatatcagagtttcttgtaaaagtggatttgcacgatgttctctgtcattgcaggtactatgccatcatggtaaccatgttcttcactgtcagcgtggtgaacaactatgccctgaacctgaacatcgccatgccgctgcatatgatattcagatcagtaagtgctgcctgcccacagtgtgtgaaggatggatggctttcatctgcaacgtaaggcagacagagacctggggaagtggaaagcgaatggcttacttctgtttatctcaggattaacatatctttaataatatttttaatgaaattaaaaattgtgtgggaattttactttctctttccttcccctgtctgcttttgagctcatatttaaccatcaagtttttgatttccctcaccctctgccttgcagtgttttgctttgtagttcaggctggcttggaactctccatcttcctgcctcagtgtcctctgtgctgggattacaggcttgtcccaccacacctggcgggaaagttgctgatggagtgtcttctgagtacttcatgtatgatgagctctgtagctcgtgtatgaatgagagccgagtgttcccagaagagcagggaatacggcaagggacatgtaggtggagttgcaacagtctacaaaatgggtgctgaccggaatatcgttatcttgttgcctgagagttctataggattaactatcctgttcctacaggggcttgcattaaataattacagtgactgagatggcctgagcttcaaaaacttgccacatgccacttggttgattgacacctttctacaggagagggagatccccacatgcctttttttattaagaatggaggtggggaaaagctcactagaagttttatacagtagatacttggaaaatatgacagaagtaggtctcagatatcacctagccctactagtcatagcttgtgttatgactttagtgcgaactgaccaattttcacacttatttattaattttatgtatgagtgctctagctgcacgtacacccgcatgccagaagaggacatgagatcccagtatagatggctgtgagccaccatgtggttgctgggaattgaactcaggacctatggaagagcagccagtgctcctgactgctgagccatctctccagccccaagaattggtcatttttattcatattgtgtcttgcagtgattttattatttcacaggacagattttcttgttttatttctgtcttagtgacttcatccttcactccatgttttcctttgtcagttttcctacccatcatgaatcatgatggttttttgcctagtgcactaaaacctccatccttgtcttttacagggctctctgattgccaacatgattctaggaattatcattttgaagaaaaggtaacagcacaccttcatgtcctgcatatggaagtgacattccaggccacctctgtgtattgctcaccttccctcttcccacgctggtgataggactcttcttggccatcagccttttcctgttttctttctctaagaatcatgggtaatcatgactttccgaaggcaactgaccaggtcggagactctcactgtggctacttgtggagccaaacagctcttattatcactggatcttcagtgctctgcaaactaaaattagtcgacatagaacttccccgtgcagtatggtcaccgttagccacatgcgactccacatgtgaacctaaaattatctaagcaaaataaaaggcagggtttccctactttggcttgttgcactttagataccgagcatccgtgcatggcaagtggtacccattttggagagtgtggatatggagcatctccagggtgtgcatggtaggtctgaggggcagctgttctagacagtgctttgctgtccattttgtttttattcttggcattcctgggtctagatcccagggcctcacagtgctgtaaacactctgaccattaacctacacattcaccacacataagatgctcatcagtgtaatgaactagcaattaactttatatgctaagagaattcccagtaaagacccagatagacatgaagaaggagcagaaagttggggtcattcaactgtggccagtggtgtggtaggactcgggtgggaaatggcagaacagcctaggatgggttatcaaagcacccacctccccctcgagcctcaaccctctctgcagggacattagggagagacagtagagagtctacaagatttctcacagcaaggtcaccttcgctgttaaaaccacagttgtgcaagtgatgccatgttttcaattgtccagttcctagtgtcttggtattagggctctctagggtagggaaaaaatccacccattcagagacagaccctaaaggggttttgttttgtttttgagattgtttttgagacagtctcattatgtaaccctgactgacctggcacttaggtttgtcaaccagctggccttgaacccacagggatccacctgcctctgcctctcaagtgctggaattaaagatgtgcatcaccacatctttagtagtatgcttgtctagaacctacagtttttatgttacaagggctgtatcaaaacaaggacagctgtcctatcttgataggctgcttcttgtgtcctgtattctccagagaccttggagtccccaggtatgttctcttgcgtgtgagttctttgcagtcttctttgctttaagcatacacagtaaacagccacggttttgttgttgttgttgttgatgttgtttaagatgaagatgtgtgtgtgtgtgtgtgtgtgtgtgtgtgtgtgtgtgtgtaaagcattatagtctcctgatacagtcttacaccgtcagggtttcttctcagcatctgtttcccctaagagtttattcggactctgttatcttgagtctgagcctttgaccattcacagagcaggaatttctctatcatctctattctcattctcattctccttttctctcctcctcctctccctccctggtgctggggattaaacccagggccttgtccatgccaggaaaatatcctgtcaccaaactgtgccccaggcttattttcttactttcatatacataagattttatattttttcatatatcttatataaggatctattaacttatattatgtatatgtaattaactgtgtacattataatttcatacacacatacacatatgtatgtatacaactgtatatctatagctatatatatgtttatatgtaaatagagatagataacataacgtattttgagtgtgttcatccccgtgccctctggtccatctcctgctcctgctcagcccttcctcttcccagccagcccccttcctcttccttacctcacttctctgtggactcccccatgcctctctcagcctcatagccagttggcccatgatgaggcattgtaatcaaaaggtacaatgtactggagtagaaaagaaacagtgattcattctgtgagtttaatttctttttatccttcctggggccttttccttgattaccgagactctgaggggctcataatgatacagttttagttaatgtgaaatgtcaccaattatgttaccctctacgaatctgttattcctccatttatccagcattgcctacactttacagaaccatttaagctattgagattttttttaatgaaatacctttcctggagaatggacattattccccaagttttgactcttgtgtctgataatctcttgttcctcttgaatagtgtgtgtatgaagactcaattctgggcttttaggcctggaaaggcacagatactggtgaagcctgggcgggttgaattattggtttttgcagagcagaatgcagcgtcatgtgacattgggtgtgtgtctgttttctggttttgttttctttttcattttctgataaaacagtctgctggtcaacaactgttaaagacaactactggagagtatcccccagtgatactaaagagctttgtacttgaattgcatacttcccggtggtagatcccattagatgttgtttcctttcctaaggtgtcttgtccttattttttcagatacagtatgttcaagtatacctccattgccctggtgtctgcagggatatttatttgcactttcatgtcagcaaagcaggtggtaagaatcagctttaaatcatttctcttcactgcttgtcattgggccgattattaggcacctgtgagtaatgaaagggattagagagcgtgtgtaacacaaggacgcagctcagaggtgaacgggaggaggtggagagcagaaacactcgtcgttgtagttctggtccctgtgcacggtgtgttttcttatttcctagactgtccagaccggcttgagtgacaaggatggattccaggcctttgcatggtggttactaggtaagtacagtatttacgaaaagctaatgacctctgtgcttatgtttgctgagtcttctcctgtgggacatgtttcttggcaagaagtttaggctaaactaattatgccaaggaggagagtggcacctgggaccaatacgtctctgaaccttagtattcaaaaaacgaagaggctagtgttgactctttaggcatggttgtccctggcacaagagagaaaagtctgcatttctcctccggactactgtggagggagtcttctgtttcttcacggccagtccgtgtctagaaggacctgtaaaagaagggcgtgttagaactcttgactctaaatttcccagggatgcatttctaactctggggcttatttcttcctaagttaactgctccatatggcagtgttcccaagtcaactctcatgagaagttttaaaaatacaagtatctctgtgtggaattaattagacaacccctccagggcctcatcctcacgtggatttggaggggacactccagtgtgtgtggtaggagcaggagcaggctcacactgattgggtggaagaaggtagcaggagagcatgccctccttacctgggatttggacattcattaaccctttagctgctgttcttcgaagcaaaggtctctgtactgttaggaaagtacttactcaatgggaaaattctcaaagcatacaaatatgcaattcctgggggaaaattaatgtccagtaatcttatactttcttcatatagtgatcgcacacacgcatgcacacacacacacacacacacacacacactcgatgactgttaacttttgacttatggttttgacaagatggtaaatggcgctgtcactgtgtgaaactagagtaacacagccattttcatacaagccactagcagagtgaattgattgcctttcttgagaaatagtgtgtattgagtttttttttaaggtcttgaaggtttgttgttgtttttttttcaacgtttgactcagcagttccatttatgaaagtttatcctaaggaagcaagtagcatttcaagtttttgtgtatattgatttcaataaataaccggaaatctaactggtctcatatcaagacatttaaatgtggtataagcgcatgatagggtgatatagagaacctaaatcacattgaaaacacagttaatcagggatgtaaagggaaggcccggaaggacctcctgagaaaagcaacgtgtaaagatgtgtggacagtctcatcctgtgtcagtgtgcagaagtgagtgtggacagtctcatcctgtgtcattgtgcagaagtaagtgtggacagtctcatcctgtgtcagtgtgcagaagtgagtgtaaggatggggacacgggaaatcagaggagtcgatggaagcactgtggttttaaagtttgcatatcttatatataagtctatgataggtacagaactagttgtatacagtgtatataaattacactgtcacctggagaaaacaggtgggaaggcttgtagtaacctggtccatggtttttttaggtattgcggcactgaccttcgctctgctgatgtcggcaagaatgggcatcttccaagagactctgtacagacagtttgggaagcactccaaggaggcgttattttataatgtaagcaacttcttaaactctgggaaggggaacttccccattcgtgataggatgtgctgaatgaaatgctatgtgattgacagaccgtgtttgtgtttataaccggcctttagacagaacactgaagtactttaagcaggcagatagtgtgtattttgagtggcaggtattcatatgagatgatcatggtcaaccacatagaacatttaaaggacaaggaaccaaggcccacaaagttcctgtaggtacagttgttcaaccaatatagaaagctggaagggaagcataagacacagggcaacaggtcagggctgtgggtatcagtggggcagttggggctgggggctcagggcctgagtttcccaaaggggctttagtcgtgtgatggttcaggccaccgcttgtacctgagtttcttcattgtaaagggtcacctggcaggcactcctatagctctcctcctccccttctttactgctgttggagtatgaccagggaaccgactgtcctccaaggcctggggactgttcctcccatgcgcagttaatcccaacaggcaggtggacacattcacttggcgctagagtttgtggctggggatttttaatggtaaacattctgcctgctttgtatctttccttgagagcaatggcaagcacagtgacagctcagcaagagtcgctgtgacttgatttgaccttgtgtggtgtgagggagatggaggttgtcaggcacttatgttctcttcctcgttagcctcttctcaccatttgtttgtttcttgtccatagattgtcttcagatctctttcatactagtttctaaatcctttaagatctgtgtgggccttgtaatttccaaatatagtatgtagcaactccttttgggcacaatgtctgtgtgctgaggtccccatttcccttgtagagggaaggaccctactccatgtgctttctccatggtgaccatcagactccataagatgtcactggagggcacagaggcactagacacctcaccttagggggcgctcgtgctccctggcctgcttgagtcgttgtagagctaccctaactgtgcttcggtgagtttgcagttacctctgtgtgatccgtttcttcccacagcacgcccttccacttcccgggttcatcttcttggcctctgatatttatgaccacgttgtcctgttcaataagtctggtaagtctggggtcatgtggcagtgttcgccggcagtttctgaggcaaagcctcactttgacatttggctcaagcacggcttatctcatgtttgtctgagccgttgctcctccggggcgtccaaacagggctgttagtcagtagttgcagcagcgagagagagcttcccgcgctctctcctaatatcctttggcattgtgtgttttgagtctgggtacgaagctgggttggagccctgggaggtggggtggcagcctggctgtctctatcttgtctgtgaaaggcagagctgctcacaggtcccagtcgcctcggcgccaagcacgccagagcaaaatgatgacagggcttgtctcctagctacagattaaataaacaagataaagtaattacaaacaacattttaaaagaagaaatgtgaaaccagcgtgaagtgtctgtatgaagatgggctgttgctttttagggcaactatgtagtaagttgatgatggatggtcactcccctggaaagacctcacacatacaacctgatcgtctaaaagtacttatgtagataggtagacaataagaaaagtcttgtttaaatcaaggctgtctgttgcacacagcacaggtaaggaaatgcattgtataccacattgggcctgatctgcctgtgctggtgctgtgtctgtcgtcttttgacctagaaatgtgttatgaaagtagtagtaaaagggacctcgaggctccgaactacaagacctcacttgtcactattaatgtcctggtttgtggagatcctggggatccccatggagccccactcctgtggttagcacagactgagagcaggtagggaagagacgtgcatgccagctgctttcaagggaaacggtgctgcagttcccgtccctgtttttgcctgtataaccttggtctgtccatgccgccatgattgtgtcatctctttgcctctgcagaactctatcaagttccagtcatcggtgtgacgatgcccgtcatgtggttctacctcctcatgaatgtcgtgactcagtatcctttagtcctcttttatgtctgtccccatgttgctttggcagaggattgtttattctaacaatgtggggatatgaatttgggttctgccttgatttatatggtaagctggagacagataaacccattcatgaagcccctttgtagagggaaagagagtaatggtgcagaaggtcagataggtcccactgaggaaacaggactccgtggattgatggtgcagaaggtcagataggtcccactgaggaaacaggactccgtggattgcttacagctggttatgttatgaaatagtctgagattcctgcctgggttcctggtatcctagaaaatagttattattcatgactattataagtcgctgcaaggttctgaaacaaacttcaaattgagactactttaaaagtaattatgttagtagaaggaccttactactatatgagtcgtggcatctttaaaacattgaaacagatggcggttgagtgcctcccctgaaaccacatagatttgccatacagagcttcaggagagattggagggcctgaggacaagacagaataagttgagtaggatccccttcccgagagtggcactccggcattcagttcaagatgaccttcattataaactgtaaggacaatccgtagtaatgggcttaggaatggcagggccagagtccttcggcaagtcctgctaaggagagtccacacagcattcttcctgttttctcagcatgtcaagttgaagccaggacttgaacctaaaccctagtttacagagaacagccttaaccactcctccagatatgtgtgcatccggggtgtgttcatccttacaacagagtgtacctccctcaccgtcacactggttgtgactctgcgcaagtttgtgagcctcatcttttctatcttgtacttccagaaccagttcactatgtggcactggctgggcacctcgtttgtcttcattggaaccttaatgtacacagaggtgtggaaaaacctcgggaccacaaaaagtgagctgcaaaaggatgacaagaaggactgaggtctgcctgggacagacagacagacggtgttatgtgagagcggcctctgctgcaggtctggccaccatttcactttagctgatgccaaattaccagagtattgaagcagaaaggctccagagcttcctccaaaaggatgggactcatctgctctcacgagtctgcatttgtagattccacataggcatccctgagatagaataaacaaaacaagcaaggctaccaggcagaccgtcgggcagcctctgcatttgcttttctatttctttgccagaacatcagaaccatatttgttgaattccaagtctcagagcttctagttttctacctgtgtcgcacttgttgctaccgatgcctttttgctatgtacctctttcctcccgtcacccctgcacacttaagcactttgcagcacagccaacattccaggcacaatcaggcactgagtgatccagtggacatgcgaaaaattagaccccaggagtgatgaggccggactccctccagcgtgttggtgttgggagagaagcagttgtccccatgagcagatctgtgagctggatgccggtgatgctggagtagacggctggatcccaccacgcacatttcacgttatttgattagtcaatgcaaagatcacacacttctttcacctgttgctttctgtagttagagcagtcctgcagcgctcattgcacattagaaaggaagaaaacttgaaagtggatcgagaagagggagacctttccttccatctcccacgtgaagccccttggcctgtttacggagatggagaaggaagtgtggcccaatacagctcactctttcagcaccctgagagactgttgcccctgtgaacccagccacacacttccatgggactcctgtgggtttcaaatatgtgtctgtgagaggcgttaagacctggtagccagaagatacttctgagaattgtcacctgtcaagtcatcgatgatgattgattgatacacaggcgtgagtgtgctcaaaccccagctgcggcagggtgaagtcttcttgttccatagatatgggactgcttttgggtgtgcctgggaggtggcatgacacagcatgtttacatacagaaacaggcctggctcttttccgctgatcactctgaaggtctgattgtcctctcttggatccccttgaggaagagtaaccctgtcacacagcatgtggcgcttgtgtgcccttagctggattgtatgtgattgaagaacaagaacattgtgttgctttctttcctcgtccccacttagggccagaccctcattaccctcacctagccatctgctcctctgcaaacagctacacacaatgtttctctcgcacagacgacagccttccattcttccactatgtgctgactgtgctcagactgaggagtggctctccatctcctcggctcactgtagctctttgttgcaccctctgaagatgctctttgatgggtctgaacagcagcagcaaagagaactatcccaatcctctgggtcccctgggaaggcaaagagaactgtcctaatcctctgggtcccctgggaaggcagttaagacttttttctgttacattaaatgcagatactgtttctccacctaagtccccaggtttgcagactgattgtcattctggccattgacagcttcccagtgctggtaatggtctgttctcaaagacctgaattagatgtgaacccattcacagtcccagaagctctgtagctactttgaaatatgtggggttgcctggaccaatgttgctataaataccaagtgttaaaagcccccttaaaaagacagtaataaaaagtacttttttcttccagtttaacagaagaatctgtccctcggggctcttgaggctccattctgattactcctaacaggctataaccttcagttacctagagcttccctttttatgttgggagaagtagcacacagcttgtagttccctgagactggctgatacaatctaactggaccggttagggtttcagaatgtgtatccctttgtgggttttgttgaaggagatgtaagaacagataagagtgcgggctctgctggctcaagctagcaagtgccccagctgcttcctgccgtgcagtagacagaagaaaatgtaaccggcactagttacagttttgtaaaattgcccttctaaaggttctgttttccttctcattgtgtatgcttgttgcacagggccctgtggttggacacttccctgcagttgagtacttcccccaagctctcctctccccgtgttaggtcctgctgttcccctgaacagttttgccttctaccttcagatcgcatacacaccgtggtttcatgtctctctacaaagctcaggagctacaaataagagcacacatatgctgtttgtcctccctacaccagctaaccccttaataggaccatctctggatacatccataaaatcactctttataaaagtcatttctctttgccatttgtttgtttgtttgtttgtttgtttagcatgtggactgtaaaggttttaaaagggcaaataagccattttaccaaggaccaggctccatggaatgtagagaactgcctattaaacacctttgttcagagacagagcatatcgtttgtctcaaaatagagcttaagacatgtaaaactctagagcaaaagccaaatagcaaaggcctctagccgggaaatgtagtgtgtctgcggccgcacggcagcatgactcgtgtatgaggtggcaggacaggggtggacgcttgggttatacttactatctcacaacctgctgttgccgacgccgtctttatcactttcactagaaacatgttttcagttcttaaacttttttctcgcagtgccgaggatcagacctagggccccatagatagtgtggattcttttgttttcttttcacccaatacactaggtagacttacagttgattttatgaggttggttctgcatatcctttccccttcttcctgcccagctgaccaaagtccagcactcagttctctgccagggtggttggtgctgcctgtggctgccctcttctgttctgggaggaacacatggtagttctgaggggtctcagcctgcagtcatttcccgggcccgctttcctccatgctggggtccgcttttggattttgtgcctttgctcttcctgacccctgggttcctgactgcacctgcatccccttgggcagttgagtccctggggcttgtggtaattttcaggagttttctagggtatttatatccatctagaatgccttgtctagtgtttctgtaagcatcgctagtaagagtgcagtgtatgggaagcactcggcagagagcttgcatggaagctttatctgaaccgactgcgtattcttgtccagctcagcccaggagcagagaaccactgctacatgtcccttctagttgggctctttttagcctaaagtcggggaaggggaatggagtcagtatctgagcagatagcgtacttagaggaaaaagcgtgtgttaaagatctgacacccagatcttctctttggctagcggcagatagaattaggaggaactcctgctacataaacaaagtgctttgggctttccgctgagagttattgactgcatcttgtctgtggcacttgaagctgacattgacagaatatagagaaaatgtgctcattactaccagtgtagtgtttggaaataagtatttacagtatttaagcactggaatatgtttgctatgaccagagctgggattggaggctggcccttctcaattttattgtatattctttttttttttttagaagtttcctcactgtagacattccaggaatggaagaggccgggagcatgcataattcatttctgaactgccagctcctggcaaagtgtctgacgtgtgttacatgagaaagtaaatgcttgccaaggcctcttcctccctctccataatggttccttacagccaaggaagggaacagcccagtggctccaaagaagaaaaagagtggggagcagttattgggagaggtccagagaatgctacccagctttttgctctcttgatgcgtggtggtagggaagagggaagaggcttgtgtgcatattaccatgtacagttgatgttcaggaagaaactcaccagattgttagagtcctaagggtttttgaagtggctgcttggtgaccagcaccctgcagtcagtattactgctgtctggagagctgtgtatcttggtcttctctgagtatcacaaacttcttcccctgagctttgcctacggaaattaccaccatgaggcaagcagcaaaagagccacaggcagaaaaggcctggtctgcatccagacaccgcccatatttgagggggggggcgtgtaatgatgcctttgacagacgagttattttacatcttttctggtggaaggtagactcctcaggcaaagtgggaggcagtggttatcccccagcaacacaagaaagcctttgtgctttgctcgcaattgcgagcatttccgagctgtttgctttctttccagagaatggcctcagcttcccaagaaggatgatttgaaaagtagcaaattatggtggtgaggattttattcatccagactcggaacgcttcattgagtagtacattttaagaacaaagatcagagctggagggagcacagagcagccgtgtgtgtagaacagcccaaagacattagtgagcattcagactttgagctgtgtaaatatcagacctcactcccagccataggagctatttgagcagttaaggagggaagggaggctctttgaatagaacgttttgccaaactgaatgtgccctttttactgtcatttcttgtaaagagccatttttcacctctgaaaaaaactcataagacatctggtttttatctttaatttgcaatcgttgtttcttaataaaagtgataaatccctgcaggtgtgtccaatcaccattgccttcagggctcgtgtgtggtttcaagagctctcttgtttttaccttgtacatggtggcggcgggatgcttcgctgtggaccattgtcagcagcctgtcttcctgatgcttcgcagctggatcagtaagaggcccctccccaggctactgcctgcttctgcttcacaaaagtaaagtagattggtctgccattggagttctagaaggttgcggcagtgtctgcagcgaatctctccagtatattgacttttataatagtcagtgtgattagccccctttctctacagactacactacttttacataaatcctagcacagaagtcgcacatgctccaagcagtgtgccattcagtctgcagccacccacacgtgcaaacaaaaaacctccccttttaacagttttaatagactttttttcaggctgagctgggtgttttaagtagacccacagttttgagctggaatggcctctgaaagcccggtatgctgaagcccaaaggggttaatgcgtgttgaactccagaatgttctgaactgccagcctgagaagagagacttcttaagatggtaaattatggtttagttcaactcgtgagcaacctgcgtgtttccatgagcagggcgctcttttacacagtgccctgtacttctgataccagcagcaaaacccagttgtacacaccatgctccagatgccactctagaagagcaaccagcacttagggagatgtcacgaggatccatttcctttgacccctttcttaaatgaaacagtcaagcactatcaaagactggtgcataccacttgtttttctgttgtcaaaaagtctgtttcccaggagaaacaaacacgtgggcatgtgggtttgtcaacagccaaagcttttagtgatgttctttatcttcaaattaatatagtcacctcatcattaaaatgaagttattttaacacatgattgtttcttaatcagcactttaaggatctagcatatggatgactcggcagcccaaatgcgtcctgaatccaagtaaatcttatgatgataagcactagaatttattacaatgaatgaagttgattgcatgaacaacacatccgtgtgggtttccccgagtctcttaacatttgattcatgtaattaaataataatattctcaatggaaaccaactgtgagggaaattcgttttgttttactaactaggaaactgaggcgtggaagaactacctagcatacgtacatagctcagttgctcatatgttgttggagctgagttttgagctgttagaccccggagtctgagctctaaggattgtcccatgctatctcccaaggcaagacttcgatttcgatctactcactggcttaggtctccatatgctaaatgccatcaatgagcctcgactctgtgttcttagcatgttagttgttaaggcctagatggaatgttaaggcctaggcaactgttacctggctagcctaccattttgtgctgttattaatattataaggaaactttctcacattgtttctgctagttactaggaaacgtcctcatgcccatgttgattacatattctgttatactctgtgtccttggaaactgatcacaatagaaggcagtagaactctttgaatagttacgtacagtaagcttagacccccaacataagagagacaccttcactaacataggaagctatttggaataagacttccattttgagtagggggtccagtaaaatttaatttcccaagaccagcctgggaaccgatatcctggctggcaagttaagacacgaatgttagacaagtcccatcccggttgacaagacatgagtgtgttagacaaagcaagtcccctgccacagttgaataccccaaccaatgggagcaggataaatgtacaacaaagacatgttcccaaggaaacccccacccctaaatcctgactggtggaataacttggcacagacgtttgtgtatttcaggcttaaaagccccgtagcactgagcttgactcagtgtcatggttcaacttccaagtccggaacatggccctgatccattggtcttggggtgtggcattcaataaaccatccctatttggctgagattggtatttgtgtggtctatacagtgagtcccagacctcaacattagttttgcttcgattcatattctgttctctcagagcttgaatcctgttctccagaacaaacaagaaaataacacctcaaaaatctggttacaagacataccggttcctcggtgtttacaccagggtttacccatcttccctagtgctcaagtctgtaacattagccaacaaccatcagatgtggagcagagcataagtcacagcttttacaatgatttgcttaagtctctgtagtttacaggatgtttaacgcgtgcgttaactgttcttttcattcctccaagttctgttccagaaagcattttaattgggttatctcatctacctggctgaatgccatctctgatttatacttcgataacaaatcttcagccattccgcaaggatcattgcaagagttttcagtttccatgattcagattctttgcactgatgaagttaaatccattatccattacccactaggttgcttcatgccctccatttaaacaggagttagtgttagattattgctcagtcctggctctagaacacattcacctctgcagatgcaattgcagatgcaattctgtcaggaaatgaaaactgtcaccccttttgtaaaaaaaatgcatcaggcttatgttttgagctgcatggaacaggaaccccagtttagtcctctaacctagtttattctttacagggatggggtactggctgcttttgtttgtcaacctggcacatgctagaatcataagaggtaggagcctcagttgaggaaatgcctccatgagatccagctataaggcattttctcagttagtgaccaatgggggagggcctagaccactatgggtggtgtatctctggtcaagtggtcctcggttctataagaaagcaggctgaacaagtcaggaagcaagccaaaaagcagcatccatctatagcctctgcatcagctcctgcctctcggatcctgccctgtttgagttcctgtcctgacttcccatggtgatgaacaatgtggaagtgtaagatgaataaaccttttcctccccaacttgtttttttgggcatgatgtttcaccacagcaatagaaaccctcactgagacagatgggcgggtggggctggtacaatcactccaggaagttgttgaagaaaatgacagaacttgctatacaaatggcacacctgcagaaggtgtactcactgcaaaaaccagagggcagttgaacagcttctgctgatggtgcacttactgcacactcctttgatgtttttattgccaacctgctccttaggtgtcacatgggtcttgatcttgtagagtgacccaacccttcagtcttgaagaatctgaccttgctcctgcttgtagcagaggagtctccattagcttttagttctaggcatggaagtattatgaagtttcctgaagaatatctccagtttcaaatattcctatcctcatgatgcaacagggaaccagctttcctctaactgctgcctcaatttctgcagcaactatcataatcctttccccttcattgcttctgtgacttaagaaagcaaatgcaactaatgggagtctcagttccctcctcaaatgaacctttattgcgttctttggctcacctcaggaccgttgtttgtctgggagtgaaagctttgagttgagcagcccttcagagttgtagataaaggaaacagtgttgcctgtgtgttcttgggagcgacagtgagttgctttggcttctaccttgtttccatataccataccctgtagaacagacccttttcatcggtttcacgaccggcttacatcgaaaaggattcaggcaaccaggacgtatcagggtacctggatccttttcccttagccgacatatggagagtttcagttgtccattagtagtttaatatgacttgagtggcataaggggatttagcttacctccatctgcctgtgatgtcttccttagacattaacacatgcaaatgccacacgcgtacatttttggtgtttttgctgcaagttttaaaagctaatttttctttcatttttgaagactccccagcctccccgccccccaccccacccccaccccctggtaaatgtgttaaatctaggaaaagatgttttcaaaaggagaaaaacaggtgggaaagaaagagatgaaaacaccctgacagttcacttgtgtttttgcagctgtgagagcccattggtggaattgttacctcccttaccaagataattaattctctttaaaaaaatagaaggcacatctccttccttcaatcagtgtcaacagccaattacactctttcatcacccgaagtgtgagaacacaaatgttatcaaggaagaaaacagttggactgacaagattagcgattcacttcttcctaatcttgtaatcacacagtatgcagcagtttataatattacatgcccaaatttgctagtaaatcattccataaaggccttgtgcgaaccccccaccgcttcgcctgcacttggtgcaggagagcctgtctccccgtagaagacacgagatgaatgaagactacctcctccttgtagagtttttcctcatccattaccctctgcagagggttgttaattatggcaagagagtcatattcagtagaatatataactgcaaatggcttttagggatagcagaaaaattaaaccttctggtggcagaaggtttgtcaccatcgataagataacactttgctgtcaactgctggaaaacaaaaggctcctcatctttatgagggtcagacatttgttacggcatttggcatttgtcactaaagtctttggggagcccaactatgtcactggtactcaaaaatcacactcgtcaccctaggtgtgagtgtgatgggcatgagtgttagattatgacagaaatgacacttgtatttgacagggggaaactgattgaggaaactagtccccattctgccagggtagtgacactgtcacactccatctttgtcagggctcctttatgtcctataggcaggaatgggggaggggtgttaataatgttctgttcaaactggagcggggctatcccaaaagctgttgcctgttcatgggatatgttcttctagctgggctgccttgtctagcttcagtgggagaggatgtgcctagccttgcagacttgatgtgccaaggtggggggggggatacccaggggaggccctacctgctaagaggaaaaggggaaggaaatggggggaaggagtgtgggagggggtgactgggaggggtagtgagtggaatgtaaagtgaataagtataaataaataaatgaaagaaagaaattgatgttatgttcagaagatgaatgatgagttctgaatttctaccccttcttagatattgggatactatgaagcctggtgaccctgcagctccagaggctactcttggacacatggccttggctttttccctgggtgtgttactcctagaattccccagtgtctaaacatgttgaccttaagagcacaaaggacatgaaatggggtggttaaaagatgggaaggcacaggtagattcatgctccatgaaacattatagggtagacattattgttcccctgctacggggtggaagaaggaatgggggcttggttcagaactttccagcgatccacccagcgttagagtcccacttttcaaggggcattgctgcctccatggaggagatggtgcagctgtaccctctgtgagacatggacacaccagacaccctggcctttgacgctgcatccatgcccattccttgacttgacctccacagactttcttctcccagggtgaccacagaattgggtggtcagccaattttaggtctctgagaacagaacaatcatactatgatttccaaccctgctgctgaggaacctggaaagcactcacagcttgctaaggcattatcatttctcctaggggatctctaggaagatgtcaaaagaaagacatagacattgtctcaaggacattttcccctgtgtatgcacatcttaggaaggcttgatgattgagttccatagtgtggtggttgaataggtgtggcctccatagaatcatgtgtttgaatgtttggcctgtgggaagtggcactattaggaagtgtgaccttattggaggaagtgtgtcactgttggggcaggctttgtagtctcctatgctcaagctatgcccagtgtggcacagtctccttctgctgccttcagatcaagatgtagactcagctccttctccagcaccatgtctcctgccatgatgataatggactgaacctctgaaaactgtaagccagccctgattaaacgttttccttcctaagagttgccatgggtgtggtgtccctttacagcaataaaaacctaactaaaacacacaagtgacaactggagtcaccaacagaaaaagatcacaatatttccaaacaaaaatgtccccaagtccccagagcattcttaagtagcctaaatgtagccatggttgataaattatggaagacagcaacacagtgcttgacaatctcccaccaagagtggatgaaaatgtgtctgttgcaaagttgcaaaataaacagaactccacatacccctgtggatagtacacgctgaggccaaaaatacacttgactgtgacaggacatgagcattctgagtgctggtagaaaatatgtgcctctgtcacttctggtgcccagaatggccccaaggatgatgccagccttctgttttacaaacaggaagacgtgatgataaacacaaattcagaatacatgatcaagttacccgttactaacaaggagctatgaggactaagaattgttcctatgttttaaagctctgtaagacagcatgcatgtgtaactccagatggggaagtacagtggccgggggagtggtggtgtctaactgaaagggaatagttcacattccaaaagagctgtttatttatttttctggcaagttatttaaggggaaaaaaaaacattaggaacaaggacaattgggaagacgaaggaacctcggaggatccctgtgtgacgaggtgggtttccttcctattcagaagtcctgtgagaagtgcagccagggagggagggggagggcaggcacagagggaggacaacataagtcatacacaatacccatcgaaccttaacatccagtgtctaccagaactcttgagccaacaaagaagtaatggttcactttaaagaagtacaaaaaaagacatgaacagtatttcacaagagagatttcacagaataaagaacacatagtg

SEQ ID NO: 1797 - DNA, 3699 bp, Mus musculus
tcaaatgaatgggaccgggtatgactgagaactacagctcctggtctggccgcgtcggtggcagctgcggaggaagagttgatcaagacggccctcagggagggaaccgctggcggtggtgatgttgcgcgcggattttctagggtagcgaactgaaagggcgctttttctgcgcgctggctccccgtgccccgcaccggccatgcgcccggccttcgcggtgggcctggtgttcgcaggctgctgcagtaatgtgatcttcctagagctgctggcccggacacatccaggatgcgggaacatcgtcacgtttgcgcagttcttatttattgctgtggaaggcttcctttttgaagctaacttgggaaggaagccaccagctatcccaataaggtactatgccatcatggtaaccatgttcttcactgtcagcgtggtgaacaactatgccctgaacctgaacatcgccatgccgctgcatatgatattcagatcaggctctctgattgccaacatgattctaggaattatcattttgaagaaaagatacagtatgttcaagtatacctccattgccctggtgtctgcagggatatttatttgcactttcatgtcagcaaagcaggtgactgtccagaccggcttgagtgacaaggatggattccaggcctttgcatggtggttactaggtattgcggcactgaccttcgctctgctgatgtcggcaagaatgggcatcttccaagagactctgtacagacagtttgggaagcactccaaggaggcgttattttataatcacgcccttccacttcccgggttcatcttcttggcctctgatatttatgaccacgttgtcctgttcaataagtctgaactctatcaagttccagtcatcggtgtgacgatgcccgtcatgtggttctacctcctcatgaatgtcgtgactcaatatgtgtgcatccggggtgtgttcatccttacaacagagtgtacctccctcaccgtcacactggttgtgactctgcgcaagtttgtgagcctcatcttttctatcttgtacttccagaaccagttcactatgtggcactggctgggcacctcgtttgtcttcattggaaccttaatgtacacagaggtgtggaaaaacctcgggaccacaaaaagtgagctgcaaaaggatgacaagaaggactgaggtctgcctgggacagacagacagacggtgttatgtgagagcggcctctgctgcaggtctggccaccatttcactttagctgatgccaaattaccagagtattgaagcagaaaggctccagagcttcctccaaaaggatgggactcatctgctctcacgagtctgcatttgtagattccacataggcatccctgagatagaataaacaaaacaagcaaggctaccaggcagaccgtcgggcagcctctgcatttgcttttctatttctttgccagaacatcagaaccatatttgttgaattccaagtctcagagcttctagttttctacctgtgtcgcacttgttgctaccgatgcctttttgctatgtacctctttcctcccgtcacccctgcacacttaagcactttgcagcacagccaacattccaggcacaatcaggcactgagtgatccagtggacatgcgaaaaattagaccccaggagtgatgaggccggactccctccagcgtgttggtgttgggagagaagcagttgtccccatgagcagatctgtgagctggatgccggtgatgctggagtagacggctggatcccaccacgcacatttcacgttatttgattagtcaatgcaaagatcacacacttctttcacctgttgctttctgtagttagagcagtcctgcagcgctcattgcacattagaaaggaagaaaacttgaaagtggatcgagaagagggagacctttccttccatctcccacgtgaagccccttggcctgtttacggagatggagaaggaagtgtggcccaatacagctcactctttcagcaccctgagagactgttgcccctgtgaacccagccacacacttccatgggactcctgtgggtttcaaatatgtgtctgtgagaggcgttaagacctggtagccagaagatacttctgagaattgtcacctgtcaagtcatcgatgatgattgattgatacacaggcgtgagtgtgctcaaaccccagctgcggcagggtgaagtcttcttgttccatagatatgggactgcttttgggtgtgcctgggaggtggcatgacacagcatgtttacatacagaaacaggcctggctcttttccgctgatcactctgaaggtctgattgtcctctcttggatccccttgaggaagagtaaccctgtcacacagcatgtggcgcttgtgtgcccttagctggattgtatgtgattgaagaacaagaacattgtgttgctttctttcctcgtccccacttagggccagaccctcattaccctcacctagccatctgctcctctgcaaacagctacacacaatgtttctctcgcacagacgacagccttccattcttccactatgtgctgactgtgctcagactgaggagtggctctccatctcctcggctcactgtagctctttgttgcaccctctgaagatgctctttgatgggtctgaacagcagcagcaaagagaactatcccaatcctctgggtcccctgggaaggcaaagagaactgtcctaatcctctgggtcccctgggaaggcagttaagacttttttctgttacattaaatgcagatactgtttctccacctaagtccccaggtttgcagactgattgtcattctggccattgacagcttcccagtgctggtaatggtctgttctcaaagacctgaattagatgtgaacccattcacagtcccagaagctctgtagctactttgaaatatgtggggttgcctggaccaatgttgctataaataccaagtgttaaaagcccccttaaaaagacagtaataaaaagtacttttttcttccagtttaacagaagaatctgtccctcggggctcttgaggctccattctgattactcctaacaggctataaccttcagttacctagagcttccctttttatgttgggagaagtagcacacagcttgtagttccctgagactggctgatacaatctaactggaccggttagggtttcagaatgtgtatccctttgtgggttttgttgaaggagatgtaagaacagataagagtgcgggctctgctggctcaagctagcaagtgccccagctgcttcctgccgtgcagtagacagaagaaaatgtaaccggcactagttacagttttgtaaaattgcccttctaaaggttctgttttccttctcattgtgtatgcttgttgcacagggccctgtggttggacacttccctgcagttgagtacttcccccaagctctcctctccccgtgttaggtcctgctgttcccctgaacagttttgccttctaccttcagatcgcatacacaccgtggtttcatgtctctctacaaagctcaggagctacaaataagagcacacatatgctgtttgtcctccctacaccagctaaccccttaataggaccatctctggatacatccataaaatcactctttataaaagtcatttctcttt

SEQ ID NO: 1798 - protein, 331 aa, Mus musculus
MRPAFAVGLVFAGCCSNVIFLELLARTHPGCGNIVTFAQFLFIAVEGFLFEANLGRKPPAIPIRYYAIMVTMFFTVSVVNNYALNLNIAMPLHMIFRSGSLIANMILGIIILKKRYSMFKYTSIALVSAGIFICTFMSAKQVTVQTGLSDKDGFQAFAWWLLGIAALTFALLMSARMGIFQETLYRQFGKHSKEALFYNHALPLPGFIFLASDIYDHVVLFNKSELYQVPVIGVTMPVMWFYLLMNVVTQYVCIRGVFILTTECTSLTVTLVVTLRKFVSLIFSILYFQNQFTMWHWLGTSFVFIGTLMYTEVWKNLGTTKSELQKDDKKD

SEQ ID NO: 1799 - DNA, 47760 bp, Homo sapiens
gtcaccaatcccaaaagtaatttgtcggggtaagctggtggagtgaatgagctggtatcaaatgagggtgttaaagagctggctcatccttttcctggctctgtcacttaggacattatcggggtcataagccagcagcctagagaagaaatctggctcaaagattggtgtatgccatgccttaacaatgtgaatttgaaggacttaaatagacatttctccaaagaagatatacaaatgaccaatacccacgtggaaagatgctcaacatcactaatcgttagggaaatgcaaatcaaaaccagaatgagatgccaccaagcactcactagaatggccaccatacaaaaaacagaacatagcgagtactagcaaggatatggagaaaatggaaccctgtgcactgttggtagaaatataaaatggtgcagccactgtggaaaacagtgtggaggttcctcaaaaaattaaacatggaactatcatacgatccaggaatttcacttctaggtatatccccaaaataactgaaagagtttcaaagagacatttgtatccccgtgttcatagcagcattattcacaatagctaaaaggtagaagcaacccaagggtctgtggatgatgaatggttagacaaaatgtgtgctatgcatagagtggaatattattttagtcttaaaaaggaaggagattctgacatacgctatcacatggatgaatcttgaggacattatgctaaattaaataagtcactaaaggacagatattgtataatttcacttatatgaagtacctagaggagtcagattcatagaggtagaaagtagaatggaggtttcgaggggctggtgggaggcaggaatggggaattattgtacaatgggtgcagagtttcagttttgaaagatgaaaagagttctggagctggatggtggggatggcagcccaacagtgtgagtgtatttaataccacagaaccttacactctaaaatagttaagatggtcaaaatggttatgttatgtgtatgttaccacaatgaaaaataatgttgaaaatgtaaattcaaatgtattcagacagagcttacactttttaattccccagcaaaactcctatgatttatggccagtttcacacatttaccttagaaatcagttttacccactttaccttacctgcccagcctcatgcattcacaccagtgagccttggaaaatacatttaatcatatttctcctagaactaataatgcctatctgcttcatatgattcatgtaggaggtagactagctctgtatgggatcactttataagctgaaactgtcagaaactgaaatgtgctgcatttacttcctggaacagcagatcaaagcacatgcttggtacatgggttagtaacatcttcccaggcacctaatgccggaatcagaggagaaaggtggcagtcagagtaggaaaactaaatgatcccataggtttggtattttttcccttaagatattatcagttggccaggcacagtggctcaccctgtaatcccatcactttgggaggccgaggcaggtggatcacgaggtcaggagatcaagaccatcctggccaacacggtaaaaccccatctctactaaagatataaaaattagccaggcatggtggtgtgcgcctgtagtctactacaggtgctacttgggaggctgaggcaggagaatggcttgaacccgggaggcagaggttgcagtgagccgagatcatgccattgcactccagcctgggtaacagagcaagactccgtctcaaaaaaaaaaaaaaaaaaagatattatcagctatacaaggcaagggggtagaggcacagtggaaaaaaacttggagacttctcacacttgacatgagtgaagaactgagaaaacttgattattcgacatgattctttttttttttttgagacagagtttcgctcttgttgtccaggctggagggcaatggcaccatctaggcctactgcaacctccgcctcccgggttcaagcgattctcctgcctcagcctcctgagtagctgggattacaggggcaggctaccatgcccggctaattttctgtatttttagtggagacggggtttcaccatggccagtctggtcttgaactcctgacctaaggtgatctgcctgccttggcctcccacagtgctgggattacaggcatgagccaccgcgcctaaaggtggtataaacagtctcatttcctcagttagatttgccacctcagttcaataatataatttaacaaacatcttttcagcaacaataaaggggaaaatggtacggtacttagataaacgagctctggtacctgctgttcaggagctcacccacagtcatgggcactaaggtttgtttcttcggggaattattattttttcttttttaattaaattttttatttttatggatttaggggatacaattgcagttttgtcacatggatatattgcatagtggtgaagtctgggcttttactgtacccatcacctaaagagtatacatggtacccatcaggtaatttctcattcctcacctttctcctaccctctcaccctttccagtctccagtatctattattccactctctgtgtccctgtgtacacattatttagttcccacttataagagagaacattcagtatttgactttctgtttctgaatcatttcattaaggcaatgacttccagttccatccatgttactgcaaaagacttgatttcattcttttttatggctgagtagtattccactgtgtgtgtatctataccacattttcattatccaatcatctgttgatggatacttacgttgattccatgtctttactattgtgaatagtgctgcaataagcatactagcgcaggtatctttttgatataattatttcttttctctggggtagatacccagtagtggaattgcttcaagaaatctctctattgtttcataggggttgtactaatttgcattcccaccaacagtgtataagtgtttccttttctctgcatcctcaccaacatctgttgtttgttgactttttaatagtcattctgactggtgtaattatgtgattagtgatgttgagcattttttttcacatggttattggctgcttgcatgtcattttttgaaaaatgtctgtttatgtcttttgtccaattttataatggtttttttcttgttgagttgtttgagttctttgtaaattttcttcaggtaattattcgtacttactttctctcatagcaggtaccattttcaaacgctcacctgttttgtttatgagtcccttaaagagtagctggttttttgaaaggtcctcttccttccttccctgctttttctttctttctttctctttcttctttctttctctctctccttctttctttctttttctatttctttctttctctccttccttcactccttccctccagctgttacttactgagcacctactataagccagatgtcatccagatatggaggatactgtggctaataagacaaagcccttgtccttgggccactaatattctgatcaagaaggttttcttcctagccaaaatgtcatactcccaaattatagtaatctgaaaaaatatgtcttcaaataatgcccttgaaaatattagcattcataagtctattaatataccagggcattgcttgaatctgacctatgaaacaaacaacaagaatattttgactctatgaataatatctgaagtatatttatagtgcacagctctaaatatctcaagatttacataatgcaaagatgagaaaataatcatcatatgatagatatagaaaagatgttttaaaaaatcaaatgacagatctctgtaggattggcaatttgagacttatcaggcagtattccatcagaggtatattatttaattttttgtcaacaagttgtttaagtgaattttacaaatgattcaaaatgtgtctgagtgtctagaactagaaacaaaaatggcttttagaacaagcttgacagcttttcccactgacaacactaggtcaaagacaatgaacattcccaaagtgatagatccttctttataaggtaagaggactgtgaagaggtttaaacatgttgagcacagctggtgtctaagaagttgctattcattcaaaaatgttagaattctgaactcagggtaataaaagaagaaaaaaagatctgtgagatgaaatcatagctatacttcataactttggttttatgataaaacaaaatgttgaagtcggcatgacccccaaaaaaactcttggatgttctagttgtcaatttatggcctctccactccaaatccacccttcatggccttgtttgggatgctggagcttgaccctgtggacgtttctcctctgatggggagcacagtgtggagctttgtcacagagggggctgcagggacactgagggaggagttctggttctggtgtgctttcttccatgttgctcatgcagtgctcagccagcatgtaggataccctggggaattcaccctggtggactaactagtatcctcacagctggtatccagaaaattctgccagagctccacccagcttcctagcaagtacaaaacttccaccagcagcttctcaatgagctgaccagtgccctacctggaccccagaggatgaccctaggtgagtttcatcagcacctcactgaacttctctgctagccagaggactgcagcactacccccttcaatgaggtctgaatctccatttggggaggaggggagagggcccttttccaaatatgttcttttcttgggtagtctgactcagtcttatgtagtggctactccttgtatctgctattcccataatttggggagttcttttaatcctttatagtagtttatcttctagttaatactactagttaataattctttatattaagctttctttgttcaaattactatacaatttttgcctcctgactggaccttaattgatacgctgatatccaatagaaatgtacaaaagatatgtacaagatatttcacagtagcactattgataatagccaaattgtccatcaccagagaacaaataagttgtcgtatattcatacaaggaaatgttatgcagcagtaagaataaatgagctacaaatacacaaagaaatgtagctgaactgacaacataatgttgagaaaaaaaaaagaagaaacaaaagaaatatactgcatgattccatttatgtaaagtgcaaaagcagaccaaacttatctttggtgctagaaagtcagaatagtgcttgcccttggagggggttagtgattggaatggggcacaggagctgctggaatgctggtactcatttatttcctaacctgagtattggttatacaccactgttcatgcaaattcactgagcagtacatttttgatgtttacattgttaaaattagtcaagctgaaaaatatcatgtattcatgaggtgtgaattatttgactacttcaagctgattcattcagtcattgaatagaaggtatatgcacatattatgtaccagtcaccatgtaagatgctgaggatctagagataaattagttatttgtggatcctgttcatcaaaggcttagtctagagggggagaccaacatgaaaacagataactacagtgcaacatgattaatggattagtgggggtatggaggagtgctggaggtatagagaagggagccatgaatggttcattgaaaagcagccaggagcagtagctcatccctgtaatccctgcaatccctgcattttgggaggctgaggcaggtggatcacctgaggtcaggagttcgaaaccagcctggccaacatggtgaaaccccgtatctactaaaaatacagaatatatatatattctgtatatatatatatatatatatatatatatatatatatatatgccaggtgtggtggtgagcacctgtaatcccagctactcaggaggccaaggcaggagaatcgcttgaactcgggaggcagaggttgcagtgagccgagatcgtgccattgcactccagcctgggcaacaagggcaaaactccccctccaaaaaaaaaaaaaaaaaggaaagaaaagctacacacagaaaagtgacatcttagcacagcaccttcctcctgcacaatatagaggtatccactgactctactgtcctctctggccaccgtaaaaagatgaacaggagttggctaaagagaaaaggatattccaagcagacagaacagcgtatgcacagataagaattttgaaagttactgtaaactcagggaagagagtgagtttatgtgggtggagcccaggtaaccctagggagagtgacacaaggtaaaaccaaagaggtaaactaaggcttgattgtgatgtttatatgccttctactaagcgtggcttttacacaaggaatcaagaacattgtatatagctagacttcaaagacgtccctcccacacagacacaactgatgattttgttagttttctcccacagtgaatcaggcttggtcctatggaatcaatagaatgtggtacaagtggcactgtgtgacttcagaagccacgacggcttctgacttaatatcttggaatgcttgttccaggggaaacaagttaccatttaagaattccaactatcctgaatccaccatgttgtgagcaagcacagcctaagagacaccatgtcaagagacttgctcctgccatctcggggatcaaccctttcaagccttcagggaactccaaccccagcctacatctgactgcaactgcatgagaaccccaagaggacagagcagctgtgtgctgggcacagtcagcacacagaacctgagtgagaaatacagtgtgtgggtttttttatttgtttgttttgctttgaatcactacagtttggggtggtttgttatgtcgtactacacaattagaaaagacatcttagaatagcaatgggacatgaagattttgggtttgtttttggaatcagcctggaggcagcagggaggatgggttaaagaacacagaggctgaaggcaccaagatgttaggaggcctttacgggagaagaagtggatgtcaatgggaatggacaagaaaggctggaatctagagatacttgtgaggtggaaccgatgggatataaagagcaaataaatgtgcagtggaaaaaagaggaagaccgaaaactttcaggtttttcccaaagagaagaagtagagtacaatgttcttaatagaaataaaggcctattagggagggtaggtaatgaaatgtgtatgccctaatggtgaggggtttacagggaaacattagtgaacattccaaagacactggaaattttgattaaggacacaagggagatgggggctgtacatagacacacacgcaggatcactattccatatggcagtggtggaagttccagaggtgaaatcgccaagagaacatgtgcagggcaatgagaggagggaataaatgatggaactctgaaaggagaacccagtggtcagaggaggagagcccattaaggaaactggaaagcgtaagtcagagaagtcaaaagagaaacaggagactcatgtcttataaacagagggacaagagaatgtcaagaaatattgggttttcattgtaaaaagccactgccagatcaagtaaggtgagactgtgttatatggttttcacaattaagaagtcatcacggctctcaacaggactgcttttaataccctggcattgatcagagtagtttaagaagctgattggagatttaacaagtagagactacgaatgtagattactctttaaagagagttgatggtaaaatgagggaggaagaaagataagttagtttctttgagcatgattttggtctgagaacaggtttgctagcaagagttctctgagcaaatgagaggggaggatagagaggtcttcagagttaatgattttacaggcttctgctctccaagtgcagtcaacaggtcagtagcaccagcatcacctgggagctacttagaaatgcagaatctcaggccatgctgcaggcctagtgaatcagaatctgcattttaacaagatccccaagtgattaacatgcacattaaattaatactcactgcagtaggtgaagacagaaatgtggaggaaggaagaaagatacagaactcttgcaaatattacagtactcaggccatttttttcttgtgcaatcacttagacatgcttgggtttttatctgagatgtaatgagaaatgtttagaacatcctttaagggcttccaaattattggcatatatggaaaatgaaggtctgtgtgaagagaaatcacctctaatgaaatccagatgaaaatccagaccagcttcctgttggcaggattattgatagtggaggtggagatattatcattgcttcagcctcactcccaggtagtccactttacttggtctgaggtagaactggtactattatatacctgtatatataccagttatatatatatatgtgtgtgtgtatatatgtgtatatgaatataactggtatatatacgtgtatatatgtatatataattcattgttgtaatgtgccagcactgtgcaaactcaagacgggtgctcattaaatactgaatttcacaggtagtaggctttctatttatgttagttcttcttcctactcacctttttaaggcagcagttctcaaattctagaatgcattagaattagaacgtggagtgcttgttaaaaatacaagtttctagaacccatacacaaggattttgacttggtaggtctaaagcgagacccaataatctgcactcgataacgagtacttcagatgattccaatgtgatctcccagtcacggactgggaaaaaagcattccaaactattttgtagatctcgagaaagacttcagaatgttcgtgtctcacaggaaatagcaaaaacaatatagcattccaaaatcctacctagctttgtaccgtgtactttgctattgctgttggattcaattacaacggaaatatttgatgtggtaaaatactgagcagtgatgctaaccttttatagtagacactgggaagcagaaaggaagtgtaaacacgtttcccttaaaaactagtcttgctgggtggataaagtgtgcatacctattttacaaataaagaatagtgccgcactagcttatgtacgtaatatgtgcttaacaaacatttgttcattgagtaagtaagagtcaagtcgaatggctcagattgtaagtgctatgagaattccactgtaagaagagggaagtatgccttcttttcaccattaaagatctgattgctgatattggcatttttgccagtagaagagcctggacgttggcagttttcaaagcccccaggtgatttgactgcgcagctaagtttgagaaccacggaggtaaaggaagggagtaccttaaagagctaggattagggataatatcaatagatcacctttaaggctgcacctcagcctaattaaatcagaatcgctgggggtgggacttggctatcagtcatctttaaagctctccaagtgattccaatgtacagacgtggttgagagccattgctttacttgaattctcagtggttcttaatcctggcagcataatagagtcaccaaagatacatatatatatatcagttcaggaagcagagttgtttcagatgctagaacacctccaacgagcagtcacagctctgtagttctagtgccgccgctgccagcaagtttgttgtgaccctggcggccgagttactttcagcgctctgggcggtctcgcaagaaacactgacgctttgggacttcatttcccagcaagacccgcggccgcctatcgcgcgagtcatgccgggcacctcgtccccctgtcctctctggcggagctgcctggcggaagcgggaacgtcgcatcctgaggtaaaggtgcacggcatcctgggacatgtagtctggccggggctcggacgccccctcggatgaatgggaccgaagctgactgcgaactacagcttcttggcagcgtcggtgttggccgcgggagaaggggagaccgcggcggcccccagtgagagcggctttccaggacggtgcgatgtgctgcgcagcgaagaggcaggaggccggcttcctggggtagcggtacaggcgggcgcttactctgtgcgcttgcttccccaaccctgcaccggccatgcgcccggccttggcggtgggcctggtgttcgcaggctgctgcagtaacgtgatcttcctagagctcctggcccggtgagtgacccgctcgggccgcacccggtctcccggggcggggcggaggaagccagaggagaggtccccccgggacgcgcccacgccctgtccccaccccgccgcccacggagcccggggcaggacggcctgagccccccagcaatccgtcctgtctgggcagcctgggaccccgctgagtccgctgcttcccaaaactgcgcaccggcggcagtcccgcctaacagtttcaaagcattcctgcgaggggaagactcagggtgttgctgtcgtcaccccttttccacactcggggggtattgaagtctgaagagtttttcacatgaccagtccaaggtcggcagagagctagtgtcagaaccaaggttccttcaccaaaccactctctcttccttcccatccaactctagctcttttttcgatcctgttaaatggcacaggctggacttgagcaaaggtttttgacttgtaaagcagtctgactttgtacatactgcaaagaaagttttatttttattacggcatcctgcaaagcatttgctttattggccttggaaatggttatgagtactttgcccaaacatacataaatgatgcggtagaacagatttttatgtagaagatcagtccacgtgacccgagagtgctctttgaggtggcttgcaaaaagacaaaaaaaaaagcaagtagaagattggtccaagtgacctgagagggctctttgaggtcactttgaatgtgcaaagttcagtggatagaagctataacagaagagacaacaggtggtgtggaaaagcctccaggactaaaaagctgggttgtgaatttcactcttggctccgtcgtccactggctgtgtagcccttcaagtcacttagcctctcttgggctccttttcctggcagtaaaacaatacctatagtgttctctagctcgtgtttctgaatctatacattacaagttgagtatccttcatttgaaatgcttgggaacgggtgttatttggtgttttttgtttttttttttttttttggatttgggagtatttgcatatacataatgagatattttacggatggtacccaaatctaaacacaaactcatttgtgtttcttatacaccttatacacataaccttagcttgaaggtaattgtatacaatatttttaataatttgtacatgaattaaagtttgtatacgttgaactatcagaaagcaaaggtgtcaggtgtggaattttcacttgtgccatcatatcagtgctcaaaaagtttcatattttttagagcatttcagagttcagattttcagatgagagatactcaacttgtatctctgttgatcatccgaacaatcctgtgcagaagattggtcaagaattataaactgttttactgaagtggaaatggtccaaagaagttaggtgacccttcactacttgtaagtggcagagccagaaatgggacccaagatatctaagctcctagtccaatacctttttcaacctccctgccagttttgaacttgagcagcccatagattttggtcatccagttcttcatgtggtgcctactagaagtttattttatttgatatcattgattaaatcatcccaaagcaaccagtttacttaaggtaaactctgtgtggggttaagttttgctgttacggagcttgacattttattgtacagaaagtgttgataaagatctgttatttgacttgggaataggtgatgagggataaaaaatgaaaaaaaaattgtatccaactgtaaatctgatacacttttaaaggaaggccactttggcaacaattgatttgaaaatataaaaaagttggccaggcatggtggctcacacctgtaatcccagcactttgggagtccgaggtgggtggatcacgaggtcaggggttcaagaccagcctggccaatatggtaagaccccgtctctactaaagatacaaaaattagctgggcctggtggtggacacctgtaatcccagctactcaggaggctgaggcaggataatcgttagaacccgggaggtggaggttgcagtgagccgagatagcaccattgcactccagcctgggcaacagtgcaagactacgtctcaaaaaataaaaaaagaaaatataaaaaagtgataccattgggccagccatggaaatgaaagtcagggaataatggtaatatttgtgttgaatatgccattaaattaaatcttgccaaaggctgtatgacatgagaatatgcaagcaactgaatcccctctttactagtttgtgagcccttgactgaattacttgatctccctgagtctgacccaactgtaaaagggggtgatggtgatgatggttctaccagcttcacagagttttgaaggatgaagtgagatgcgcatgtgaagcctaaagcacacttgtagggcttcccattctgtccaacaatttggtttcaatacagatatatttctttaatatataaaagaaagatatatttcttttttatatatttatggtcctacaaagtcgtggacaaatctaattttataaaatattttcatgcattataggagctcctatttaaaatattttgaataatttgtaaataaatcatcacttatcttttttttgtaaatctgcattttttgcataaaacaatgggttttcataaagtggtgaggaggtgcatttattaaaataatcagtggtgcaccagactgaatagagccttttcctaagacaagtctccacttcttgtgttacagatcaataaaataagagctagttgaaccagatggccttaaggttctttctagatatggccttggaatttgtgactttatcttgggacatcacagtggaagccccataaatttttatagcctaggaactgtgctttttatattggctggcttggagccagtaggtgccctaataagtagcaagtataacactaaatataaatgctaagtgacttgcaggaagaagaggacatttttaaccattttccccaaattggaaaacaaactcaggcttttctttctgatttttatccctatgattgggaccaataataaaacacaatgcagtggacagagcagataggtagtaatggacgagtgccttgatattcctccttagggagcttacattctaccttggaaacaagatatacacacaccagctaactaactaggcaagatattattgcttgccttacaccagaaaaacaatctgaaacattttttttcctattttatttttcattcaagtgcctgatcttgaattaaatagtttcctaaattcagcaaaagaaatgcaaacggcataaacgatctgcccaattcattctcttcaaagttgcattcttttttaaataaaaattggaatttttgccaagagaattcaaagtaagagaaactgtttgcagttagtgattacaattcctgaggaagagagctcaagaaaacaagattaagggatccaagtttttactctgaagttttaaaatgaattattcaagttaaaataaataattccattggtagctatacaacagtgtgtttcgaaaaggcttcataagttgagctttcaaaaattaaattatttgagtacattagggagatttttaaattctatagaaatagaaacaaaaagtagaatagggttattgctggactgggaaaaggaagaaatggaaagtgactcaaaatgggaatagagtatctcttgggagtgtcctaacattagatagtggcaattattgcacaactaaaaacccatacttaaccccactgaattgtaataatcataatgctaagggtaaccgcaaatgccatttatttgccgttgaccgctgggagacttacctgacgcagtgcaatgggaccctcagcgtctttagaaatggaatgaaatgggcatatcaatacccacctccataaaataaaaagtattaagatgccctttttaaaaatcctatagcgaatacacatgtcatgtgaatcattttttaaatctctttttatcttttgtagaaattataagattctagatcacattggaaccctcacattcattctcttgcttgagtaaaggtgggtcactgacccgaaagtgagagcagaaaggtaaatgggacatggtctgtcccatcaccatccctgctaaggcactggcttctgacgtcctccttcgcatctggctctcccatattgtcatcttcttgggcagggatccagtcccattcaagttgggggctccctggaagcagccacctaactctacacataattgagtcttgataattgttctttagttgacttggcctaaacttgttaaagagaacatagaaggaaactttgaagcctcttttggattacctcttgtgcttggcacttacatgtattttctcattgaatactcactacgacagtgaaatcagtttcattttagagatgagaaaacttagtcaactggaatgtcttttaaaggctgaagacctttcagcctgcaagatcctaaatactggtcatcatatttgcctttttcactctgtggcaggcgctgtgttaagtgcttttcagggatggctcatttactctacaataaatcagagataggcactcatatggtttccattttaaagataaaaacactagacttagataaattaattcacttctgtcacatagcaagtgacagagcaacatatcgcatgtcggtgtgtacttttaagcacagtggagcatagtggttctcaaccttgtgtcagcacctgagaactacctgtgcattcacatatacagcgacacatgcactcacatacactctcagccctttccctgcaccttgactggtatttctccaacctggctgcatgtgacaatcaagtggaaagcttttaaaagtacagattccagggtcctaccccagactaatcaaattagaagtgggagagtgagcctctttgggtaaataggtttttttgttgttgttgtttgtttttgagacaagagtcttgctttgtcacccaggctggagggcagtggcatgatctcggctcactgcaacctccacctcccaggttcaagtgattctcctgcctcagcctcccgagtagctgggattacaggcatgcaccaccacatctggctaatttttgtatttttagtagagatgggtttcaccatgttggccaagctggtctcgaactcctgacctcaggtgatccacctgccttagcctcccaaagtgctgggattataggtgtgagccagccaccgtgccgaccatttgggaaacaggtttttaaaaagcagagtaggctggcccgagttccaaagcaccgtgctaggaaccatctagagttaaagttccttctgtcactcatatttaggctaatggttttaattaggtccttgaatgaggtaaatgtcttacatgattatttatggattcctgcatttagccttgtcctttgaacataagaagtgctaaaagagaacttgttgaattgaatagaaagcagttttcaaggaaaccttcataggcagcagagcttaaagagtagcaacatttctgtttcagttagtaagcctagttctgtagaagaatggctcatgcctgtattgtcttatttttgtgcctaatgggtatatttaaggacttgtatatcttggcattgctgtataatactaataccaatggagaatggagtcatttctggtaagtagcagtatattaatatgtaataatacaattacatacctctcaccagcttcaggtaaatgcctttggtcaagatgaaaatacagaggccgggtgtggtggctcacgcctgtaatcccagcactttgggaggccgaggcaggtggatcgcaaggtcaggaggtggagaccatcctggctaacacagtgaaacgctgtctctactgaaaaaaaacaaaaaaattagcggggcctggtggcgggcacctgtagtcccagctcctcgggaggctgaggcaggagaatggcatgaacccgggaggcggagcttgcagtgagccaagatggcaccactgcactccagcctgggcgacagagcgagactctgtctcaaaaaaaaaaaaaaaagatgaaaacacagaatacgaaggcaggtgaatattggtattataggaaatctggaagcttcaggagagcaaagataactgctcactttgttcttcttccagcgattgagcagagctgaatggaagacaagctcaagaaaacctgaacattttaaatgactagttttcagagtgcctcaagatgaatgtcaggaggaagtttttaactttgtaaatttgttcctaacaatcactgttgaatgtggggaatcttccccaactgtttcacagatcactaaagagactctattgaattccacaaacattttttgagtgcctaatatattcaaaacactgggttaagggctgtagagaatagtagactacggcagtgtttttcagtcttttgttcattatgcctcctccagaatactttttagacgttgttttcttaatccctcccctgccatagatatagtgtgtactggttcaggtactgtatgtatatttgtactttattgttataaaaagagtaagatatctcccccatcccaagaaccaattttgccccgttgctgggcaccatttaaagtaatgttcctatcatcaacactgggtccatttttcgtttgacagcagtcttggtgattcctggtcaggagggatatgtaaacattccaggagacctgagcatatttctgtccctgggctttgctacctaagctgactgggatcctgattaaagacctttctggtgaagcaaagatcccaataagaacatatgaccaatttcctgcagtttactaggaaagctgtatcgtagttctgggaacaagtgtgtcgtcacagtaattctcactcatggcctgatacacgcaaggaagagttaaataagaaagcttgacattcttctctgtgagatcaatgctaagtatatgtgatccaaaggctatgaacattgagataaaggacagtgggtaattgaaatccatccacgctgttattctggccctctaattagaatgcattttagtgttctgtatctcagtttttgtgccttcaccccctcttttattattcactatacaggaagcatccaggatgtgggaacattgtgacatttgcacaatttttatttattgctgtggaaggcttcctctttgaagctgatttgggaaggaagccaccagctatcccaataaggtatggtacattagagtctcttttagcttttggattttttaagaaagtaaagaggtggtacctgtataaaaggaggatgagacattcttttataagatttatttcaaagataccagtagaataataagtcattttctgaatttaatatgttgtgaaaatccggggtacctacttcgaaaataaaatttctgccacaagatttaaaataaccatgatggagacaagagtgtgtatgtgtgtgtgttcttatttagtataggattagtcagaaggcctagtgtgaccacaaattttgtgctgtcttctgtgttggtgaagttatcaaacattctaaaaggggagtatccttgtttctttttaaaaacgaatggcttttggaaataaatagaggtagtagttacataactttgtgaatgtactaaatgccacggaattgttcactttaaaatggttaattttatgttatgtgaatttcacctcaattaaaagaaaatgaatggcaagcaaagtcaaaatttgttgatgccagacctgtagtacattagtccaaatgtgcataattgtactcatggggccaaatagaaaacagggcagttcttatgttaaacagtgtattgaaaactcagccttcttgctgagagtgacttgagataaaagtgtaatccatccagttgtgagtatttagtaggatgatgtcacttactcccgtttagagcgacattctggtgtgaatatatccaagtatgaaggcaaaggcccatctttgttggttttcttttgcagcattcttacgtagcctgctatagaaaatctggctgaattttgttaatattatacttttaaagttcccagtgcgatgctaaatattccagatacttttagtttttcatttgctttagtatctgcataaaactttctgcccctaaagaccagcatttatattgcagtaaaagccccagcatttcttgactcctctggccctttcctgcctcttcccactatctctccccattctctccaccactagcatagatcaggaagtataccctgtcaccatatcttttataatagcatcctagctggctgacttccctgcctcccacgtcttcatccgtccatttcacttaatatcattttatcatgtcgccccactctgtggttaccacgatgttctgaatgatgtccagactccccatcctgccctttgagggtctctgtgatcttgccctcataaccatattctcatgcatgtcctatgtgtgttggccattttattttctgtaggtggagccataaacaaaattttgctcatgtcgttcatccccatccacaatttctaggcaagcaatgtggaatagttaaattaattaccctaaaagaccttgacaaactctgtaaatggcacctcttcaaggtagaactaagaaaatttggcaagaaactttgtaaagtcgctgatagtatattatttagaagctgtgaagaagctgttgctggtaattttgcatatgtgttcattgtcaagttcctcagactttccagactatattaattcagccttggcttgactgcctgttgtggtgtatggctccacacctaactagcaacgcagaatcggttctttcagggaagatcacttaggactcagtgctgtcatatccttcagatgtgcaaaggtggaaaatggttgggaatctccaagatcaacatttcctgaagaatatggaaccacttatttgcttttgccctgcattctttagccatttattttaaatgctgtttttttctcttactcaatatagtaagttgagtcatatgaaatttctgacattcaactctttttgacctataaaaacggcaattttatatggtttggcccaatatatgtagaaggcatcttatgtattttctgaatcacagtgatgacatacaaatgtaaaattatttgtttaatccatctgttcataataattcatttgtatttatccctttaagttattagggttactggattttttttttttttagtttttgtttctattattttaagacctataaactttcaaaaaacagagaccctgattttaaataaaaatctgtacaagtcaaaccatgtcctcattaatttggaggccactagttcagaatgcgggagaattttagcagctgctaggctgaaaataatccttaacttagcaaatactttctttagaaacagcgaaaattaacagtacaaacaagtgtatagaggaggtatttgagaaaatcagccattttcaagttcttcagaggtatatgaaaattatttacaaagaatcaatacaatcattttaagttgctatgtatacttgaaaatttttaaatagtgtttctttaaatgtattttataacttagattttcccatgttagtctggctttgtgaagcattttgatatgtacttagtagttgacatggcataatagtgatgcaatcttgcaacgcagaggaaacaggcaaaatgcctttttagccaaaaatatatatttcctatacttgattttcttgaaatcctagattctgtttgatgagctgttctgtctgcatttcaggtactatgccataatggtgaccatgttcttcaccgtgagcgtggtgaacaactatgccctgaatctcaacattgccatgcccctgcatatgatatttagatccgtaagtgctgccggatcacgtgtatatgttcctctgaaaagtatagttaagtagatcgattgaatatatggcagaactagaaggttcttgtagtaagtggtcttgggtagaagaataggtttgtgaatgcgtgagcaagggtggctttcatctgagaagtaaggcaaaaagagaaatctcaaagtggatggtttacttttattcttctgaggtctaatgagtgattaataaaaagaaaattaaattttccctaggaaacagattttaccttcattttccctcatctctttgattttatattcaaacatgctattaatgttatttaacttatttcttatctcttcttctttcataaaagtacatttacttctagaacatgaaagagatacttgtcttttctgatttttttttttttttttaagcagagacttgagataataaagggaaattcttgatgaaggtagggtttctcccaaagcactccaggcaaaaaaggctgataattgtggtgataacatttccatgtggtctgagatttttgtgagattgtactgttcctgaagggagtttccaaagcaattataataaggtgaccttcaaagcattgaaaacatagtggactttcaataaacacctgttgattgattgtcacctttttagagaacagagagatccttgcatgactttttccattaaaactggtcaggggctgtgcacagtggttcaggcctgtaatcccagcactttgggaggctgaggtgggtggatcacctgaggttgggagttcgagaccagcctgatcaacatgggaaaccccatctctactaaaaatacaaaattagctgggcgtggtggcacacgcctgtaatcccagctactcgggaggctgaggcaggagaatcgcttgaacctgggaggcagaggttgtggtgagccaagatcgcaacattgcactccagcctgggcaacaagagcaaaactccgtctgagggaagaaaaaactggtcgggggtagaaggtgcaggtaatggggagaagcttattaaaagctcttataaattaggtgatggaaattttgacaaaaataagtctgtgatatcatttattcgtgctagccctggcttcagcactgagcaattacagttgacccttgaacaacatgggtttaaaccacgtgggtccacaaatatgcaaatttttttcaaacaaatatgaaaatacagtattcacgggatgcaaaacatgcctataaggagggctgataatgactatattgagaattgatcctttttattctcattgtcatctttaaacggttttttaaatatatatatatatatacgtatatttttggagacggagtttcgctcttgttgcccaggctggaggtgcaatggcgcgatcttggctcactgcaacctccacttcccgggttcaagggattctcctgcctcagcctcccaagtagctggaattacaggcaactgccaccacgcccagctaagtttcgtattttttagtagagacagagtttcaccatgttggccgggctggtctcaagctcctgacctcaggtgatccgcccacctcggcttctcaaagtgctgggattatgggcgtgagccaccgcgcccggccatcatagtagatttttatggtttatacttttgccatcataagaacaactaaatctttactaattattcatcctagcttccttcattccatgttttttccccttgcccatgttcctattctctcgaattacgttgtttttttcctagtgcactaaacctctctgttactgttgtctccttttgcagggttctctaattgccaacatgattctaggaattatcattttgaagaaaaggtaaacaatacacctctgtattttgtgtatggaaatgataccctgagcccctgtccataagctagtcacctggattccttgtcccaaaatagtgataagtttgcttctggccatctacctcttttcttagttctttaccagtgaggcccaatcatgcaatgtcctgaagcagctgatcaggtaagaggccacacctgtggtgtctctgtgtcgaactgaatagctcttggcatcactgaattttagtgtcatactaacctgcgaagccaacttacaaagatgatagagaggttcactgtgcagtatggtcaccactagccacgtgtgactatttacatttttcaaaattaaagaaaattaaatatttagtgtctcagtttcattagtcacgtacatttttttttcttttttttggagacgaggtctcactctgtcatcctggttggaatacagtggtgtgatctcggctcactgcagcctccacctcccaggttcaagtgatcctcccacctcagcctcccaagtagctgggaccaaaggcatgtgccaccatgcccggctaacttttttgtatttttggtagagattgggtttcgccatgttgtccccgctggtctcaaactcctagtcacattttcagtgctcagtagactcacagagctggtagtgaccacgttggagagcccagatgtggaacatttctaacatctcagaaattccatgggatacttctgccctagaagatgcttatcagtacagcatagcaaactaaggaatggttgtacatattaaaaaggaaattcctaaaaaggcccaaatagccaagaagatggaatgaaaggttcaggactgttctttgtgaccatcaccaatggctctctttgggacaggagcaggggggacaggagcaggaaataccagaagtacctgggatgctttttcaaagtttttgtctgtcaccttcattctgaggttcacccctcactcctaaggaggaaggatgttagcaagagacaacacatacagtttgggaaatttatcagggaaagttcactgttaagaccaaaattatacaagttgatggcagcgtttcaatgtatttgatatccagccccaagctctctatacatgcttggaaagtagctgtaaattcagaatgtgagaacctagagtttttaagtattaagggctgtgtcataaaaagaacaattgtcctgtcctactaggcttcatatcatggaccgtttatctcctgaggcttatgaattccctgaaaagtactactgtagttgatttctttcttcttggttctctgcatttaaacatatatatatatatacatatgatggtcaggtttattacatttgaagtgatcatcatgcttcttatagtgtggaattcgccttgggacaggcctgtgctctttcccaacctttgattctggctcatgacaaggatacaaaagaacatgttataagagaaattgtattctcctgatagtgccccaaaatgttacgggtctttctcaagcatctgttgcccttaagaacttgttctgagtgtgtcatcttgcatctatctaagccttttgactctcttttctgtgtgtatctctttcccattgagcaggaatttccataagttaactttccaatagagtaaattagtaacttcttatctccttttatcttgggtagaagcccctcaagttcatagtgtgctcctcattccaggatttgaatatcaaatttatattcaccttacccatgcctttattattatttttggcctcagttgtaaacctcttcagcgtgatctttgcagactgaagaggttcattattttttaccgtacctccgctcgtacctgcttcctccccaaccgctctctagcgtggtcctcttggcccttttagtccctttctctgcccattagctagttctgctggccttttatgaggtactgtgaccaggacaatactatgtatttgagtagaaaacctgggatggttcatcttcttaatttcttttaatccttgcctgaggccttttgcttgatcaccaaaaatctgagagggtgctaatgatactagctaatgtgaaatgctactgttattacagcccatagttctataatctgaatatcctcccccttatccaactatgccaacattttaaaacaatgttaagtcattcagagatttaaaaaaaacaagcctcccccagagaatggatgattggattattttctgagcattgaatcctgctgcttgcacctgatagcctgtttttccactcgcacagtgtgtcttaggacacagatttggtccccctaaagacaggaaaagcaacagatcctagtaaggactgggtcagcctttcatctggactcttgagagcagaatgcaacatcacatctggtctatttctgtttttgtctcctgatgaaataatcgattggtcaacaaattgttggagacagactaaacagtactaaggaaaagtgttggttagaaaccagtcagtatcctgattcattcatatgcatacttctgtggactctgctggaaagtaatcctgtctgtcatactttagtgatttgtactttcatgcaccatctgactgtaaatatcactgggaaattcatatctgtgctttcctaaggtgtttttcttcttttttttcttttttgcagatacagtatattcaaatatacctccattgccctggtgtctgtggggatatttatttgcacttttatgtcagcaaagcaggtggtaagaagctcacaaattattttatgttcactacttgctattggggcccagttaccaggcaattaatacaattcaaatttttatgtaatacaaagattttgaaagagaagaggggagggaaatgggtaacataaatgtttcccttgtatgtcggcaccttgcacgtagttctgctctctgtacctagtttattttcttatttcctagacttcccagtccagcttgagtgagaatgatggattccaggcatttgtgtggtggttactaggcaagtacaataattataataaagctaattgcctctgcagttgtgtttgctgagttttctcctaagagaaatgtttcttggcaagaagcttcagctaaacaaattatgccatggaagagaggcacctgggatcatatttctctgagccttagcgttcaagaaatgaaaaaaagaaaatgcccccacattcatggcagtatgttctacaacatggatccatgtttttcttggttgccactggtgtagaaagaaaagtgtgtgtctacttgcacatcacatcctttgaatgtcatccgtctcttcacgatctgtctgccaagttgaagcttctgcaagagggcacgttagagcaattgactctttaaatttccgagggactcatttctaaagacttattttcttcagaggttagctgttccatatggcagtgttcccaaacctgactgattatcagaatctcctggggaatttttaaaaatacaaggatctctgtggaattaaataggcagctcctgtagagctttgttctcacattttttgatatggagctgagactcgttccaagggctttcaatgacaacaataacggattgagactgaccaattggaagagaaatagcagtgaaagaactgtgttctccttgcttcttggctttgagactttatcccttgttgctgtttgtaacatagaaagatccttatgtgctattagaaaaatactccagaagaaaaatttgcaaaggatatgaacatatagttcatgggggaaatagtagtacccaacaattttaggttcagcctcactagtctagtaatcagagaaatgcaaattgaaacccatgcaatacctttttatgttggcctatcatactggcaagatgataaatggttatctcattgctgctgagggtacagtaaaacaactatttttatataataaaaatagtttgggtataaatggacacagcatttatggaaaaatattgtgtattgtattttttaaatgtccacagcctttgactcagtaattccacttatgagggtttatcctaaaatatatcaacatttgtttaaagatttgtatacaaggatgtacattgattttaataatgaaataattggaaataaccatcctcatacatttaagtgtgctacatccatatcatagtcattaaaagcattctatttaaaaaattttaatgactgatttgaagcaaaattccaggcaaaagctcatgaaaaaagcaagatataaaattccatatgcaatctgatcctgtcttagtgtaaaaaaatttacataaatgaatatataaggagatgtagaaagctataaaggactagatggtaataatgtatttttatttctttttacagttttgtacatgttctacaattagttcataatatttgcaggactttaaacaataatgttcttcaagaaaaacatctggaaatgaacaaatgcagacatcttgtcacctgatgtttgttttttaggtattggggcattgacttttgctcttctgatgtcagcaaggatggggatattccaagagactctctacaaacgatttgggaaacactccaaggaggctttgttttataatgtaagcaacttcctgaacctgggaacgtgaaaattcctaagttgtaaaatgttacttcaagtgaactattaatattctctgatgtagttgaaggtgtattattggtagatggctttgagacccacagactgaagcagttttgatgggatgctctggtgggttccaagtcacagttcactacatgagatgatcacgatcaatcaaagcaaattaaattgtgtctgcatatttagcaaatccttttgtgcagaaagactatatgtttaaatttctccattccctgttgttgaggaaaggatgctggctccattgtttgctttgtctgtgatggccctcagaccctataagggcaagaaccataatttgggggttaatatcctgccatacaaggtgaagtggtcaagaagcactgtatacatttaacttaagtctaacttgcttttctttgtattgctgtcaaacaacctgtacaacttttaatcattgtaaagctactctaattattctataatgtttttgcacttacatttatctgacctgtttctttccatagcacgcccttccacttccgggtttcgtcttcttggcttctgatatttatgaccatgcagttctattcaataagtctggtgagtttggggttagacagtagaattacctgacagtttctgaggcagagtctcagttttactcttgacttgacctcggcctttttcataatcctattcaaatcatgtgttcctttcgaaaatgtctccattccactttccagtcattgcagcagcaaaagcttttacaggggtttctcaattatttacaaatgaagtaaaagaatatcttcgagttttccattttgctttggaatttgtgtgtttgcatttgaatgtgaaatgtttgatgttttgagaatgcaaatgaatacttacagcacactgcagagactggagccctgcgaagttgggcagccgtccagctctctcaactgctgtttatccttctctgccatgaaaggcagagctgctcacagatccagcccaagctgccatggagcagagcaagaggggagctcaatgatgacaaggtttttctcctagttacagatgagacaggcagcagatgaataagcaaaattagtttcaagcgtctagtgtaagttagctgttactttttaaactggccagttaataaattagctatagattgtcagttaacttgaaagggatcacttgtatgatctgattatctactaacagagtataatatagacacattgaacacacaaggaacaaataaacgtttttaaaatcaaggctttatgttgcacacacctcaaatgcttaagtgcattttgtagaatgacagtaggtgctcagtaaacatttgtttgctatctgagcatgagttgtgaagttatgactattctctgcatttatagtgttgcctctcccatttgccccatcccccaaaaaatgtgaaggtagtgtgtaagagtttgtaaggctctgaattactcaaataatcatttcttcatattaacacaacagtttttaagatctctgagaagtcccacgtagcaaagggctattgaaataaaaatgttgtcaaattccatgtgattgatttagttgttagaatgctgcttctaaaaatcacagggctaggtatttatgataaaatgttttacagaatctgccttcaacttctccagaatcatttccaagttaaagatacattttccttctcttgctttccttgagattaagtttctgagatccgtgaattttccaagagagctaaatatctgtcaaaatattttaagtgatattcattgtctctttccttcagagattcagtgtatctctgaagttattaaaaagtaatcacgtttgttaacttccttttcatttcaatacttgctaaggatatcaaagataatagaataccagattattggcattgcccactgatccagaactaagtttcaaaaattagtctttatgtgtatgcgtgtgtatgtatatatgagacattttattcgtgaaagaaaattaatatttcttaccagatctcagcatcattgtatcagaatttcttaaattatgctgtataattcaaaacctgaaaaaaatttagtaatacaaaaaaactgagccattgaggatttctatgtctgtattctctttcatcttatttcctcccacaaatttactgtgcaagtgtcattatataaagctaacataagagtgagagtgtgtgtgtgtatgtgtcttttaatagagacaggacctccctgttgcccagaatggtagattggtctcgagctcctgggcccaagggatcctcctgccttggcctcccaaagtgctaggattacaggcgtgagccactactcctggcctaaaactaatgtaagaatatatttaaagttattcacagttccatcaacctggacatctgccaattttatttttattgattttcttctagaccatgtctgtttacagagattcttacatagctgtaatccttgtgtggatataattttatatttgttttttactttttttctgagttttttttatgtggctataaaatctctatgatttttgtttttatcaaatgtacaatgcctcctctaatgaaagtgcctttgtttatgtagccattgcaccatcattgggcatttgattttgattcagagttattctttattatgtatagtactttaatgagtgcagaacctttttcttcctttgaattaaactaggattaattctgaaggatgggtaggaatacttttatagacccttaataaggattatgaaattgatttttttaaagaatgacgccaagttatactgccaccaacctgtggctgccagttccattaccaacttgccagattaagatattatttatacattttgaattggctaggcgcagtggctcaagcctgtagtcccagcattttgggaggccaaggcaggcgaatcacttgaagtcaggagttcaagaccagcctggccaacatggcgaaaccccgtctctactaaaaatacaaaaatgagccaggtgtggtggtgtgtgcctgtagtcccagctacttgggaggctgaggcacaagaaccacttgaacctgggaggcagaggttgcagtaagctgagatcatgccactgcactccagcctggatgacagagtgagactctgtctcaaaaataaattaataagttttgaattgctaattttgtagctataaaatggtacagtcttatttactttggaattctgtaattactagtgtgattgaacatacttccaaacagtagttgctagccgcctttcctcttgtgttgagttgttaaggctgtctatatcattttatcattttcaacttttctgtgcttcacagtctttctttgtaaagtgaggtactattcaggcaaatggtaaaacacttccttaaaaattaaaactattatttgttttaagaaaccaatttaatgactttagtggctgctatagactggagtcaaggcaagtaaagtgatgcgtgatccaattctatttgcaaggaagacaatgttgctgttcctattatgttcagtctgtattaccctgttcaaaagatgaaaaattcagctgtgaaaaagcaatatggctatatcctcttgtaacctctacagagttatatgaaattcccgtcatcggagtgaccctgcccatcatgtggttctacctcctcatgaacatcatcactcagtatcctttggactgtgccgtcacccttatgtcatcatcaggttcttttggcacaggaatggtcattcttttcttctaacagtgtgttgacttgaatatgattttcgctggatttattctgtggtaagctggagacagagaccgattcagggaactccttgtagagggcagaagagatgctagtggtgtagtaggtcagtaaggcacagggcagcaggaggaagtgctctgagtggaagtgtaggagtccattgattgatagtggcgggtgtggtggctcacgcctgtaatcccagcactttaggaggccgaggcgggcagatcacttgaggtcaggagtttgagaccagcctggccaacatggtgaaaccccctctctacaaaaatacaaaagtaagccaggcatgatgatgggtgcctataatcccagctactccataggctgaggcaggagaatcgcttgaacccaagaggtggaggttgcagtgagctgagatcatgccattgcactccagcctggacaacagagtgagactccatctcaaaaaacaaacaaagaactactgtatagcataaatcatctgtgatttgtacctgtgattttttggtgtcctaagatatttccagtgatcacaagctgctgcaaagtcctgaaagaaatttcaaattaccagctacttaggaggctgaggtgggaggatcgctcaagcccaggagatcgaggctgcagtgagcttgatcactccactgcactctagcttgagtaacagaacaagaccctgtctcaaaaaaaaaaagaaatttcaaagtaatcaagttttcgttttttaaaatggttatttcgaatgaccttactttcattataaaaataattatgtctttgaaatagtgaaacgaatcgagattgacctcattcctctgaagtcagctcctagatttgccagagtccctttctggaggaggggatagaagggctggaggcaagataaataaaggtgaatgggatcacccttaccgagagcgtcaccctctgtcattatcttggaggtgcctgtcattgtaaccataggaagactccaacataagaataattgggggttttttggcggtttcaaattggtacccataaatggaatggcaggacaggagttgttctgcaggttctccccaggaggagcctcagagctgccgtagcggaccttcatgttttcttagaatatgagaagttaaaccagggaccatgccagaaggttctctcactgatcccccaagtacagtctacagaaaactaccttgactccactcctccaggtacgtgtgcatccggggtgtgtttatcctcaccacggaatgcgcctccctcaccgtcacgctcgtcgtgaccctacgcaaatttgtgagcctcatcttttccatcttgtacttccagaaccccttcaccctgtggcactggctgggcaccttgtttgtcttcattgggaccttaatgtacacagaggtgtggaacaacctagggaccacaaaaagtgagcctcagaaggacagcaagaagaactgaggcctgtctggagtacgtagaccagtgtcgtcgtgagggtgggaccctgtgaaggtctgaccaccgtttcgcttttgttaatgccgagctacccgcagtgctgagccagccgtgcaaaaggaaatcttcaggaggggacttctcacgttgctcagactgacacatgtagactaaatagaaacccctcagccctaaaatagaaaaaagaacagttctggactattgaacagcccattcatttatttctgttttgtttaccgacatattcagtattattcttgttttctgaattctgagtctcctgaacaaaaggcttactatccatggtcttggaaaagattgtcccttctcttgctgttgtaatgcatctctgctacagcagtcattgtcatcctgtgaccttatcccttttgtctcccatcaccttttccttcttcagcagcacctcacagtcagtcagacgctgcaggcaccactatcaccaggagtggccaagtaaaccgagacaccagtaacagcagggctggacttcctccagcgttttgggaaggaaagagatgttcccctgagctgattcccagtgacagtgcagcaagactagtgggactcctctttcccacattttgcttttttttttttctatgcaaaagtcagatgcttctatccattgctttctgtgattagggcggccctgcagcatatctcacagcagacacagtgttcataacaaagaaaggttgtgccgggcacggtggctcacacctgtaatcccagccctttgggaggctgaggtgggtgtatcacttgaggtcaggagttcaagaccaatctggccaacatggtgaaaccccatctctactaaaaatacgaaaattagctgggtgtgatggcgcatgcctgtaatcccagctacttgggaggctgaggcaggagaatcacttgaacccgggagatgaaggttgcagtgagctgaggtcgtgctactgcactcccgcctgggtgacagagtgagactctatctcaaaaaaaaaaaaaaaaaagaaaggttgttatggactggacacccctgaagcccattgcctaggccacagtggtgacggcaggatggccctgctcagcaccgcaagagccatggctgtccctgttggcccagccgggcactcacggggcagaagggtgggtctcaagtgggaggataaggcttcaccaccaggagattcccctctgcccgatgactctgttaagagtcacgacccatcaagggaatgcatagatggagatatatagtgtgtgatgtgtaaatcaggtcaaacctcaacgacaattgaaagttgttattgtcctatgaggtatcttagcattctcgatgggtattgaggatggttggatgtgctttattgtgtgtggaaacatgcctctctttgctaatcatttcagaggtccagttttcctttcactggacaatcttgaataggaggaacgctgttgctgtaatatgcgtagcttctgtgtgctcttgtgtagtctgtgtgtgatcaaagggcacggaagtggctgcactttcacatcccttttctttacttagctggaaccttacataccagtacatgctcctctgtaagcagctgaactcaccggccacttctctgtttgcctatagacaaagactgtgtgtgtgtgtgtgtgtgtgtatgtatgtgtgtgtgtgtggtgcacacattgtgttcttaaactgagacgtggctctgcaggtctcctgggctcattccatggtgtggtatgtttattccactgtccagagctattctctgatggatttgagcaacagcagtggagataaatgtcctagagtcaccaggtcgcttggagaagtcatttaagctgcctcgggtttttgttacttaaaatgtggatattatttctccacctaaatcactgagtttacagagtaataatgtgttgctctggacattgacagctttctagagccagtaatgggctcttctgaaggatgctgaattagaagtgaacctattcataggatcaaaagccacttgctttgaaatatgtagagttcctcagaattgacggtgctagaaatatccaagtgttaaataaccttttaaaagcaacaaaagctacttttttcttaccacttaatagaagaacctgtccctagaggcgacttcattgctatggatctggagtctctgaactcttaataggatgcagcctcacatacataatgtcacccattttatgttgatgaaaacattacaagttttcatcattgggtatgtgttgatgttcacagacagtacttgggcccattaggttttcgcgtctggtcttagagcatgtgtattcatctcagcgtgaatacctcagccagtcttatgaataggaggctatgtatgggcagggaatagattagattagaacactcgcacaagatgaccacatatagaagcagaaagccccaaattccctgggaactgttttttctctagtagctgaatataaggaaatatgtctaatggacaccagttaatactttttaaaactactctttaaaaaaaaaatacgttccccttggttaactgattttttaatccagggtggacattttttcaacctttattaaaaagacaaataaactattttgtagaagatcagactcctacttaactggaagagaaatgtctattaaatgtctctcctctttctctgggtcaagaccatgtaattttatgcttcagagatgaagatactgtttgtttacaaagagtttagtttttaagacatccaaaactctatgctagagcaaaaatcaaatagcaaaggacactagccagaaaatacagtgtgtgtgtgtgcacctgtgtgcctgctgaacaacttgacagtgtaacagataaggtaactgaagatggtggatatttgaattgtattagcttaatgtctacatatctttggccaaaactctattgtcatattagaaacatgttatctttttcatgtttattagtaatttatttttgattctttgttttctttttcgtccaactaaaacaactgtaatgtacttgatacatttatatcaagttctaaagtatttagacaaatccaaatactttgtttttagttttttcctcctttccatcctgttaaccacagtgaaacgctgcagtattttgatttggtcagtgctacggaggaagaccatgaaagctgaattggtctgtgccacccagagtaaacctcttctcttcttctggaaagatggcgtgatgtttttcaaggattctaataaatatcccgcagtcatctcctgagcagctttcctctgtttcacttcggaactccttcccccactttcttcactccagtttcttcacttgcagcgttttctgctaagaaagacttatcatcttgtatctgtttatgcctctcttctttggggcccctggatgtttttgtggatttttacagagtatttatatctgcacagcgtgtattttgttatacattcttacaagcattgatattggggggtacattcataatagtgagaatatctggcagaatgtgtgaatgccatatctgtagatgacgatgaatgtgaagggttaatgtagaaatgtttgtttattctgttacagctcaaaatggaggctgagaatctctaccaccattcccttctctatttgagaatctctaccaccattcccttctctatttgggaaacaatactctcttattttgctatttttaccttcccattaactggcttcactcaacagtgccagatacctatggagaggggaagtaaaacaccttaggtcaggaataataaaccaatgagttagctcagggccggtggacatgttcactggtggaccagttggcattgacctaaacggacagagaaatgcacatggaggagaactacgttgaaatcaagatcctatgtctgttgtattttctctttgcctggagtaaatagcattataagtcattccacccttattagataaccaaagcatattggtctcaatagctttctcctgaaaaatgtgattgaatcttacctgtagcagttcactcttaaggttgaaagaactgtcaatatagataaaatccattccttattattattgattggtgtgacatttgaaaatgtgtctaaacaatatttgtaagtaaaagaaccagtcataagcctcaaatgtgttcagtgtgtaccaagctggaatgggagactggcccctcttggctttaaagtagcatgttgtctttttctagcagcttcttcctagtagacattccagggatgggaggggccagggatcatgtcttactcatttctgtatcgccagcccctggcatagtgtctggcttatgttatgtgaataaatgaatgcttgccaagatctcttcttccctcaagtttctggaaaacctgagggttcgtgatacctgttcccactcctcatcagcgggttggcaagaaagcaaataaggggaaacatttttaacattccaagcaagagaaggaagaacgactattgggaggaggtacaccagagattgctcagtgtgcagcctgctacctcacttttggctctggattgcctggtggtagaagggaagagtattatgtagttagcaccttacatatttgatgctcaggaagaaagtgcaagaagatccctaatagaacattaaagattcttaaaagtttttgaagtaggctgcttggggtgaccagccccacccttacatctccatagttggtacagttagcttgtagcagctgaagctgatgcctggagatcactgtctgttggtctgatctcagtatcatactgagacacctcccctgagccttacctacttaaattggtaaccgtcctaccaaaatttgtcaattttaatcaagtgaggcaagttgcaagggagccagagatacgtgaaaaaagaaaagcagaaatactgatactttctaagaaagaagttgtaataatttctttggcacattgacttactgatatcttttgaaatgcatagacgactcttgtgaaccaaagagagcagtagtggttattccccggcgcaataaaaatgcctttgtgtatcacttgcgattgccagtcatttctgtgccagttgctttcattccagagaatggcctcattctccaaaaaaagatgatgattttagaagtaggatttcctaacaaattatgtggtggggagggacggcggggattttattcatcccgtctgagctcttcatacagtattaccattaggttttaagaacaaagatgggggaggagggagtagaaagctgagagtacgtagaacagctacaagacattagtgggtattcagattttgagctgtgtaaatatcaaacatcggcttccagccttaagagttatttgagcagagagttaaggaggaatgggagattttgtgaataaaatgttttgccaaactgaatgagtctttttgccattattatagagagctattttttaccttctgaaacaactcatcagacatctggggtttatcttgaattgtaccatcattgtttcttaataaaagtgataaatttcttgcaggtgtttccaatcaccattacctttgaagtgcctgtgtgcagtttcaaaagctctccaatttttaccttgtatagtggtggtggcatattttactacaaacgattgtcagcaatctctcttcctaatgcctcgcagctggatcagtaataaaccacttctcaggctggtttctgcgccagaaattagtttacagaggatcagcctacttttggaagttttagaggtttgtggcagtacattctatagcaaatctctcaaaacctctttgccttgatagaaatacactgacttttgtcagctgcagtgaccagctctctttgtctttgatatgttgcttttaaataaacctcagctggaaagtaactcttcaaagcagtttacctcacccagcctacttttaatcatgttatgcagtagcccccaggtacagaacacaaaaagaaaaacaaatgagaaattttgcactaaatatagcatagttaaaattcatctctttaaaaatggcattactgttttatcaggacagggctggatgttcttaaacagccctgggcctgtcattacacgcaggaatggtctcactgcttctgaagccctttcactctcaagtcatttgggccttagagtgtgttgaactctaagatgttacgaaccacaagcctacaaaaaggtaaagaaccttctgggggactaaattatggtttaggtcaactctagcaaattgtatcatctcgttactggaggagacttctacacagaactctgtgattctggtgctagcagcaaaacacaattgcagacaatgcagtggtatctcaggctgagatgtccctcattaataaaggctccaagcacataggtgggtgtcagcaaagatccaatttctttgtccccgtcttacattcagcattcgagcaatgcattaattcattctcatgctgctaataaagagatacccaatcttgggtaatttataaaggaaagaggtttaactgacccactgttccgcatggctgaggaggcctaaggaaacttaaaatcatggcggaagggaagcaaacacatcctttttcacagggcagcaggaaggagaagtacaagcaggggaaataccagacacttataaaaccatcagatctcgtgagaactcactcactagcatgagaacagcatgggggaaaccgtcaccatgattcaattatttccacctggtcccgcacttgacacgtggggattattacaattcaagatgagatttggatggggacacagccgaaccatatcaggcagccataagaaaagaatacatgtcaatgagttgaatgtgtgtttatgtcaaaatttctctttaaaaggaaaaacgaagcacatctggctatgcaagtgtttgttaatagagcttttcagtaatgttctttatctgcaaattaaaatcatctcatcattaaaattattttggtatctgattgtttcttaatcagcacttcaaggaattagcctatggctccatttttacatgtgactccatgatgtacagatgcattttaagccaagggagcttatgattataattactggagttttattatttcctgtaatagctttgaatgaagtttactgcatgaaacactcctttcaagaaggccataaatctgtattgatttcccagaatcttcagcattgttaaaataataggttccattccagcaattaaatggagtgacatagtaataatagtaaacatatatttactacgtgcaaggcgcttatatttatttagtcctcatgaaaaattgttgacaagaaaatcatcctcattttacagataagggatctgaggctcagatgagcttcctaacttgcctcaattactcttatattttggagccgggatttgagcccatgaaatctgatttcagaatgcatactgttaaatccctgcattatgccacctcaaaaatctcagtaatgagactacagtctccctttgccctgtgtgtccctgcttggtgtagatttttatatgctaaatatcatcaataagtcttgcgtctgttatgtcatcatgtgtctgaataattcatgtcctgtttcctaagaacttatgatctgttctgtagtacaggtgtattagtctgtattcacactgctgtaaagaactacctgagactgggtaaatttatgaaggaaagaggtttcattgactcacacttccactggcttaacaggcctaatgggaagcatggattgggagacctcaggaaacgtacaatcgtggcagaaggcaaaggggaagcaagcaccttcttcacatggtggcaggagaaagagagggaaggggaagtgccacactcttttaaaccatcagatcatgcgagaactcactatcatgagaacatcaaggaggaaatctgcccccatgatctaatccccccaccaggtccctcccctgacatatgggaatcacgattaaacatgcgattgggtgagaacacattgccaagccatatcaaccagcaagaagaaaataaaacccaggaagttagcagcaaaacaggactctgaagccattctgcttctcaaatgttcacatcaaaatgtacccattttctctggtatctgtagcatatgagtttcaggttaatcagcaataataaatatacagaatagaaaaaggtaattgaatcaaaacatcaatcaatgctacttaagtaagtgtaatttgcagaatatttaatttatatattaactggtctttcagtttctccaagttctgtcccagaaaacatttaaattctattatctcacctacctggataaatgccatccctgaattatcctttgataataaaccttcaaccattatacaaggatcattacatgagttttcattttcaatgattcagtatctttgacacaaatggagcttaatactttagccattatccaccggattgcctaacatcccccgctcaaaaaaggatcaatgctatattatggctcagtttttagttctagaaaacattagtctctacagatgtgtttgcatgcgtaattttctcagaaaatgaaaactagctgtcatctcttttatgcagattttatcaggattatgtttaattgcatgtaatggaaactcaaaccagtcccaatctgatggtttatttttcacaggagataggcacattggggctgggtcagtcattcaaggaagttgtcaaggaaaacaagtggaagccactgtaaaatggcacatctgcaaaagcccacttgccagaggaacaatctgatgccttctgcttcacttctgccttctgcttcacttccgccttccaaacctcgagtacctgtcattagaggaatcccagaaagctgccagcaaagattatgggaaatgtagattccaagactcccagcccctctggtacaggagagaaatgaatggggaaatacaactgacttggcaactggcaatccagcacagtccacccctgtagtggactattcaacaataatgtttaacttccagacaaaaataatgagcaacaacagcatgctcctaatatgatgtgactatcgttcatgcaaatgaacatgctatcattctttcccaaaatggagattcaaagtcccttaagtctccatatccatttctagttcagttggcagttcccctttgataatcctgtgaacctaaagccaaaaatcaaaagctaaccacacatcttctataaaatcaattcactaatggtaatatactaatatgtatgtaacaatgcaaagagtaagatatgcagggttgtaatccttatgttagcaatcgtgcatgaggccatacgccactcctcagtctgtattccctttgccctctgccagctccactgctggtcatgggtcttcaccttgtggaaggaccaaaaccttgattccctttcctgcctacattggtggtggtgttcattaacttttaccactggacatgtaagtacgaagaaaggtacacagggaatgccttgagtttcacatattccttatctgcatgatgtagcaggaactctgtttccccttgataaccaggatcaattcccccagcaactgtagtcatcgtctttcttgtctactgcttcaggggcataaaaaggcaaatgtgaccaggtggcagtctcaactctttcctcaactaaacctttgttgtactccttggtgacagcgttcctcccttgagaactaaaacttccagaccagcagcacttgaagttgtggggatcagaaataaaaattttgcaaggggttattatgggtaacaatgagaagccattcacttctgcctcctaactcttggacctggggtttcttgtgggtgaaaaggtgccatattgaaccggttgcagttcaagcataccttatatcttgtaggacagcaagttttcattaatacaatcagcctccatggagactcaaccaagtaaaccaggatttgtcagcttacctagattatccttgtccgactgccagacaagcaacgaggtctcaggtgttcgttactggtttaaaacaacttgagtggcataaagagatttagctgagcttcatctgtctgtgacgtcttccttcaacattgcttaaacacatgcaaatggaacacactcacatttacagtatttctgctgtgaatcctgaaagctacattctctgtttttcctctgaaggctcctcagctccctccaccccacacacctctttctttggtgagcccattttaaatgtgttaaatctaggaaaagatgtcatcaaaaggagaaaagcaggtgggaaagaaagagatgaaaacactctttgacagttcacttctgttttgcagctgtgagagctgtagattgaattgttacccccctcaccaagctaattaattctcttttttgaaaaagccacgtctccttccttcaatcagtgtcaacagccaattacagtctttcatcacccaaagtgtaataacgcaaatgttatcaagaaagaaaacagttggactgacaagattagcaattcactccttctttcttaatcttgtaatcacacggtatacagcagtttacaataatatacacccaagtttgctagtaaattactctataaaggccgtgtgtaaatcccccatcatgtcatgtctacgctttgcatagaagcgtgtgtcttcctgtaggagacgtgggatgaattaagatcgcctccttagagagttttctcctcatccattaaccactgcagaagttgttaattatgtaaacagaggcacgcttggtagaatataaaaccacgaatggcatttaggggtaacagaaaaccgaggcagctgacagtgacagaaggtatttcgccaatgctaacattaacactttgctgttatctgctggaagacaaaaaacttcttgctttatgggagtctttgactcccatatttgttgatgtcatttggaatttgtccttaaagtctttgggaagcccaagtttgttattggtacactcctcacaaccccggagggcgtgagtacaatgggtatgaattttgcaccacaaactgggttgtgaaaggaatggtgcatagaattgttatgaagactttgatttcaagagctcatttccagccctcattctgccagactgggagggctctcaagctccacctttgctaaggcaccctcacttccctggtgccaaacaaaaacccaggagtctaatgtgatgtttaaaaaatgaatggggtcttctgtatttctacccattattggttcttgtggtccctgaagcctggtgaccctgcagctccagtgcctgaccctggaaacattgccttggctacccctgggcgtttaactctgagcatttccctgggtccaaacccctggcttacctcaggcaagagaccacaaagggcttggagtggggaaattaaagcttggcaaagggattttaatgaagaaaaatgaatggcagaggcagatcacagtgaaacactggaagtgtagccttgaggtggaggaaggattagggcacctccttaatttagagctttctgtcttcctgttattattttcctagattccaagaggactcaccacaaccaccaccaactctttcaaggagacggtgtggcttgtgccctctgtggtctgtggggtcgccttgtctctgctgctgcgtccatgcccattccttgacttgcgatgctgaaggagaatctctccttcctgggtggccacaggaatatcagccaatcttagaagatcttatctgagagtgattacagataagagtggccctctgctgaggaaccgggaacacattccctactttcccaaagtcttctgcatcatttctgccagaggacctctagggctctcaggccagaggacttgtgatatagtttggctgtgtccccacccaaatctcatcttgaattgtagctcccataattcttgcatgttgtgggagggaaccggtgggagataattgaaccatgggggcgatttcccccatactgttcttgtgattgtgaataagtctcacgagatcagatggtttaataaggggaaaccccttgtgcttggtccttattctgtctcttgcctaccgccaatgtaagacgtgcctttcaccttccaccatgattgtgaggcctccccagccatgtggcactgtaagtccattaaacctctttttctttataaattacccagtctcaagtatgtctttatcaggagagtgaaaacagactaatacatgatcttataattgaatggcccaggaagcccaggccccacagtaaccactgctggagtcatgcatagtcaatccaggatcagatactggcagccaatgggtaatacaaaaaaaattagagtgagaacatatccccaaatcatccttaagtagccaaaatgtagccacggtataatagataattcatggaagccagcgttgctgcgctcagtatgtttagtgccttgtgtttgacaatctcccaccaagagtgaatggaaatatttctatttcaaatcagacaaaaacacacacgctctgctgtggatgctgcgtattgagttcaattcaagcagctaaggcacagattccacaacacactttgtcagcacagtccgcaggcattcgaaggagataatgaaaactccttgaggtgcctctgccatttccagtccccagagtgcccttggagggcatggcccaccccctgttttgcaagcagaaacttgagctgatacatgaagttttagaatacatgaccaatgacaagttactgaaaaggcccatgcaggattaagaattctgattatttttaagtgtgctattctaattcattaattgttgagtaccacaattcacaagcactgagctaagctgtagaaatacgtagctgaaacagcttggtactgatttcaagatgcctccaacccgtgtgatgtggtagttctcactaaccaaagacaactactgaaaaatattagtatttttctttccagtttttccttcacctatatgccatatgccaaaatagtatcatactaaatatacagttctatgttgttttattcacttagcactgttttgtatacgtttctaattttctttgaaaatgtgagttttaatgactttatgacagtctattatgtagatgttccataattatttaaacaaattcattattgttgatcatttaacattcaccgtttccaaactttattataaataacaatcacatgaacatctttgtaggtaaatatgtctgcactgatcagattgatttcattcctagaatatatctctagagacagacatattagtccctagagtgtaaatatttaagattcttaaagacaattttgtgctgtatactttacctacatcattagtcaagtatatattgggcaagctattaggtgccagataagatgctaggtaccaggagcacattgctgagcaaaatcaacagagtccctgttcttacaaatgttatcattgaccaagaatctagatctaatcttggaacaagaatctttatagatttaatgtcaaatttcatgcaaaattaaaagcttagaggaaggaaaaattaagaacaaaaggaaagctttgactcttagagtatcatttatgcaaagaattccaagaaacaaatggcattaaaatgtgctaagcattatagcagctgtcaaattacctataaattatgtattgtgttcagttagttaaggttatggaggaatactggaaattggtttaactccaaatggtgctcaaaggaagaaataaaaataattattttactccccaatttaataatgaaatagaataatttgcacaccagaggggttagcaatttgtttttttgtttttgaaaagttatctaggaaaggctatcaaaaatgctaggaatgggaaaatttaagaggaaggaagtgtctattgggaatttctgcataatgtgacgcatcaagttgacatgaatgggttctcctcctgttccaaatccatagatattccaggggaaagtatgacaaggaagagaggggggaaaaagatgaaaggataataattaagccacaaactaggagaacatgtttgtgtacgtacaacagataaaatattaatagacagcatttagaaagaactcctaaaatcagtaaggaaaagacaactaaatagaagaacaggcaaaaaagacatgaacaatatttcacaaaaataggaatttcacagaacagaaaacacccaatggtcactaaatatgaaaggatgcttgattacattaataattagagaaatgctttttaaatccagagtgacatatcacattacattcatcagattgaccaaaattggaaagctggaaaatattaagtttggacaaacagtgtacccacagaaactttttaaatactactgtgtagctcaaattggtagagcccacttgggaaataagaagacctgtctaccctgcaaccagaaattccactcctggatatacccatagaaaaactctttcacatgtgtaccagcagacatatgtaagatttttcattatagaactgcttgctttgcaaaaaactggaaagaccaaaattgctgttgacaagagaatggaaaagtagaaaagtaatgaatgtactatagcttcagccatcaacaaagctgaatctcaaaagcataatgttgagcataaaaagccaggctcacaagacaacaaacagaatgatagcattttcataaagctcaataattagcaacatcaagcaacatgtcctattaaccaaacaaggtaatcacaatctagaaatttagaatcgaggttatctctgcttttctgggcttccattttaataagaggaaatacatggtaaacaagatacataattaaaataaatgttagatgttgaaaagtgctctggagacaaatgaagcagggaaagaaagatgtggggtgtaggtgggggctctagacagacagatgtttaaataggatgatcagggaagacctgagacattgatgcgtgagcaaatatcttagaagatgagggagcaagcactttggtgatctgggcaaagagtgtcctggggaaagttacaggaaatgctcacactctcatccgtacgtagctcagtttcataagtgaaagtcatgttgtcaacactggtgcaatgaaatcaagcagcatccttcaccttctgttatcttgccttccctgtttctccatttccctccatcctctggctttctgaaccatatactgattagttttttaaggacctgcccaagaacaagcaagtgtagttattatttaggcaaattgagtggctcaatcaaatcc

SEQ ID NO: 1800 - DNA, 1788 bp, Homo sapiens
tgtcctctctggcggagctgcctggcggaagcgggaacgtcgcatcctgaggtaaaggtgcacggcatcctgggacatgtagtctggccggggctcggacgccccctcggatgaatgggaccgaagctgactgcgaactacagcttcttggcagcgtcggtgttggccgcgggagaaggggagaccgcggcggcccccagtgagagcggctttccaggacggtgcgatgtgctgcgcagcgaagaggcaggaggccggcttcctggggtagcggtacaggcgggcgcttactctgtgcgcttgcttccccaaccctgcaccggccatgcgcccggccttggcggtgggcctggtgttcgcaggctgctgcagtaacgtgatcttcctagagctcctggcccggaagcatccaggatgtgggaacattgtgacatttgcacaatttttatttattgctgtggaaggcttcctctttgaagctgatttgggaaggaagccaccagctatcccaataaggtactatgccataatggtgaccatgttcttcaccgtgagcgtggtgaacaactatgccctgaatctcaacattgccatgcccctgcatatgatatttagatccggttctctaattgccaacatgattctaggaattatcattttgaagaaaagatacagtatattcaaatatacctccattgccctggtgtctgtggggatatttatttgcacttttatgtcagcaaagcaggtgacttcccagtccagcttgagtgagaatgatggattccaggcatttgtgtggtggttactaggcaagtacaataattataataaagctaattgcctctgcagttgtgtttgctgagttttctcctaagagaaatgtttcttggcaagaagcttcagctaaacaaattatgccatggaagagaggcacctgggatcatatttctctgagccttagcgttcaagaaatgaaaaaaagaaaatgcccccacattcatggcagtatgttctacaacatggatccatgtttttcttggttgccactggtgtagaaagaaaagtgtgtgtctacttgcacatcacatcctttgaatgtcatccgtctcttcacgatctgtctgccaagttgaagcttctgcaagagggcacgttagagcaattgactctttaaatttccgagggactcatttctaaagacttattttcttcagaggttagctgttccatatggcagtgttcccaaacctgactgattatcagaatctcctggggaatttttaaaaatacaaggatctctgtggaattaaataggcagctcctgtagagctttgttctcacattttttgatatggagctgagactcgttccaagggctttcaatgacaacaataacggattgagactgaccaattggaagagaaatagcagtgaaagaactgtgttctccttgcttcttggctttgagactttatcccttgttgctgtttgtaacatagaaagatccttatgtgctattagaaaaatactccagaagaaaaatttgcaaaggatatgaacatatagttcatgggggaaatagtagtacccaacaattttaggttcagcctcactagtctagtaatcagagaaatgcaaattgaaacccatgcaatacctttttatgttggcctatcatactggcaagatgataaatggttatctcattgctgctgagggtacagtaaaacaactatttttatataataaaaatagtttgggtataaatggacacagcatttatgg

SEQ ID NO: 1801 - protein, 177 aa, Homo sapiens
MRPAVGLVFAGCCSNVIFLELLARKHPGCGNIVTFAQFLFIAVEGFLFEADLGRKPPAIPIRYYAIMVTMFFTVSVVNNYALNLNIAMPLHMIFRSGSLIANMILGIIILKKRYSIFKYTSIALVSVGIFICTFMSAKQVTSQSSLSENDGFQAFVWWLLGKYNNYNKANCLCSCVC

SEQ ID NO: 1802 - DNA, 6835 bp, Homo sapiens
tgtcctctctggcggagctgcctggcggaagcgggaacgtcgcatcctgaggtaaaggtgcacggcatcctgggacatgtagtctggccggggctcggacgccccctcggatgaatgggaccgaagctgactgcgaactacagcttcttggcagcgtcggtgttggccgcgggagaaggggagaccgcggcggcccccagtgagagcggctttccaggacggtgcgatgtgctgcgcagcgaagaggcaggaggccggcttcctggggtagcggtacaggcgggcgcttactctgtgcgcttgcttccccaaccctgcaccggccatgcgcccggccttggcggtgggcctggtgttcgcaggctgctgcagtaacgtgatcttcctagagctcctggcccggaagcatccaggatgtgggaacattgtgacatttgcacaatttttatttattgctgtggaaggcttcctctttgaagctgatttgggaaggaagccaccagctatcccaataaggtactatgccataatggtgaccatgttcttcaccgtgagcgtggtgaacaactatgccctgaatctcaacattgccatgcccctgcatatgatatttagatccggttctctaattgccaacatgattctaggaattatcattttgaagaaaagatacagtatattcaaatatacctccattgccctggtgtctgtggggatatttatttgcacttttatgtcagcaaagcaggtgacttcccagtccagcttgagtgagaatgatggattccaggcatttgtgtggtggttactaggcaagtattggggcattgacttttgctcttctgatgtcagcaaggatggggatattccaagagactctctacaaacgatttgggaaacactccaaggaggctttgttttataatcacgcccttccacttccgggtttcgtcttcttggcttctgatatttatgaccatgcagttctattcaataagtctgagttatatgaaattcccgtcatcggagtgaccctgcccatcatgtggttctacctcctcatgaacatcatcactcagtacgtgtgcatccggggtgtgtttatcctcaccacggaatgcgcctccctcaccgtcacgctcgtcgtgaccctacgcaaatttgtgagcctcatcttttccatcttgtacttccagaaccccttcaccctgtggcactggctgggcaccttgtttgtcttcattgggaccttaatgtacacagaggtgtggaacaacctagggaccacaaaaagtgagcctcagaaggacagcaagaagaactgaggcctgtctggagtacgtagaccagtgtcgtcgtgagggtgggaccctgtgaaggtctgaccaccgtttcgcttttgttaatgccgagctacccgcagtgctgagccagccgtgcaaaaggaaatcttcaggaggggacttctcacgttgctcagactgacacatgtagactaaatagaaacccctcagccctaaaatagaaaaaagaacagttctggactattgaacagcccattcatttatttctgttttgtttaccgacatattcagtattattcttgttttctgaattctgagtctcctgaacaaaaggcttactatccatggtcttggaaaagattgtcccttctcttgctgttgtaatgcatctctgctacagcagtcattgtcatcctgtgaccttatcccttttgtctcccatcaccttttccttcttcagcagcacctcacagtcagtcagacgctgcaggcaccactatcaccaggagtggccaagtaaaccgagacaccagtaacagcagggctggacttcctccagcgttttgggaaggaaagagatgttcccctgagctgattcccagtgacagtgcagcaagactagtgggactcctctttcccacattttgcttttttttttttctatgcaaaagtcagatgcttctatccattgctttctgtgattagggcggccctgcagcatatctcacagcagacacagtgttcataacaaagaaaggttgtgccgggcacggtggctcacacctgtaatcccagccctttgggaggctgaggtgggtgtatcacttgaggtcaggagttcaagaccaatctggccaacatggtgaaaccccatctctactaaaaatacgaaaattagctgggtgtgatggcgcatgcctgtaatcccagctacttgggaggctgaggcaggagaatcacttgaacccgggagatgaaggttgcagtgagctgaggtcgtgctactgcactcccgcctgggtgacagagtgagactctatctcaaaaaaaaaaaaaaaaaagaaaggttgttatggactggacacccctgaagcccattgcctaggccacagtggtgacggcaggatggccctgctcagcaccgcaagagccatggctgtccctgttggcccagccgggcactcacggggcagaagggtgggtctcaagtgggaggataaggcttcaccaccaggagattcccctctgcccgatgactctgttaagagtcacgacccatcaagggaatgcatagatggagatatatagtgtgtgatgtgtaaatcaggtcaaacctcaacgacaattgaaagttgttattgtcctatgaggtatcttagcattctcgatgggtattgaggatggttggatgtgctttattgtgtgtggaaacatgcctctctttgctaatcatttcagaggtccagttttcctttcactggacaatcttgaataggaggaacgctgttgctgtaatatgcgtagcttctgtgtgctcttgtgtagtctgtgtgtgatcaaagggcacggaagtggctgcactttcacatcccttttctttacttagctggaaccttacataccagtacatgctcctctgtaagcagctgaactcaccggccacttctctgtttgcctatagacaaagactgtgtgtgtgtgtgtgtgtgtgtatgtatgtgtgtgtgtgtggtgcacacattgtgttcttaaactgagacgtggctctgcaggtctcctgggctcattccatggtgtggtatgtttattccactgtccagagctattctctgatggatttgagcaacagcagtggagataaatgtcctagagtcaccaggtcgcttggagaagtcatttaagctgcctcgggtttttgttacttaaaatgtggatattatttctccacctaaatcactgagtttacagagtaataatgtgttgctctggacattgacagctttctagagccagtaatgggctcttctgaaggatgctgaattagaagtgaacctattcataggatcaaaagccacttgctttgaaatatgtagagttcctcagaattgacggtgctagaaatatccaagtgttaaataaccttttaaaagcaacaaaagctacttttttcttaccacttaatagaagaacctgtccctagaggcgacttcattgctatggatctggagtctctgaactcttaataggatgcagcctcacatacataatgtcacccattttatgttgatgaaaacattacaagttttcatcattgggtatgtgttgatgttcacagacagtacttgggcccattaggttttcgcgtctggtcttagagcatgtgtattcatctcagcgtgaatacctcagccagtcttatgaataggaggctatgtatgggcagggaatagattagattagaacactcgcacaagatgaccacatatagaagcagaaagccccaaattccctgggaactgttttttctctagtagctgaatataaggaaatatgtctaatggacaccagttaatactttttaaaactactctttaaaaaaaaaatacgttccccttggttaactgattttttaatccagggtggacattttttcaacctttattaaaaagacaaataaactattttgtagaagatcagactcctacttaactggaagagaaatgtctattaaatgtctctcctctttctctgggtcaagaccatgtaattttatgcttcagagatgaagatactgtttgtttacaaagagtttagtttttaagacatccaaaactctatgctagagcaaaaatcaaatagcaaaggacactagccagaaaatacagtgtgtgtgtgtgcacctgtgtgcctgctgaacaacttgacagtgtaacagataaggtaactgaagatggtggatatttgaattgtattagcttaatgtctacatatctttggccaaaactctattgtcatattagaaacatgttatctttttcatgtttattagtaatttatttttgattctttgttttctttttcgtccaactaaaacaactgtaatgtacttgatacatttatatcaagttctaaagtatttagacaaatccaaatactttgtttttagttttttcctcctttccatcctgttaaccacagtgaaacgctgcagtattttgatttggtcagtgctacggaggaagaccatgaaagctgaattggtctgtgccacccagagtaaacctcttctcttcttctggaaagatggcgtgatgtttttcaaggattctaataaatatcccgcagtcatctcctgagcagctttcctctgtttcacttcggaactccttcccccactttcttcactccagtttcttcacttgcagcgttttctgctaagaaagacttatcatcttgtatctgtttatgcctctcttctttggggcccctggatgtttttgtggatttttacagagtatttatatctgcacagcgtgtattttgttatacattcttacaagcattgatattggggggtacattcataatagtgagaatatctggcagaatgtgtgaatgccatatctgtagatgacgatgaatgtgaagggttaatgtagaaatgtttgtttattctgttacagctcaaaatggaggctgagaatctctaccaccattcccttctctatttgagaatctctaccaccattcccttctctatttgggaaacaatactctcttattttgctatttttaccttcccattaactggcttcactcaacagtgccagatacctatggagaggggaagtaaaacaccttaggtcaggaataataaaccaatgagttagctcagggccggtggacatgttcactggtggaccagttggcattgacctaaacggacagagaaatgcacatggaggagaactacgttgaaatcaagatcctatgtctgttgtattttctctttgcctggagtaaatagcattataagtcattccacccttattagataaccaaagcatattggtctcaatagctttctcctgaaaaatgtgattgaatcttacctgtagcagttcactcttaaggttgaaagaactgtcaatatagataaaatccattccttattattattgattggtgtgacatttgaaaatgtgtctaaacaatatttgtaagtaaaagaaccagtcataagcctcaaatgtgttcagtgtgtaccaagctggaatgggagactggcccctcttggctttaaagtagcatgttgtctttttctagcagcttcttcctagtagacattccagggatgggaggggccagggatcatgtcttactcatttctgtatcgccagcccctggcatagtgtctggcttatgttatgtgaataaatgaatgcttgccaagatctcttcttccctcaagtttctggaaaacctgagggttcgtgatacctgttcccactcctcatcagcgggttggcaagaaagcaaataaggggaaacatttttaacattccaagcaagagaaggaagaacgactattgggaggaggtacaccagagattgctcagtgtgcagcctgctacctcacttttggctctggattgcctggtggtagaagggaagagtattatgtagttagcaccttacatatttgatgctcaggaagaaagtgcaagaagatccctaatagaacattaaagattcttaaaagtttttgaagtaggctgcttggggtgaccagccccacccttacatctccatagttggtacagttagcttgtagcagctgaagctgatgcctggagatcactgtctgttggtctgatctcagtatcatactgagacacctcccctgagccttacctacttaaattggtaaccgtcctaccaaaatttgtcaattttaatcaagtgaggcaagttgcaagggagccagagatacgtgaaaaaagaaaagcagaaatactgatactttctaagaaagaagttgtaataatttctttggcacattgacttactgatatcttttgaaatgcatagacgactcttgtgaaccaaagagagcagtagtggttattccccggcgcaataaaaatgcctttgtgtatcacttgcgattgccagtcatttctgtgccagttgctttcattccagagaatggcctcattctccaaaaaaagatgatgattttagaagtaggatttcctaacaaattatgtggtggggagggacggcggggattttattcatcccgtctgagctcttcatacagtattaccattaggttttaagaacaaagatgggggaggagggagtagaaagctgagagtacgtagaacagctacaagacattagtgggtattcagattttgagctgtgtaaatatcaaacatcggcttccagccttaagagttatttgagcagagagttaaggaggaatgggagattttgtgaataaaatgttttgccaaactgaatga

SEQ ID NO: 1803 - protein, 197 aa, Homo sapiens
MRPAVGLVFAGCCSNVIFLELLARKHPGCGNIVTFAQFLFIAVEGFLFEADLGRKPPAIPIRYYAIMVTMFFTVSVVNNYALNLNIAMPLHMIFRSGSLIANMILGIIILKKRYSIFKYTSIALVSVGIFICTFMSAKQVTSQSSLSENDGFQAFVWWLLGKYWGIDFCSSDVSKDGDIPRDSLQTIWETLQGGFVL

SEQ ID NO: 1804 - DNA, 1219 bp, Homo sapiens
tgtcctctctggcggagctgcctggcggaagcgggaacgtcgcatcctgaggtaaaggtgcacggcatcctgggacatgtagtctggccggggctcggacgccccctcggatgaatgggaccgaagctgactgcgaactacagcttcttggcagcgtcggtgttggccgcgggagaaggggagaccgcggcggcccccagtgagagcggctttccaggacggtgcgatgtgctgcgcagcgaagaggcaggaggccggcttcctggggtagcggtacaggcgggcgcttactctgtgcgcttgcttccccaaccctgcaccggccatgcgcccggccttggcggtgggcctggtgttcgcaggctgctgcagtaacgtgatcttcctagagctcctggcccggaagcatccaggatgtgggaacattgtgacatttgcacaatttttatttattgctgtggaaggcttcctctttgaagctgatttgggaaggaagccaccagctatcccaataaggtactatgccataatggtgaccatgttcttcaccgtgagcgtggtgaacaactatgccctgaatctcaacattgccatgcccctgcatatgatatttagatccggttctctaattgccaacatgattctaggaattatcattttgaagaaaagatacagtatattcaaatatacctccattgccctggtgtctgtggggatatttatttgcacttttatgtcagcaaagcaggtgacttcccagtccagcttgagtgagaatgatggattccaggcatttgtgtggtggttactaggcaagtattggggcattgacttttgctcttctgatgtcagcaaggatggggatattccaagagactctctacaaacgatttgggaaacactccaaggaggctttgttttataatcacgcccttccacttccgggtttcgtcttcttggcttctgatatttatgaccatgcagttctattcaataagtctggtgagtttggggttagacagtagaattacctgacagtttctgaggcagagtctcagttttactcttgacttgacctcggcctttttcataatcctattcaaatcatgtgttcctttcgaaaatgtctccattccactttccagtcattgcagcagcaaaagcttttacaggggtttctcaattatttacaaatgaagtaaaagaatatcttcgagtt

SEQ ID NO: 1805 - protein, 197 aa, Homo sapiens; identical to SEQ ID NO: 1803

SEQ ID NO: 1806 - DNA, 6831 bp, Homo sapiens
tgtcctctctggcggagctgcctggcggaagcgggaacgtcgcatcctgaggtaaaggtgcacggcatcctgggacatgtagtctggccggggctcggacgccccctcggatgaatgggaccgaagctgactgcgaactacagcttcttggcagcgtcggtgttggccgcgggagaaggggagaccgcggcggcccccagtgagagcggctttccaggacggtgcgatgtgctgcgcagcgaagaggcaggaggccggcttcctggggtagcggtacaggcgggcgcttactctgtgcgcttgcttccccaaccctgcaccggccatgcgcccggccttggcggtgggcctggtgttcgcaggctgctgcagtaacgtgatcttcctagagctcctggcccggaagcatccaggatgtgggaacattgtgacatttgcacaatttttatttattgctgtggaaggcttcctctttgaagctgatttgggaaggaagccaccagctatcccaataaggtactatgccataatggtgaccatgttcttcaccgtgagcgtggtgaacaactatgccctgaatctcaacattgccatgcccctgcatatgatatttagatccggttctctaattgccaacatgattctaggaattatcattttgaagaaaagatacagtatattcaaatatacctccattgccctggtgtctgtggggatatttatttgcacttttatgtcagcaaagcaggtgacttcccagtccagcttgagtgagaatgatggattccaggcatttgtgtggtggttactaggtattggggcattgacttttgctcttctgatgtcagcaaggatggggatattccaagagactctctacaaacgatttgggaaacactccaaggaggctttgttttataatcacgcccttccacttccgggtttcgtcttcttggcttctgatatttatgaccatgcagttctattcaataagtctgagttatatgaaattcccgtcatcggagtgaccctgcccatcatgtggttctacctcctcatgaacatcatcactcagtacgtgtgcatccggggtgtgtttatcctcaccacggaatgcgcctccctcaccgtcacgctcgtcgtgaccctacgcaaatttgtgagcctcatcttttccatcttgtacttccagaaccccttcaccctgtggcactggctgggcaccttgtttgtcttcattgggaccttaatgtacacagaggtgtggaacaacctagggaccacaaaaagtgagcctcagaaggacagcaagaagaactgaggcctgtctggagtacgtagaccagtgtcgtcgtgagggtgggaccctgtgaaggtctgaccaccgtttcgcttttgttaatgccgagctacccgcagtgctgagccagccgtgcaaaaggaaatcttcaggaggggacttctcacgttgctcagactgacacatgtagactaaatagaaacccctcagccctaaaatagaaaaaagaacagttctggactattgaacagcccattcatttatttctgttttgtttaccgacatattcagtattattcttgttttctgaattctgagtctcctgaacaaaaggcttactatccatggtcttggaaaagattgtcccttctcttgctgttgtaatgcatctctgctacagcagtcattgtcatcctgtgaccttatcccttttgtctcccatcaccttttccttcttcagcagcacctcacagtcagtcagacgctgcaggcaccactatcaccaggagtggccaagtaaaccgagacaccagtaacagcagggctggacttcctccagcgttttgggaaggaaagagatgttcccctgagctgattcccagtgacagtgcagcaagactagtgggactcctctttcccacattttgcttttttttttttctatgcaaaagtcagatgcttctatccattgctttctgtgattagggcggccctgcagcatatctcacagcagacacagtgttcataacaaagaaaggttgtgccgggcacggtggctcacacctgtaatcccagccctttgggaggctgaggtgggtgtatcacttgaggtcaggagttcaagaccaatctggccaacatggtgaaaccccatctctactaaaaatacgaaaattagctgggtgtgatggcgcatgcctgtaatcccagctacttgggaggctgaggcaggagaatcacttgaacccgggagatgaaggttgcagtgagctgaggtcgtgctactgcactcccgcctgggtgacagagtgagactctatctcaaaaaaaaaaaaaaaaaagaaaggttgttatggactggacacccctgaagcccattgcctaggccacagtggtgacggcaggatggccctgctcagcaccgcaagagccatggctgtccctgttggcccagccgggcactcacggggcagaagggtgggtctcaagtgggaggataaggcttcaccaccaggagattcccctctgcccgatgactctgttaagagtcacgacccatcaagggaatgcatagatggagatatatagtgtgtgatgtgtaaatcaggtcaaacctcaacgacaattgaaagttgttattgtcctatgaggtatcttagcattctcgatgggtattgaggatggttggatgtgctttattgtgtgtggaaacatgcctctctttgctaatcatttcagaggtccagttttcctttcactggacaatcttgaataggaggaacgctgttgctgtaatatgcgtagcttctgtgtgctcttgtgtagtctgtgtgtgatcaaagggcacggaagtggctgcactttcacatcccttttctttacttagctggaaccttacataccagtacatgctcctctgtaagcagctgaactcaccggccacttctctgtttgcctatagacaaagactgtgtgtgtgtgtgtgtgtgtgtatgtatgtgtgtgtgtgtggtgcacacattgtgttcttaaactgagacgtggctctgcaggtctcctgggctcattccatggtgtggtatgtttattccactgtccagagctattctctgatggatttgagcaacagcagtggagataaatgtcctagagtcaccaggtcgcttggagaagtcatttaagctgcctcgggtttttgttacttaaaatgtggatattatttctccacctaaatcactgagtttacagagtaataatgtgttgctctggacattgacagctttctagagccagtaatgggctcttctgaaggatgctgaattagaagtgaacctattcataggatcaaaagccacttgctttgaaatatgtagagttcctcagaattgacggtgctagaaatatccaagtgttaaataaccttttaaaagcaacaaaagctacttttttcttaccacttaatagaagaacctgtccctagaggcgacttcattgctatggatctggagtctctgaactcttaataggatgcagcctcacatacataatgtcacccattttatgttgatgaaaacattacaagttttcatcattgggtatgtgttgatgttcacagacagtacttgggcccattaggttttcgcgtctggtcttagagcatgtgtattcatctcagcgtgaatacctcagccagtcttatgaataggaggctatgtatgggcagggaatagattagattagaacactcgcacaagatgaccacatatagaagcagaaagccccaaattccctgggaactgttttttctctagtagctgaatataaggaaatatgtctaatggacaccagttaatactttttaaaactactctttaaaaaaaaaatacgttccccttggttaactgattttttaatccagggtggacattttttcaacctttattaaaaagacaaataaactattttgtagaagatcagactcctacttaactggaagagaaatgtctattaaatgtctctcctctttctctgggtcaagaccatgtaattttatgcttcagagatgaagatactgtttgtttacaaagagtttagtttttaagacatccaaaactctatgctagagcaaaaatcaaatagcaaaggacactagccagaaaatacagtgtgtgtgtgtgcacctgtgtgcctgctgaacaacttgacagtgtaacagataaggtaactgaagatggtggatatttgaattgtattagcttaatgtctacatatctttggccaaaactctattgtcatattagaaacatgttatctttttcatgtttattagtaatttatttttgattctttgttttctttttcgtccaactaaaacaactgtaatgtacttgatacatttatatcaagttctaaagtatttagacaaatccaaatactttgtttttagttttttcctcctttccatcctgttaaccacagtgaaacgctgcagtattttgatttggtcagtgctacggaggaagaccatgaaagctgaattggtctgtgccacccagagtaaacctcttctcttcttctggaaagatggcgtgatgtttttcaaggattctaataaatatcccgcagtcatctcctgagcagctttcctctgtttcacttcggaactccttcccccactttcttcactccagtttcttcacttgcagcgttttctgctaagaaagacttatcatcttgtatctgtttatgcctctcttctttggggcccctggatgtttttgtggatttttacagagtatttatatctgcacagcgtgtattttgttatacattcttacaagcattgatattggggggtacattcataatagtgagaatatctggcagaatgtgtgaatgccatatctgtagatgacgatgaatgtgaagggttaatgtagaaatgtttgtttattctgttacagctcaaaatggaggctgagaatctctaccaccattcccttctctatttgagaatctctaccaccattcccttctctatttgggaaacaatactctcttattttgctatttttaccttcccattaactggcttcactcaacagtgccagatacctatggagaggggaagtaaaacaccttaggtcaggaataataaaccaatgagttagctcagggccggtggacatgttcactggtggaccagttggcattgacctaaacggacagagaaatgcacatggaggagaactacgttgaaatcaagatcctatgtctgttgtattttctctttgcctggagtaaatagcattataagtcattccacccttattagataaccaaagcatattggtctcaatagctttctcctgaaaaatgtgattgaatcttacctgtagcagttcactcttaaggttgaaagaactgtcaatatagataaaatccattccttattattattgattggtgtgacatttgaaaatgtgtctaaacaatatttgtaagtaaaagaaccagtcataagcctcaaatgtgttcagtgtgtaccaagctggaatgggagactggcccctcttggctttaaagtagcatgttgtctttttctagcagcttcttcctagtagacattccagggatgggaggggccagggatcatgtcttactcatttctgtatcgccagcccctggcatagtgtctggcttatgttatgtgaataaatgaatgcttgccaagatctcttcttccctcaagtttctggaaaacctgagggttcgtgatacctgttcccactcctcatcagcgggttggcaagaaagcaaataaggggaaacatttttaacattccaagcaagagaaggaagaacgactattgggaggaggtacaccagagattgctcagtgtgcagcctgctacctcacttttggctctggattgcctggtggtagaagggaagagtattatgtagttagcaccttacatatttgatgctcaggaagaaagtgcaagaagatccctaatagaacattaaagattcttaaaagtttttgaagtaggctgcttggggtgaccagccccacccttacatctccatagttggtacagttagcttgtagcagctgaagctgatgcctggagatcactgtctgttggtctgatctcagtatcatactgagacacctcccctgagccttacctacttaaattggtaaccgtcctaccaaaatttgtcaattttaatcaagtgaggcaagttgcaagggagccagagatacgtgaaaaaagaaaagcagaaatactgatactttctaagaaagaagttgtaataatttctttggcacattgacttactgatatcttttgaaatgcatagacgactcttgtgaaccaaagagagcagtagtggttattccccggcgcaataaaaatgcctttgtgtatcacttgcgattgccagtcatttctgtgccagttgctttcattccagagaatggcctcattctccaaaaaaagatgatgattttagaagtaggatttcctaacaaattatgtggtggggagggacggcggggattttattcatcccgtctgagctcttcatacagtattaccattaggttttaagaacaaagatgggggaggagggagtagaaagctgagagtacgtagaacagctacaagacattagtgggtattcagattttgagctgtgtaaatatcaaacatcggcttccagccttaagagttatttgagcagagagttaaggaggaatgggagattttgtgaataaaatgttttgccaaactgaatga

SEQ ID NO: 1807 - protein, 329 aa, Homo sapiens
MRPAVGLVFAGCCSNVIFLELLARKHPGCGNIVTFAQFLFIAVEGFLFEADLGRKPPAIPIRYYAIMVTMFFTVSVVNNYALNLNIAMPLHMIFRSGSLIANMILGIIILKKRYSIFKYTSIALVSVGIFICTFMSAKQVTSQSSLSENDGFQAFVWWLLGIGALTFALLMSARMGIFQETLYKRFGKHSKEALFYNHALPLPGFVFLASDIYDHAVLFNKSELYEIPVIGVTLPIMWFYLLMNIITQYVCIRGVFILTTECASLTVTLVVTLRKFVSLIFSILYFQNPFTLWHWLGTLFVFIGTLMYTEVWNNLGTTKSEPQKDSKKN

SEQ ID NO: 1808 - DNA, 39222 bp, Mus musculus
  misc_feature (1)...(39222): n = A, C, G or T/U
aagcagaagggaatcttccaatgattccctgatgccattcttacaatctacctcccagacctgaacccagtcttctgggcgcagccccctttgctcccgcttcttccatcaaaattcagacttgcgctcaaccatggctcttaaagtgttgtaaccacgccggccagccattggctagcacctgctgagaggctggcatggagtgaagccctgtaccgggaaccagggacctgagtcccgatgctcctgactcactcactgagcaacttcgggcatgtcacgaccatctccggccctcagttcctcctatgtcaagcgagggccagaccggagacgccttcagtcccctaccatgcagtgacagcgccgccctcgccccggagggcagggttggagcaggaggcccgccccccgagccgcctccgccgcccctgccgacccctcacccggaaccccttctctttgtccgccttgatctccgcatccagctgccgcagtgtgtgcgtgaagccacggaagagcaggtactcccggaccagctcgtctgtgcgctccaccgcctccgccatcgctgcgcgcgcgcgctgcaaaagacccgagccgctcagggcggaggggcggggcttggagcgacggggcggagcctatctcgggcgcctcgtacgtcacgccacgcccaacctaccaaccttgcgctccgccccgccccgcaggcgccccgcccatctccccctgtagccccgcccctccctactctcagccagctcccgggcgtctcggcttgctgaagttttctggtgatacagagtgtgtcctgagttgctaacactgatgcctcgatccaagtaaagtaaagctggaccttgcgaaccttccacatattcacagggcggggagggagtgatgttcccagcttattggcatgacactgcagaatcttttgtcctctatcctcctcttacaaaaggagaaaactcgagccccaacaggtaaagtggccagtgtgaagtcaactcataaaagtccagcttggacctcttttcttttcttttcttttcttttcttttcttttcttttcttttcttttcctttcctttcctttcctttcctttcctttcctttcttttcttttcttttcttttcttttcttttcttttcttttcttttccttcttttttggccagggcctcacacacgctaggcaagcaccctaccgctgagctgcttttgggttttgtcacagtctcactaaattgaccacacagatcttgaacttgcaataaaaaaaaaatccccaccaccagtcctgtctagccctgagttcctgagtaagaagggtaaactataccaaccaagatgtaccacttagagaaattttaaaaaaggcaagtttcagaagggtgtgacctatggtcccagtttcttgttagttttttcaattaattgtggttttgtgaacagtttttaaactcaggaaaattgtaaaacaacctatattttattctctgaaggacttccagttccttttgccttctttctttttcttgtttagaaaattatttgaagtttttacaaggcatacatacacattttgccttatttcttcatctttgagagagcactgataatgtccaccaggcacagtcataatgacgatttgataagatagtgcatgaagaccaggcgtggtggtgtatactctggagacagagctaggcaggtctctgtgagttcaaggccagccattcttaattaaaaaaaaaaaaaaaaagccgggcatggtggtgcacgcctttaatcccaacactcgggaggcagaggcaggcggatttctgagttcgaggccagcctggtctacaaagtgagttccaggacagccaggactacacagagaaaccctgtctcaaaaacaccaaaaaaaaaaaaaaaaaggcatcaaaaagatcaaattatttatgtgtatacacacacacatacatacacacacacacacacacatacacacatgggtgtgggtatctatgcccttgtgggggcccaaagagagtactgggtgtctttctccactttttcctttagaaacagggtctctccctggaactggggctctcattttcacggctaggctggaggccagcaagcctccacagtcccttatgtctgcccgcctcagagctgaggttatgcttgtttatagggacatccagctttatacatgggtgctagggcccaaactctgatcttcatgattatggagcaagcagtcttaactactgtgccatctctccagcctcaagattgtattatatatataaacatataaatatataaaattatttatatagaatgtatagtacattgatttttattatatttatatataatataaatacattttatataatatattatttatatataatacatacatatattatatattatgcaatatataatatattatacaaggtataatatatatttatataatagttaaatataaatttttacttatatattgtataaatataaaatatattttttacatatttatattatataatgaatgagaagcagtctctctgtgccctctcatacaccccttgttcaatctgaaatgtcttcaggcactcacattagctgccttttctccctccagcgtttgttcagatgtcatgtctcagtttttgtctgctttcctaacaaagtgtcacgaactgggtggctttgaaaggacttagttctcatagttctggtgcccagaaagttaaaaatacaggctcggctgtagcacagattttaggatcaaagaccggnnnnnnnnnnnnnnnnnnnnnnnnnnnnnnnnnnnnnnnnnnnnnnnnnnnnnnnnnnnnnnnnnnnnnnnnnnnnnnnnnnnnnnnnnnnnnnnnnnnnnnnnnnnnnnnnnnnnnnnnnnnnnnnnnnnnnnnnnnnnnnnnnnnnnnnnnnnnnnnnnnnnnnnnnnnnnnnnnnnnnnnnnnnnnnnnnnnnnnnnnnnnnnnnnnnnnnnnnnnnnnnnnnnnnnnnnnnnnnnnnnnnnnnnnnnnnnnnnnnnnnnnnnnnnnnnnnnnnnnnnnnnnnnnnnnnnnnnnnnnnnnnnnnnnnnnnnnnnnnnnnnnnnnnnnnnnnnnnnnnnnnnnnnnnnnnnnnnnnnnnnnnnnnnnnnnnnnnnnnnnnnnnnnnnnnnnnnnnnnnnnnnnnnnnnnnnnnnnnnnnnnnnnnnnnnnnnnnnnnnnnnnnnttgccagggaaataccaattcccctgggaaccattgtgtcagtagtctgatagcaaaggaagagacacacaggagtgtccctctttaggatatacattccttcctacaccagggcagtcacaccaggagattcttaaaagcctcaccttccaagccaggcaagtggtggcagtgcacaccttcaatcccagcacttgggaggcagaggcaggcggatttctgagttcaaggccggcctggtctacagagtgagttcccagaacagccagggttacacagagaaaccctgtctcacgcggggacgtggcaggggcgtggtgggggagcctcatctcccaacacactggggattgggtttcagcttacaacattcagaccagagtagtcagcttcttagagaggcttctctgactgccctcaaaatagcattgaacagccgggtgtggtggtgcacgcctttaattccagcacttgtgaggcagaggcaggcgaatttctgagttcgaggccaagcctggtctacaaagtgagtcccaggcagtcagggctacacagagaaaccctgtctcaaaaaaaaaaaaatttcatcaattaatgcaattaatgacttgtctgtctctccttccattaaaacatacgcttgatagatgggaggagagattatcatctgtcttatttattatgatatctttagagcgcaaaataacatttggctcatagcccatacgcaataaacatttactgcgggcaatatcaattagggccagccaccttcaggcaagcccattcttggagaaaaactgaggaaacagagagatacagtctcaaatggaaacccaaccaaggaggtttgagcagccaacatggggacccagaacaaagtcctggtacctgactcccacagatgcatctgataacatctttatactgatgcctacgaaatatcccttccaggccaggcctctgtcctaaactcctacgtgatttcccaaggacatttccacatgtctatcccataggtgtctctaactgaaaagcatggatggagactgtaagttctaacctgtgattgaggcttacaaaactatagatgagaaaacagaatgcaataaccacactgtgaggatctgacccagagaaggaagacatctttcacattataaaccagtacacatgggctagagagatgactcagcagttaagagcattggctgctcttgcagaggacccaagttcagcgtctaacaggcacatagaggctcacaggcatctgtaacttgggtttcagaggttccagtgaaactcttctggcctcagtgggcaccaggcacatacacggtacacatacatatgtgcaggtattcatacacacaaataaaaataaatgaatctctaaaataaaactgtatacaaatgtctattcatcataaccaaaaagactggacatactctagatgtcctttgacaacatgagtaattcataggatatctttgaaaatgtgaaatgtagacataaagaaaacgtacccctggttaatggttgagggacacgagaagccaggggagtgttagcatgtaaggggcaatgcaaggcaatgcaaggggttcatatggtagaactgggctgcatcatggctgcttgtggatgcacatgtgtgtgaagaaacacatacatgccaacacatagagatctcactaaaaccattaacttaaaaatatcaatattgtgactatgctatattgtgctttatttttataagattttataagcaaggaaaaacaaataaagattacacaagtctttctgtattattctttggggttgcacattagtagttattctaaaaccatacatttaagggtaggcatgtttgtgtgtgcttgtgttccagcattcacaggtgcacctgtgtgttgaggtcagaggtcaatgtcaaatgtcttcctcaattgcttcttcacctcattttctttgagacaggctctctcactgagcctggagctcaccagttggctagactgaacaagccacaggtatcctgcctctacttcctcggagctgggattacaagcatggaccaccacgtctcagcttcttgtgtttgtacagcaagcactatactagctgacccactgccccatcaccattaaaagtatagattctagctgcaataccattactttaggtgacttttttttttttttttccgagacagggtttctctgtatagtcctggctgtcctggaactcactctgtagaccaggctggcctcgaactcaaaattctgcctgcctctgcctcccaagtgctaggattaaaggcgtgtgccaccactgcccaactttaggtgacatttttatactctgtatatgaacatacataaaattattagcagttattggttgcaggtaatggacatactatatttgtgggtatacctgaattttgatattttctaacattgttcaaattccttactacaaatatatattcagctggatttataactataatgaatgaaatattatcttgaagatttatttattttatgtatgtgagtacactgtcactgtcttcagacacaccagaagagggcatcagatcccattatagatggttgtgagtcaccnnnnnnnnnnnnnnnnnnnnnnnnnnnnnnnnnnnnnnnnnnnnnnnnnnnnnnnnnnnnnnnnnnnnnnnnnnnnnnnnnnnnnnnnnnnnnnnnnnnnnnnnnnnnnnnnnnnnnnnnnnnnnnnnnnnnnnnnnnnnnnnnntcagtggttaagagcactgattgctcttccaaggtcctgagttcaattcccagcaaccacgtggtagctcacaaccatctgtaatgtgatctgacaccctcttctggtgtgtctgaagacaactacaatgtactcatatacataaaataaataaatctttaaaaaaagaaaagaaaagaaaagcaggcagtgctcttaactgctgagccatctttccagcccatgaatgaaatatttaatagcatcttcatatcctacaacagctatatgtctgtttttctttctttcttgagacagggtctcagtatgtggttcaggctggcccagaactccatatataaaacagtcagttcttgaactggcaacgatcctcctgcctctgcctcctgagtactcggattacggatgtacaccatcatgcctgactggaccagccatctcttagtgctaacacattcaaagctcttaactaacccccacccccaaaatttttacacataaacagctgatgaactaaaactttccctttttctgtgtatgtctctatatgtatttataacggcatgggaaactgaacaggaaacttcattcacgacaggcaagtgccctactgccaacctacagcccccaagcctcatgctggaacctggtaggaacctttgtctggctactactaatgcagaaagcaaagctctttctttcagatcacagactgttaaaacttcctgagaagcgtcaggtcagagtaggaatttgccaccctcttaattaccctgccttccacccctaaggcagggatcaccatttgcagagggcagcaggccaccaataaaggtgataggctagccttggaggctatgagtttatgagcctataaaatgcatcactttcgctacagaaacaactcgcatctcctaagttaataactagggaggcctttgcaagagccaactgtaggagcacacggggaaccaagcctatctcccagcctctgcaagaagctgggcaggggtgtcccacaatgtcccttctcactccttctccaggaatccctctttaatgtcccagtcctgaggttctgctcttcacgccccgcccactgtgtcaagagccactctgcttatcctcgagaaagtttctgtccccttgtatcaggatctgggacagtggcccctatctatcaaattcatgtgagggaatgtaaaggagttatccagcctccacgttcccaacctcaccccagcttgctctgtgccttcaggacctccctctgcagctatcttgctgccagcctagagagagagagagagaaagagagagagagagagagagagagagagagagagagagagagagacatagaaatgccgggtatgttggcacactgtatccccagccatcaggaggctgaggaagatgatgttatagtttgaggctagcctgagctacacacacacacacacacacacacacacacacacacacatacacacacacacaccaggccaaagaaagaaaaagaggagagaaggggagaggaggggaatgaggcctgggtgggagaggaagggagaaacccacttgcaagccttcctaagagtggcctcttgagcaaagagcccaaagtcaagttcactggatcctcttcctgtcacttcacagcctgaggacacgcctcccagagcacttttacagtaaccttacatagcactgtcttcagtgtaggacactacataattgactgagggcccaaataaataaaacaagagaaaactctcactcccccgccatccctctctccttctccatccttctgtctctccctccctccctccccttctctccttttctccctctctctcctgcctgcagcatttggccttcagagtcctgggctctcgagcctttagaccccagagcttacaccagtgtctccccaagttcttagacaccaccaccaccaccactcccgccttgaactgacatttacttcagtgactcctctggctcagaggtctttagatcagaactgaatccatgctattgacaccccagggtcttgaacagggaaacacccttgtcatgggatttctcagccttcataatcatgtgagccacatctcctagtaagtcattcacttgcccatttatctatctataaggttatttacccatccactcacgagccagaactctaattttaggcctccacactttaacagatgaaatggctaaaatccaatcagagaaagatggctcagctattaagagcacttgctgctcttgcagaggacctgggttcagttgctggccccttcatgttggctcacaattgtccagggaatctgataccctcttctggcatctgccagacataaattcaggcaaaatacccatacacatgaaattgtgagaagaaatgttaatttttcttacaaaccaggaccaaaggacattgaaccgaagcagccctctgagttagtctagaacggggatcttgaaagccttcctgacaggaaggtggtatctggatcaagtaggagggtggtgaaaccaggaaagaagcacaggatttcagggcagcgctcagcaatgcagggatgcggtcataggccacagggcatacgtgggagggggtgggcttttaaagcttcatgcagaggccagagcactggatcgcccctggagttggagttgcaggcagttgtgagctaccttcggttccctatcctttggaagaacaatttgagctcctagcctctgagctgtctctccagcccttgtagggtgggggtagggcaggagctatgttacatggaagcagagatgaagttcaaaggatagtggtcatatggatattgttaggacccctggaagtccctaccattcaggagcagagccactggccttgatgctgaggaattgcctaaagatctctttttcaataaagaaaccaggctactgcaagagttacatttcttctgtggaagtcaaagtatggaaggaagcacgcatgtgtgtgtgtgtgtgtgtgtgtgtgtgtgtgtgtgtgtgtgtgtgaagtaggcaggggaatggcaactaaattaaaggctgagacctgtcagaggtcaaagtttgcaaacctccacattcctcacaggtcaaggacaaggctctccaagacaaaggttcacagtttcagtacccgttctgcacccagtagccccagcagcaggtacagaggtttaagcagagccaggagaaggaccatagatgcaggcccgggaccacctggaaacccacaacgaaggccgcccgagagtcagaagggataggtcatgacccaagcagagcgtggaagtaaaaagatacttttaaaacttgcctccaagggggtaaggtgtagctgctctttggacctggtacaagcctttgagagaggccctgctgccattcctgtcctcagcactcttttctgtatcggtctggcaattcactacagtgtcttacaaagctccagctcctttagccagccatatccctgatagtttagaggggagctggtaactgggtccccactggtccccactcctgtaccttaagcatcagatctgttttctgtcaggagcaagagcctcatttctaagctcaggttagccaccaacttcattttttttttctttctgggctacctgattgctgcgactacagctatgatccaccattcccactgaacagttttcattttgtttaaaatccacaatctaccaaaaccatttgaaagatgacaccaggactcgctagagtcaaatttaaggtaccctgttgcatactttagaaaggggctcctttctagccagtcacagtcaccgtgaggtagatcccggattggaatccaacttctggtgctaccaaagtcgtggctgcagctgctacctcaagtgacctccgtttaacctctgtggaggggcgggggcgaggatggtgaagcagctcacctcaggtcagactgcaggaggcaccctccctcctattcacaggctgagcctctccccttccaaggggcttttgcttgctttcctttctctacaagagtgcgctcctagtgtgccagtttgatatggtggcgctcgtagtgtgccaaactgatgtggtggtgtcaggaccattgcagatatctcaagatgcgagggaaaaaagtggtttaaagataatagcacatctgatttgaggcggaaaatgagttgtagtccctcaacctggagaaaacttgttgcttactacaaacaactcaacacatcctctctctctctctcttttcttctctgcattttaagtccacctttaaggttctcttctctgcttttttagttgggaatcccctattcccctctcctattttgtacctattccctctcacatcttcatttttctctttcttttccttgaaacaggggactgctactgggaccttgaagatggctcctctatatctcaagagaaagttataggtggcattgccctggttgaggggtgtaagaactggcgctagccgcctggatggggtgaaaaggtcatcttgctccttccacaccctcttgcaacctgtggcaagttgttacaatgttttcaccaatgtccacgctccccattggcgccccaccatgcatccccattggtcatggtggcagtgacagggctgtgattggttcgcagcctggggtaccaggtcagttttttacctgaggcaagagcctctcttcttattctgcgacgggcagtcgtgagtgactgactcgtcagggcttcgtgcagtttcctgcgtgttccacaagtgtcgaaggtgcatggttcaccgtggtggccttaaaggtaagtactctcctaccgtttgtgttctgagagtaaaagtgggtgcttgtgaatgcatgccctgtcagtggatatttaatctgtttgcacaagtttgtgtgtatgtgtgtgtgtgtgtgtgtgtgtgtgtgtcaccggcgacttaagtgcgtgtgggtcacccgtgactcctagagtgtatggggagggtcagccgcgactcctagagtgtgtatgtgtatcgccgtaactcccagagagtgtgtgggtcagccgcgactcctagagcttctgtgtggatcacctgtgactccttgaacttgtgtgagggtcatctgcgactcctagagcgtgcgtggggatcacccgggactcctagagcttgcgtggggatcacccgggactcctagagcatgcgtggagatcacccgggactcctagagcgtgcgtggggatcacccgggactcctagagcgtgcgtggggatcacccgggactcctagagcttgcgtggggatcacccgggactcctagagcgtgcgtggggatcacccgggactcctagagcgtgcgtggggatcacccgggactcctagagcttgcgtggggatcacccgggactcctagagcgtgcgtggggatcacccgggactcctagagcgtgcgtggggatcacccgggactcctagagcgtgcgtggggatcacccgggactcctagagcgtgtgtgtaggggttacccgggactcctagagagtgtgtaagtcaccagtgactgctagattgtgcttgtggatcaaccacgactcctagagaagggggtgttacccgctactcctagaggatgtgtgtgggtcacctgcgactcctagaggatccgtgcatcacccgcgactcctagaaaacgtgtggtggtcagctgcgacccctacagcatttgtgggtcacttgagactcctagagaacggggggggggggaagggagtggagagcggagtcaggggggaagtcacctgcgactcctagaggatctgtgctgtgtgtcctcctcgactcctagagcatgcatgtgtgggtcacttgcgactcctagaggatgtgtgggtcacttgcgactcctagaggatgtgtggttcacttgcgactcctagaggatgtgtgggtcacttgcagctcctagaggatggggcgggggtcaccagcgactcctagaggatctgtgcatcacccgcgactcctagaggatgtgtgtgtgtggggggggggtcacttgcgactccttcgggtcacttgagactcctagagaatgggggggggtcacttgcgacacctagaggatgcgtgtgggggtcaccagcgactcctagatgatgtgtgggagttgcctacggctcctaaaggatctgtatgtcacctgcgactcctagagtatggggggggtcaccccgactcctcgaggatgtgtgtggatcacttgtgactcctaaaggatgtgtgctggtcacctgcgactcctagaggatatgtggggtgcctgggactcctagagaatgtgtgggggtcacctgcaatccctagaggatgtgtgtgttgggccaccaggaactcttagaggatgtgtgtgtcacccacgactcctagaacatgcgtgggtcacttgtgactcctagaggatgtgtgggccacccggaacttatagagcatgtgtgtgtcacctgcgactcctagagcgcatgtgtgtgggtcacctcttactcctagaggatgtgtgtgtggatcacccacgactcctagagcctgtgtgggtcacctgcaactcctagaatgtgggggagagggtcaaccatcgactcctagaggatatgtgttttactcacgacttctagagagtgtgtgggtcacccatgactccgtgtgtgtgtgtgtgtgtgtgtgtgtgtgtgtgtgtggtgtgtgtgtgtgagagagagagagagagagagggagagagagagagagagagagagcagggattcctagagcatgtgtatttatatcacccacaactctttcatgtttgatagtgatattggatttttacataatcataatcatttttacacaatcataagcataaggaatggaagaaagcccaagtacagcatattgctcctttctacctaccacttgctaataagaaggctcacatgcaaggggttttcagagatacttaaaaattttgaaagttttctgaaacctagaaaaaaataagatcacttatttttatttaatctagggaaataaaagaaagtaattaatttagttcagttggcttctccattagttttgcttgttggatcgagacaggtgtctttcaccacatctagctttggggaactttacaaaatgttagttccgagttggtattaagtggagtttgtatagaaaaaatatctttggctataaaaatgtggtctgggttgggcagtgacggacacactaataatcccagcactagggaggcagagacaggcagttctctgtgagtttgaggccatcctggtctacagggtgagttccaggacagccagagctacagagtgaagtcaagtctcaaaaaaggggcaggggacaagagaaaagcctgttttagaccttggcctagtggtatacattagtcactccagcactgagaaaagcctgttttagaccttggcctagtggtatacattagtcactccagcactgagaaaagcctgttttagaccttggcctagtggtatacattagtcactccagcactgagaaaagcctgttttagaccttggcctagtggtatacattagtcactccagcactgaggaggctgaggcagaagggttcatgtgttcaaggccagccagggctacataatgagactgtaatcaagccaagtgagagcatttagcttgcagtctactgaagggctttttgcctcctcgttacaggtagaaaaattaagatctagagaattcttggcccattttggtcgtatggctggctaaatgagctagcaatgtgactctggccttatacgcacccagaagctggcctgccattccttacatagcatgaccatgtgttgtatcatctctgaaacaccttactcatccaccacctagatttctcttttctttctttttttctgtcttttattttaggtaaaatcttgatatactaggtaacactacctgtaattaagttttaattgtttttttttcatttatcatacaaaataatgaattcatggcatatttatgttgcttttgctttattttgtttgcttggtgttttctttgtctttttcttttctttttgttgttgttgttagttggttttgttttttctttttattgttttttggtggtgatgattggttttggttgtggttttggtatttttttttgttttgggttgttggtttgtttttgtttttgtttgggtttttggttgtttgtttttgagaggggctgttgatgcgtttgtttgaggtggtctcatgtatgtgagctcagtcttgagcttgctgtgtaggtaaagatgatcgtgaactttggataccctgcttctcaagcgccacctgcctggttttctggttctgtggcgttggggactgaagccagtgcttcgtccacgctagctaggcaagcagtctgccagctgatctacgtagccaacccaagtctggaaatttctgagacagaatctcgcttcttagtctagactggcctggaaatctgggcaatctttctgcctctgcctaccaaacactgggattgcagtggtgagccgttattctctctcagagaaaaatatcttcagttagggatagtaacacaaacctctaattcgactacttgggaggccaaaacgggaggatcctgagtttaaggataggccaaggtacagtcttgagactcgaaaacaaaaccaccaccaccaccaccacagcaacaacaacaacaacaacaacagcaacaacaaaatcagtacttttcttcaaactggtatctccatcctgagttccctgcatcctggctcatctgggtgcgtacattcagtcctctggccgtgccagtttcttcgagtgagcatgggactttgctgcccctgtagcatctctctcttcttttcttagtcagcagatgcacagtattggttcccatggctctttagtgcatctctaattggtcgcctctcactgtgcctgttaagaactgaattggtgaaatagtgaatgcttggaatacaaacagttctgtatggttagggagaactaaaatgctgattcttctacgctctgctctgtgttttcctcttaagtctcattgcccttgccttcatcaatcacctctgctgttccttctaacctgggatctttgtcttagcagggctgtcaatgggattctttgtttcaatttgaaaaggcagtgcagacaagggtgttggcctgagccacatctacctgcagatgcctgcattttgccacatgattggaagaatgccagcaacgcctgtgagatggagcctcaccaagggtctcgtgggcagatctggatttgaggccagccgaagcaaagcaaaagaaacagagaacaagccagctctagatgggtagaaaccagggctgaggacagatatgtgatgttctaggtgacaaaaatgacgaggctgccgcatgggggtcagggggcagaatagggaacatttctcccattagagaaccatgcaagggatgggcttgcgtgcctaaaatcccggctctctggaagctgagtaaggaggagagttccgggtcggcctgggctactcagcagactcatgggcctggggtcggggctagaggaagcatatcttcagaacttcctggagtttttaagagtgttgcaagctgatgtgctcttcctagtgttggaatcccagggtatacagactctctacagacctgactcgttaagctgctgagggcagatttcttcatacatcttaatctatgagggtttttaaagaaaagggtttgttctgttgtaacactttaggcacagccaggaagtgctgtatcatcaagatacacccctagctaaaatattctaatatatgtgtttgtagaggtggggggggggacagtaagtgaaaatgtgtgcccactagtgcccctagaaccaagagctttggatgccccctggagctggagttagaggaggttataagctgcctaatgagaatgctgggacttgaacttgggtccttagcaagagcagcaagcactcttaactactgagccaactctcccgcccctaaaacagttttgttttgttttgttttttaaacttcacttcttagttggtgggcacagacacacacttgtaatgccaggattcaggacggtttggcaagaacatcttgagttcatggctgtcttcggctgcatgataagaacctgtcctacacatacacaaccacttattgaccttaagtttacactgtagtaggtcccccactcactgtgtgctaggtcacccattcttagcacagcgctaacttcagtcctgccttcccttttcccatcccgaggagattctggaggtatttttccagggtgaggccgcgccacacaatcacagttactattgacctggatccaagtgcattgctgttcagtctgggaagctcagagagcaagatgcgctcaccatgcaagctttacaatctgagctcttccctggggtcctgaagaggtgaaaggagagaactcgttctgtatggctatcccctgaccttcacgcatgcgcgccccccacccacacaaattaataatgctaaataaaaacatccagcctggccttatgttctggcatatccctttagtttcagcactccgatagcagggatggatgagttccagaccagctagatctatatagggagttccaaagcaggcccttaaaaaggttggtcagaaaaagatagacctaggcccctgtaagggacaacagcaaatccaggtcaataataataattaggagagacgatctttgggaagttgcagaagatctttgctggtgatgacaagggggcagcttgcaggaggccactgaaaatcactcaactgtcctttgccatctgccagcctttaccctcctccccggggcagagtctccaagtttcctccttagctcctgacctgggagaacctaaggctgatggaaggagatcaaggccacaatgccaggtagcccgtggggttgctctgttgctagtctcactccttaagctgggcagcgaagactgacaaccacagtgagagcaagttaggagacagtctcccccctgtggtggagacaagaactgcacatttctccagggctcccaccagccaagcagttttcttggccatgggcattgggaaagcttcagattccctaccagtcaagagggtttgggtacagtctttcatgactcaccggacaactggaaatccactgtaaatggtttgtaattttaggagccaagctccagtaggagatttggggttacctgtggtttattgtgggtcttggtcatattcactgccttgcgggctacgtcctttctgtttgctctgtctgccttcctcaatgttgtatctctattatgcaaggctaaaggggggtatattatgttgtagattataatggccacccctggagaaggcaaccaacccagtgatgatggggcaccccagccattggcgcagctgcagaagcttgagcctcgggtggtccgcagacgcctgtcacaggcccgccatcgagccaccctggtagggctcttcaacaacctaaggaaggcagtttactcccagtctgatatcacagcctcaaaggtacagggacttggggatagtgaaacatgtctccacatgataggactgtaaagtaaggactggccaagagctgccagccctgctgcccataggaaaactgtcaaagcccggcttctctgccagcatcctagcagcctgacctgagagaggaaattatgggctggagggagatcatgtggttacttggtgggcaagagtcatcccccaatggatgctctgggaccctgtatatctatctacacacacacacacacacacacacacacacacacacacacacacacacaccatatacatatgtacaataccaatactagaagtgaatacacacttggcactcatatgcaggctcagtatgcctgtatctcaaggcacacatttatcttttcctaccctttttgtttcttgttgatgctgatgtttgaggcagtctccatgtagcccaggctggcctagaactttccagagaatagaccctccttgaaatcacaccctcctgcctttgcctccccgggtgctaggatgatgttaatcgcaccaaagaaagtaaaggccatcaccccagattctttggtcaaattaaacaagctttattttctatctgttagggctgtctcccccaaaagtgaggtttggaaatacagcattgaacacaggagagggagggtagagtttatacagtccagactagggaggtttcaaggggatttccagaggaactttggttacatcggaacttggccgaacatttttaaattatttggcagagcatctaatcagagtataatcaaggtgtgagtccaactccacgggaaggggaagatgtcaaatttcagaaacaggttaaagcacagtcaagttgaattgttcaggaagtagaaatgaacttgttctgacctatgacaaaatggcttaaaatggagtcaggttggtccatcagatgacaggtgtgtaccacacagctctttctcttctcggttatcttttttagctgctaattaacaatacattaatgaattaattattgtccagagactggagaaaggcctggtaagtggggtgttggtagaagaaatcaagttaataatggtgagagcgttacaggcaggcacagtggagagtccctgtatttcctcatgtcttaacagaggctggaggaggagaggaaggcagagaggagaggggaggggagacacttaccctctggtagaaggcaaggccaaaaaagttcccactccaagcctgactcttctcacatctccctgcctgagctctttatgcccgggaacccgttcccagctggttggtttccttccgaggatggcgccttcagcaaagcaacaaccagagccttttacttttctgtgactagaattgccagaggattcccagtttggggtgaggtaggaagacaccttagaagagctcctgagtaggcctaggcttctgtggaaatttgagaagggtagctcctgaccatttggtacagggctccaactgatacctgtactgtttccagctgcaggagtcccccccacagaccccctacctgcccttggaaaaggtgaggggctggtgagtagcgaaggaaagccaagtttgggattgcagggtgaaagagtggggtccctactgagaaacagagctcagaagagaaaatttcacgcctctgctggcttccggcatctttcacccatccccgccgtcccttggcttgtagtgatggcgggaaattccgaattcaaatccacagaacatttgctatttttagatatgtttagataacataaaatattttaattattttcttcttttttgtcttaaacagggtctcgtgtatctcaaggttgaccttgaactcaatatgcaactgacattgaactcccgagatcctctgcctctacctactgtgttctgggattataggcatatgcctgtagctagctacatagcgagctatatacctagctacacagagtctatgaattcagcaaataaacattttgagaaaaagatactgagttgcacatggtcacaacgtgagcagaagtctagtgggcctttgtgcaaacctggggttgacattcagtctgctgatcccccgtgtcatagtgccccacccgcaagcagcctgtgcacacatctgtgacgctacagctgctgccgctggggtcgttttctcaacacatcttattcccactttggtatttcagtgagcttccatttatagaatgcaaacatgtccccatacattctgtgcactgagaccaacttcctatccattccacagacaaggccaaggatgggacttgcgggggggggggggtgtcggggggcagggagtatggcctcagtgtgacaggggtttcctgggcccatagagaaaagggttccagcagcagtgaaagactgtcttttcaacaatgtctgtctgtgtcctcagtggcaggtactgaataggacaaagattcatattcaggaacaggaagaaagcctggataagttgctgaagctcaaaggcaagagacccctccctagagacggctgccttgggctttccagggaaggcagagatgcatgttaggaacctaccgtgtgtctggccctgtgcttcagccatagctggtcccccaccccagggaatttgcaccctggcagcatgggcaagggtccccagactctgtgggttcaatgggttccctaatgggacacagctaaaggcatcggacctcagctttagggcccagagaggaagtagactagtacttgacctgactctctcctcatgccttggaggagaagtgggaaatggctctgcatgctctaaagctgggagggtctgggatttctgtgcctcctcctggggtccctgaactagacaggcaggagagacccaaaggtctattgttttttggttttttggttttttctctctttatgactcttgctctcctgtccccgatagcatccttcaacctgcaagatgggaatcccaacagcttagaggaggtcaaggaagaatatgccagaatgtattccgagaatgacaggtgagacctggcagatactggagcctggagcctgcagcgctgtgtgacagcagcctccagggagcaaggccatcagggttgctctcactacttacagctgtcccattccttacagccttaaccttccttcatcctcatgacctgccttgggtagtcttcctaaatgatgcgtgcttattacagaatttagaaaaaaatgtgggactgtgtatcatctcacctctctgaaaattcacgttaactctgatggatgtccacccatctgataactttatggttttcacactactttagagagtgtttacccatatatcttggcaagtgtgtacacatgtgtgttatgcttgtatacatatgtgtgtgtgtatgtatatatacatattattatagtattattatatagtttatatattatatattatatattatatattatatattatatattatatattatatagtattatgtggaagactatgctgacattgtagtcaagtttgaacagggagactggtttgggaaatgtctttctatgtttgccccactcttagtcactttcctcaccactgtgacccaggcacccgagagaccccacaaaggagggagcacggttttgctcacagttgcagagttcagtccatagttgcttagctccaccggcttgagcaggatatcatggcagcagaaatgtggaaggggagggctcttcagctcacagaagacagggagcagagagagggataagaaggggtcagggacaaagccccaccccagtgacctatgtcgtctagctaggatttacaatcttatgtgtccagggtgttccaaaatagtgccaccaacagaacaaagccctcacacatgagacttttcgggggaagggggacttcacatgtaaactctaagtgaagtcaagtctacatttaagtttttcactgctggtgttttgtgtgcatggagtgtgggtatattctctgcctgtgttgtggtcagaagatgacataatgcccctttctcatgcatggaacctgcaggccccagactacatcttgtacttgaggggcaaccgtcaagcccttgtctccactggacccatggcatgtcagtctctaatggcatgatataggtccaggtgggcctctgatgagacccagaatgcaagtcacgtcttcccccacatcagagagggctgtgatcgattggctgttatagcccaccaaaatctatgacgttacggtattggtcaggttttttttttttttctttttggtatgaacgcttagaacgttcattttgttctctgtacatttttcctctggtttccagaattttattttatttcttaagttaaatgcttaaagttatttatttttattttatgtggatgggtgttttgcctgcacgtgcctgtagtagacttggcgactggatgctggatctccaggaatggagttatagatggttatgaacagctatgtaggttctgagaattgaacttaggtcctcttggaagagcagccagtgctctcttaaacacagagtcacctctccagccctgttttctaaacttttaagtaacaaatatgtattatagcctttgtgaaataatttttgaatatattaaatatatattaatacttaatattaactaaattaaaaatatattaaatattaactatattatagcctagtggaaatttttgttaaaaatcaagttacaccatgtgaagacgttaaaaaaaatgtgtcaaaaagaaaccacctccagtctcccttcatacagactttatcactttcttgttcacagagaaatcaaatgagataaacacatgctttttcttctatagcctgtagatatggtaaattgactgccttccaaacaatgcaccagcaatcttatatttgtcagagccacttggttattatctatatatttgcattacatagctagtaaaattgtattatgaatttcagtgtgtgcactcactggtgagatttgccaagcaccctcttgattctgtgtcccccccccccagtgtattcctaaacagttttcttcaggacagtccccctgagtggttcccctctgaggctgttggaccagatgctgaagaagaaggagaagaagaaggagaagaagaaggagaagaaggagaagaagaagaggaaggagacgaagaaggagaagaagaagaagaaaacggtgaagagagagaggtagaggagtaccaggaagaggaagaagaagaagaggaggaggagaaaaaagtcgatctctcccactcctcctccactctgttgccggacctcatggaatttgaacggtaagaacaactgggtgggatgctttgtgtgcgcagggggattctattggcaaagggacagacactccagctggcctggatggcagcctccaagcaggcatgattcaacccaggttccaaatcaccaaactaacggatttccatataggaagcaccccaatggagaccagctaagggcctaggcaagcaatgttaaagttacatttgtagagcaaatatagtttttatttagaatgggtgattatctgggggtccctgggggaggagcagttgctggcagttgtttttcatactccttcgaccacacactcatctcagaaatctacttttggaaattgagatccgggccacaactgctcttatgtaaagagagtgcctggcttgctcaaacttctaatgcctcctccacagacttaagaccctctagcagccatattggcttccagaggcatggaggatcactccgtacggagctgagtctttcaagcctgaaattaaagcaggactgtagcaggcctggtattttatagtctcagaatatacccatggtgaggagggctagagcagccgtgcctcgaacaaggcagggagctttgggaacagaagaaatgagagaggcacaaatccacgtcccccgtggccctcaagatgactgctgcatccataaggccaggggaaggcagacacaaaactatgttgttgataaaccaagggacagtggccacggcagtgagctgtggtctgatcttaagcatctgactgcgtgtctgagggacaaaccatgtctgttgcaggtatctcaacttttacaagcagaccatggacctcctgaccatgaacagcatcatctctgcacatgaagtgacacttcctattgtctctgccgccatctcccacctgtggcagactctctctgaggagaaaaaggccagactcctgcaggtgtgggaacagcagcacagcgccttcgcagacctcaccgaggcctgtctagagctggccggggtggagggcagcatgaaggacagcggcgtggacagccagggagcgagctgctcgctggagtccaccccagaagaggtgagcagcccccgttgggatggccctttgccttgagcagaccctgtgagatggcccttcgccttgacttcctcagtgtccctcagcaggtgactcctgagagggctttgtgtatgtgaggagaatgagtggcctcccaatctgaggtacaaatcaattttctttgaatacttagcgttgtgttcgaacacaaactcagaagaaagcaggttcaaaactatctaaacaacgaatgtattctcatgctactgatcattgtaattcttctttttgtaattcttatcttacaacatgatgaaggaaatgcctgcagagaagtaggtcactgtgtcggccatgcgtctctctggccagagagttactccgtggttcttaattacctattcctggttcagaactcccacggtgtacacaaagttcttttatgaagcagatgactgttaatactatcaacatatttgagtttaattcactcatatacatacatacatacatacatacatacatacatacatacatacaaacaaacatacatacatacatacatacatacatacatacacatgagtacgggtgcctacagagaccaaaggacaccagatcccctagagctggaactagaagtagttgtgaactgaccagtgtaggttcaaggaaccgaacttgggtctttcccaagagtcctatgcactcttagctgctgggccatctctccaatccctgaagcccaagtcaaagatattaaagagttttggaatggacagacgtttgactgtggctgttgtgacttgttttataaaagagagtttgaaagaagttctttgctggtcttgccagtgaatgagcaggcactgggagccagccctcctcgcctcaccctgatgcagctcttcgggatgagatgtgcttgtgggttgcagacttgactataactccgcctggagagctttggattgcccttttctggttgtaaattgaggcttagcttttttaggggtggggatagcagaccccagctctttctcctccttttagtaagtccctgggacagtcactgatcagagaccatgagtttggtgctagatatgacatgtgtgcccttcagatgtccaggatgctaagagagagcctgtttgcctcccttggtgcagtagccctgggcatgcagctgactgcagtgttagctctgacacaggtaatggtgtcccttctttcagatcctttttgaagatgcttttgacgtggcaagtttcctggacaagagtgaggcccagcatatgtctaacatcaggtaaggaaggtggcatagggaagtgtgtacgtatgttcgtgggtgtgagattacatctgggtgagggtgtggtatacatgtgtccatatgtgaagtcgtgtgagtgtgtatatgggtgtgagaaggctgtgttaggatgaatgtgactgtgcatgtgagtgagtgtgcacaagtgcctcattcctggggtgtttgcagttactcttctgtatcccacagatatacacataaccctagatacatacataaccccagatgcacacataaccccagatacacacataaccccagatacacacataaccccacatgcacacataaccccacatgcacacataaccccacatgcacacataaccccacatgcacacataaccccacatgcacacataaccccagacacacacataaccccacatgcacacataaccctagatccatacataaccccagatgcacacataaccccagatacacacataaccccagatacacacataaccccagacacacacataaccccagatgcacacataaccccacaggaggaaattcatccttcctggcccagcgccggcgcatacccagttatacgctcagggttctaagaacatgtctcttacttgcctagtttccccagtgtgccttggtcctactcatgcctgctcggggcagtcacagacctactactgaccgatcctacacgacacaactgagaaacaacagacgcttattgcccaaggttctggagattggacactcaaggtcaaggcagagacaaagtctgggagagaccagttccctgtagatagcaccttctttgtaaccagatctctgtagagcatcttttataagagtcctgatacccttctatcattctgggggttagctacatcttccatcatttattttatatgaatataagtcttgtgggggaatcactgagctttggtccataaggcaggcagtagcagccaatctggtgggcgcacagaaccaacacagggctatgctttgagttgaagggatctctaagctgtgcaaagtggggaactgacagggaaagaaaagcaaaggatggctgtctgcaccacagtggcaagatgtgaagtgggatctagaaagactttttagaaagatttatttacttattttatgtatgagtgctctgcctgcacgtacatttgtatgccagaagagggcatcagatcacattatagatggttaagagccaccgtgcagttgtgaggaattgaactcaagacctctggaagcgctcttaagccccaagctacctctccagccccgggacctgaaaagatttaaagcaagaaacatcaagggggactttcccagagtgagaccgtccagaactgaagctctgcaggtgctttttgagagactgtggtcttggctgacatatgcctgacatgtaaggtttttgccatgggactgaaggacttccaggtccttgtcatcagagtgaagggtcctcttagtggtagtccaggaagctgcgacctgggtggcttcaagcannnnnnnnnnnnnnnnnnnnnnnnnnnnnnnnnnnnnnnnnnnnnnnnnnnnnnnnnnnnnnnnnnnnnnnnnnnnnnnnnnnnnnnnnnnnnnnnnnnnnnnnnnnnnnnnnnnnnnnnnnnnnnnnnnnnnnnnnnnnnnnnnnnnnnnnnnnnnnnnnnnnnnnnnnnnnnnnnnnnnnnnnnntcctacttctgcactgggtttagcttgtaagaacaacgtagtcgagaagttgtcagagtacatttgtgagacagcgctaggaactcctcattctgctggaaagacaaggagaaacctattaaagatttatcttcctgccttttgtataaaaggattcctgggctacctggaaccccttccatgaaggggcaaaggtaggtctgccttatgatactcagcctctggactacaaggcactagctgcacagggatgcccataaagatagagaggaagaagaagcccacccacaaaatacaactactatttgctgagtgccacgggaagagcactgagtggagactgaatgaacccacactgtgtatggacaccctgagctgcctcagatggctccaaaccatgagccctgctgcagaagaccgagagtaagagggggctcccatctcttcactcaggaggtctcagcttagaatactacatcaagacacaagagacaggcttgccatagtcacttcttccagatatggcattgcagtgaggtggtgcacacttcccaggaacagcccggggctacttgacaattcagctgggtgcttaaagtttgcacagtgagctggtgtttagggcgtgggtggtagcaagcccaagtgaggggtcaggttctaaatggtttctatttcttttgtcagcgctatgtttgccacctgcaactcagaaaatccagaggagaaatttcagctctacatacagatcattgagtttttcaaaagccttggctgtgttaacactccattaaaccaggtaagatagagtggcgacagcaaaatctccaccaacactgttagtggggagggcactctggcaggccctgactctgcccacctcagagagctttcaggctccctggtttgcttcatagttgttcagctttagtctagctagcaccttctgtacaatggaggataccggggaaactgaagaaagagacagggggatttcccccaggacagatctgcacaggaaccctttgtagcaaggtcagatcctgaggggctggctcctagcaggcactcataaacattgtgtgagctatttggtcttctgtgagtctttcgtggtatttctggtcaggttttgaaggctaacttctctctgaaagctctcactgtagctggtggagaagtaagtcataggatcctggttaggaagtcacttctgaactctcatgggggtggggggtgctgagactgcaccaccaggggacaggccctttcagatgcaccgccatggtttttctcagttaacctagcaagataaagctgtttgtttaaaatggtaacatagtagtggcaaacaatttttcagcgagggcgccatttccacgggcagaggtgtcctttgacccctttctcactggtttctcatttctccctgctgacaccactttcatttcctctcagggacagtgtctgtctctgcacacagtcatggtatgtagatgggcatttagacaaagccttaagattttccgtctcttatggatgcacagaaactccaagcactgggcagaagccaattctttgctgcccttcctgaaagtcagagaaggttgtatcgaactggatggaaatccccaggactcctgcctggcctgaagctgcaggccaagctggagtgtgaagcccacctgggatgctgggacccagaagacctgcctggaaactgctaattctcagcctcttgtttcctggtctgcaggaaccagagcccccagatgatgatgatgcaatgttgctgaagtgcctggagacctttgacgatctgtaaagcaggagggccggagaaggaggagattaaatgggggaggggcgggttcaagtttgaataccagtagctagagttatactgccttgtctttcaagactcattgagaaaggctgcttccaaaagccttcttgatgttcttagtttctgttactataaagttttaagagcaatgatttttttggtgtcctggcagtggtttttggggcttgtcgaatacaagggacgagtctgctgcaggacacacatccactatgtccctgctcagtggtggagggtgcgataccatgagtagccaaagcctaggccatgagcttttcaagaagacgataggcgagatctgccctgtgagtagtgcaatatcgagtcctctcagcatgtcctggactcaggatgttgctgtggtggctttgatgctgctatggtggcttttccagagatctgaagcccagttactcagggctcatatactcaggaacggtgctcagctcaaccctatgctgcagggccacagaacggaacccagcacacctgctgcttctgcctcagatgactgggtgctgcaaagcagccagtgtcgtatgcacttctgggtgccgttcctgggcagagcatatgcctatccttgggcttccacactagacacgagagagaattttgtgtcaacttgactagactacagtaccctacatttggtcatacatcattgtagatgtttctgtgaatgtattttatgtattttttatgacatcagagccatgggggagggggcagtacaatgccatttgtactgccatttaaagatttatttgttttatggatatgagtacactgtagctgtcttcagacacactaggaaagggcctcaggtcacattatcggtggttgtgagccaccaggtggttgctgggaattgaactcaggacctctggaagagcagtcagtgctcttaaccgctgagccatctctccatccccctgtgctgccatttaaatcagtaaactttgagtataatagccccaccatgctccgtaactcatccagttaaaggccttaataacaaaatgctgggttcctcaaaggaaggagtgctgtagcttgtcaaaagacccccagtcatacaaagaccacagagaccgccatcgctgcaaaacacatgaggatttatttatccaacatgttagggactcccctctcagcacgcaggccggaggagagacccagaacaaagaaagaacacactttttatacctttgtaagggccggatataggcaccagggtagtttggcttattttaattggtgtagccaataacctttttagacattggttggtttgtatagggtgactctcattttgtctgtccttgaggtttttagtgtgaggtggggcaggggagttgttaatcttgttttggaagcttagtaattttgaccgttaaaactatgtttttatatttgtttagtcagccagctttcttatctggctctgcactttgcctgctagtacagtttggaaagtccttttggaggggaaaggtactgggtagtcttgaattaattttggatattacaggagagcccgcatagcagttctccctctaggcagccccaacagtgaatgttggatttatacctccatgacagcatggaccaactgggtaaagtaaatctttctccacttgtctggataccgatctctacatgcaatcagttccgactctctggtgtacttgactgatagactggagtgaatctgaagtcagaacattcctacgggagctggggtgcttctggcggtgtccgaccacattgcatcacgtggcatcactgtcgtttgcttctgtgcacactagatgtacactgcacacatgccgtcacaccaggtgacatcacaccaggtgacatcaccaagcagtgacaaaaatgcttccttccctaaaggcttgagaccgttaaactaggaattgcacggtttacactgtggatacaaaattgtctgcttacagaaatataattgtttaatgacagaaaacaagtaattttaatattttcctgttgccactcctcaacctgtaaggtacaaattagtatgtctttggattgtgggggattagaatatttgaatttaaaagttggtgtttgccaggcgtggtggcagactccttcagtcccagcgcttgggaggcagaggcaggtggatcggtgatttcaaggccagcctggactaaatagagttctaggacagccagagccacaaaatagagagactctgtctcaaatagacacaaatgaaaattgctacttaaattgctgactttgggattcattaaaaaaaaaatctccctctccctccccctccccctccccctctttccctttggctggtggacatctgccctattcttgttctgcccagccattggttgatcagcatttattgacaaggcagagaataaatggtcaggactgtttacacaaacttgaggcaggggattgttggtataagcattacaatgctgtgtatgtgaatccagagaagtgagcatttggataacaagggggtaaactttacactgtgtacaaaaacattgtttctacggcccttccccttccagggcgagagaggccccctgggttccctctgaacagctaagcctggttcctaggtttgcaacaaaattattaaagcagggaacagggggcagaccctcttacttcaagcccaccatgccacacactttcaataaataggcttttaaaatgataatacgagtaacagagatatatgtggttgcataaaatattaaaagaaaatttagtgatacaagatggagccttgttgcagggacacccttgggtcagaatcggaaaatgggctctggactgggaggagggagccagcttagaagaacccggagttctttcaaaggaatcacctaagggtacaagttcagaaagagggaagtgaagagatggggacatttgcacacgccctcttctgctgcttccctggggagggagaggggcggggtgggaggaggctgtagatttgagttggcttgggaagtaagttaggccccacatgaagttcatggttatgaacctaagatggtggatcccagaccaaggatactcagttgcatcctgcccagtgacattgtgagtcatgaagaatggttctagtcagtgaggaagtttagccaagggggctgtgatgagaaggaccaacccaagaccattaagaatttgagatggaggtgactaggtgaatcaaattagtctcagaaaggtgtttcctcttcaatgttcttagattttctgtagataagggaagagacaataaaagggggctgagaagatggaagatgcaactgccgacgggagcagctgtggccacacctagagtctagctttgtcagacccactccaggcacctggcttccagagctgtagaagcagctgcagggtggggtggtcgagccttggtagggcagacatcatgggggaacaaagaaacaaaccctcgagaccagcaccaagagcaaatgcacgggcccatagatgctgtgctcagaacagtgagcagcccaagcgtccgttgctgtcacagtgtgaccgcgatacacacctgcatggcctgtggccaccacctttagctttggtgagaaagaggaggacaacaggcaagctgcagctacattaatgaaggagggagggagggagaggtgnnnnnnnnnnnnnnnnnnnnnnnnnnnnnnnnnnnnnnnnnnnnnnnnnnnnnnnnnnnnnnnnnnnnnnnnnnnnnnnnnnnnnnnnnnnnnnnnnnnnnnnnnnnnnnnnnnnnnnnnnnnnnnnnnnnnnnnnnnnnnnnnnnnnnnnnnnnnnnnnnnnnnnnnnnnnnnnnnnnnnnnnnnntgggaaggaagggcactgccaggtacttccaacctttcattttgtcttctatagaattctacagaatggtgcaatcaagtttggtttttggtttgttttttgtttgtttgtttgtttttaatcatacaaataaaaaattcttaatgttttaagtaagtttacaattttgtgttggattctatgcaaagcctatgtaaagctctcagaggcggtatgtagggtctgtgagggttgggcccctctgcatctagtcctccttaggttccctcctatgtttctggggtcttccccacttccttctctccctttgagaactgataaatagatctcacgctccattttctttcttttaaaaacattttattttatttatttgtgtgtatgtgtgtatgcatgtatgcatgtgtgtgtggccgttgtgtgtgtatgtgtgtggaggggtctatgttggtccctggtggtggtcacagaagctgaggaagtcccttctctccttccatcacgcggggacctgaggatgcgagtctggtcgtccttctcagcttaagtgcatttacctacctggcacttggctggcccctatccaactctgtgtctgagttaagattttctcacatggctaaaaggcacattgtgggctctagctgtatacactccacccctccctttgttcactttgaagctggaaattcatgtggttgttgaaacagggtctcactacgtagccttggctgacctggaaactgccatgtaacccaggcagacctcaaagtcacggagatgtctgcctctgcactgagattaaaggtctgcaccaccacacctgcctggaaatccctgttttaaatggtaattctccttccttcctcctccccccatccgccccccaaccattgttattttgaggtacaattctaagttgtttcaggggtggtgtctattcatctctcaaaaggagcgtcactggcggttctagaagccaccaggtgtgggtcaagagtccttaagggtggccttttcaaacccactgcctcgtaacatagtttggatcacacatcccttgcttctgaacttgtggatgaacacatgccccttccccatcggctggcggaagcgtcaagctcacactctgcccataagaatccagatttctttttcctcctggagaaatattcctgtgtccggattcccagatgcttccagccggtcctccccacctagtggcctgtccccttcccagggtcactcagagagtggggctcttagaaatttaatggaggagagaggaaagctggagtgagaagggagagagagcattgagccctccacagcacttcctctcaaaggcacgctggtgcccacgaggccctcccttacagcaggatggacagcgtttgaatccacgtggctcgctgtgccctctccaccttctcctagtctaactcacaagggtgcacaccccctttctgctcatttcgatcgcagtctgagcatcaccaagctctgatgggagtcagttcctcccacccactgccaagcagagatagatgaatggtaggggtggagatgcccaaagtccttttagaaaagaagcagcctctggacccagatgttccccacccccacagcagactccagcccttccttcttttgaaagtgggtttggtcaagcaaaaagagttcctgttggctaaagtggggttcaaagaggtcttttccctggctcatatgactcagagcctatcgaaatttgaagacctaagcctgatacccccctccccccacccccgggaaatcgtggagggttctgaaggcatcccagacagactcaatgcagctgcctaggaacctgagcccctgctctggcagatgtgggggcagtagagcttgagtcctctcctcctggaaagggttctgaggcccagtgactcctcggtgagtggagactgaagagcagccggaagctgtgtcagaattgtgggaagaatggggcacagcagggcacgagtcatcttaattctacccagaagtcttaggtcggatcatgtgtcctaaagctggacaggtgctagagggggtctaggggtaagggggtgttccttactgcttttcaatgtgagaattgagggatcagctacaggctacaggaagagctggaaggtcacaaggtctctggaggaaggggaccaaaacaactgtgttggttgcttcttttttgtttttgttttcccatgttgaggtttgaatctggtccatgcatctgctacaaaagttcttgatcacagagctacatccctagtttgtttgtttgtttgtttgtttttttaaaaaaagatttatttattttatgtatatgagtgttttgcttacatgtacatctgtgcaccacatatgttcctggtacagaggtcagaagagggtgtcagatcccctggaactgcagctggggatggttgtgagccaccatgtgggtactgggaattgaactgggatcctcagcaaaaactagtgttcttaaccatggagccaactctccagcatccctagcttgctttttactttttttttaaattttgagacaggatcttgccaagccgcccagctagccttaaaggctgcctggcctcgtcagctttcagcaaacagcccgcccctgttccacagcacgcctcctcctcctgatccaccagaatattgctgagcattgtcgaagagcaagcttctttcttttgaaagtgggtttggtcaagcaaaaagagttcctgttgtctaaagtagggttgggagaggtcctttccctggctcatatgactcagagcctatcaaaatttgaagacctaagcctgattctccctgggaaatagtggagatcccagacccctcgtccactctggagccaggagacagtagaaggatgccctggggccagctccatactgattatgctcttcatcaacactgtttggccaccacggtatccaggtgtggaaggtcctgggaaggacccttgtgtgactatttgtgaacatagatctttgcattttgcaggccagagtttggctatgagaaggttggggggaggcgtggaatgtgcattctattcacatcttggtttctgtagcactccacaggtgatttccagaggaggtctgggaacacagagtgagctggctcactcccacctcgtctctgtggtggtctagcctgggccagaaggggaggagtcgggtacatgaagatgtgcagaacttggtgccaatcccccagggaaggccgtagacctttgagaccttcgaagactcctcagaatcctcctggattttactccatgccaaaaggcctctctcctccaggctgcctgagaagtcaacagtgagaagtcaaggctgggtttagattagggtcacaagtgctacaggggggtgggggggggcctgggtgcctggcagtacccgagtgcccagcaatgccctgctttttcttccactcctcctccaagccttggcgggaaccacagatcccctctgctcattagggagagcccctactcatgtggtaaccaggctcaggctcaaccatgggaccccagagctttccccagctcccaagagcagacccgtccatgtgtgtttgtggaattaaggtgcactttatgtgtggtggagagtataatgtggcaaacagaaagcatgaagcaggtgcagccacagaagtctctcagagaggccctgggggagggacacagaagagagaggtgtgtgtgtggatgtctgtccagaagctgagatgggatttccacactcttcaccatcagtgtccctcccagtccctgcaccatcaaatagctcatcccaggcctcattaacaaccccttgcttgtctgtttcctctattagcctgtgggtttctggaaggaagagaaatgtctcacttctctttatagtctagtgagtagcacttgttacatacatagtagatagttagaaacaaggatgtttgaatgggtggatggatggatagatagatgggtggatggatagatggatggatggatggatagatagatgggtggatggatagatggatggatggatggatggatggatgggtgggtggatgatgtgtgtggttttcccatcaattatattataggtttaagagaaccaaggtgtgatggtttatatatgcttggctcaggaagtggcactattgggaggtgtggccatgttggagtagaagtgtcactgttgggtgtgggcttaagaccctcatcctaactgccttgaagtcagtcctctactagcaaccttcagaatgagatgtagaactctcagctctgcctgcactatgcctgcctagatgctgccatgctcccaccttgatgataatggactgaacctgtgaacctgcaagtcagccccaatgaaatgttgtccttataagacttgctttggtcatggtgtctgctcacagcagtaaaaccctaactaagacacaaggtcatctctttttccttttgtgtctggtgtattgtccactttagggccttgccatgactgaactctatcccttgaaaagtcatagattgacagcctaatcctgggggtgtcagtatttgccaataatatttaaggaggtaaagatgttaaaaggagtctgttgttagaggcctccagtctgtctgtctgtttggtttttgagataaagtcttatgtatcctgggcttgcatggaactcagtatgtagctggagatgtcttgggactctcccttgctcctgcctccacctgcccagcactgggaccccaggtgggcatccctgcaagtagcttatatattggaagcctccaccggctgcgctacatcccaccccagccctgtctccttcacacaaaaggagatcgtgaaacagagagactgcagggatgtgccagcccaaagcaaaggcaatgtgaggacccctcgctgcaagccaagaacggtcctatgaagaaccaacctgcctcagaattccagcccgggggactgagagaaggctgtcgtttctctcaccatattctgtcatgtttttctgcagcagctcaagctgactaaagtaggccaggccttatcctgactccagccccagggctcatgtagggtgtgccgtgaacagcctggcagacgctccaacggccctgacactgctcagatgtccacaagcccagctatggggtacctgcagccttaccagggatggtgttgtccaagacgaagcccagaaatccaccgacaaacatgcctgtggtcaggagcacctggatgacctgatccagctggagaatccctggaatgcgacaaaagtgatggttcggttccaggggaccaagggccaccctgcttcacacccggagcagtgacaggcccgagacagcactcacctgtctgcagcttctcagggttcttgttcacccagttggggatggcgagcccacagtagatggagaagccaaacacgaaagaggttcctggatgaattcatgtccacatactgtgggagaaaggatgccccgagttcatcagggccctagacacctttacgcatgtgcataaggctggctttgagggttagcgtnnnnnnnnnnnnnnnnnnnnnnnnnnnnnnnnnnnnnnnnnnnnnnnnnnnnnnnnnnnnnnnnnnnnnnnnnnnnnnnnnnngagggttagcgtgcagttgtctgtttctttcttgtatgggaggtgggggggaggatcagtgtgcctcttaggaccacgccctcctctccctcggctcctcccactttgtgctcctctcatcatcttcccttcttctcttctcctcctctcctgtccctcccccacgcagctccaccccaggactcctctcagggtgggcggcactgatgttcactgaggtgcctcacctgcaggttggagatccccacggcgctgatgatcccgaacatgacaaggaacatgccgccaatcacgggggtagggatggtggcgaacgccgcgccgatcttcccaaacatgcccatcaccagcagcacacagcccgcggcaacaatcaccatcctgctcccgacctgcacacccagagaggagagtggttctacttccctaccacagcacacactcctccaaagacatgaatcacattacaacttcccacacctatccctagtccacatcaccatgctgatacacattactggatacaggaaaggccagggcaggaaggaagtgctgagggac

SEQ ID NO: 1809 - DNA, 1801 bp, Mus musculus
gatggtgaagcagctcacctcaggggactgctactgggaccttgaagatggctcctctatatctcaagagaaagttataggtggcattgccctggttgaggggtgtaagaactggcgctagccgcctggatggggtgaaaaggtcatcttgctccttccacaccctcttgcaacctgtggcaagttgttacaatgttttcaccaatgtccacgctccccattggcgccccaccatgcatccccattggtcatggtggcagtgacagggctgtgattggttcgcagcctggggtaccaggtcagttttttacctgaggcaagagcctctcttcttattctgcgacgggcagtcgtgagtgactgactcgtcagggcttcgtgcagtttcctgcgtgttccacaagtgtcgaaggtgcatggttcaccgtggtggccttaaagattataatggccacccctggagaaggcaaccaacccagtgatgatggggcaccccagccattggcgcagctgcagaagcttgagcctcgggtggtccgcagacgcctgtcacaggcccgccatcgagccaccctggtagggctcttcaacaacctaaggaaggcagtttactcccagtctgatatcacagcctcaaagtggcaggtactgaataggacaaagattcatattcaggaacaggaagaaagcctggataagttgctgaagctcaaagcatccttcaacctgcaagatgggaatcccaacagcttagaggaggtcaaggaagaatatgccagaatgtattccgagaatgacagtgtattcctaaacagttttcttcaggacagtccccctgagtggttcccctctgaggctgttggaccagatgctgaagaagaaggagaagaagaaggagaagaagaaggagaagaaggagaagaagaagaggaaggagacgaagaaggagaagaagaagaagaaaacggtgaagagagagaggtagaggagtaccaggaagaggaagaagaagaagaggaggaggagaaaaaagtcgatctctcccactcctcctccactctgttgccggacctcatggaatttgaacggtatctcaacttttacaagcagaccatggacctcctgaccatgaacagcatcatctctgcacatgaagtgacacttcctattgtctctgccgccatctcccacctgtggcagactctctctgaggagaaaaaggccagactcctgcaggtgtgggaacagcagcacagcgccttcgcagacctcaccgaggcctgtctagagctggccggggtggagggcagcatgaaggacagcggcgtggacagccagggagcgagctgctcgctggagtccaccccagaagagatcctttttgaagatgcttttgacgtggcaagtttcctggacaagagtgaggcccagcatatgtctaacatcagcgctatgtttgccacctgcaactcagaaaatccagaggagaaatttcagctctacatacagatcattgagtttttcaaaagccttggctgtgttaacactccattaaaccaggaaccagagcccccagatgatgatgatgcaatgttgctgaagtgcctggagacctttgacgatctgtaaagcaggagggccggagaaggaggagattaaatgggggaggggcgggttcaagtttgaataccagtagctagagttatactgccttgtctttcaagactcattgagaaaggctgcttccaaaagccttcttgatgttcttagtttctgttactataaagttttaagagcaatg

SEQ ID NO: 1810 - protein, 393 aa, Mus musculus
MATPGEGNQPSDDGAPQPLAQLQKLEPRVVRRRLSQARHRATLVGLFNNLRKAVYSQSDITASKWQVLNRTKIHIQEQEESLDKLLKLKASFNLQDGNPNSLEEVKEEYARMYSENDSVFLNSFLQDSPPEWFPSEAVGPDAEEEGEEEGEEEGEEGEEEEEGDEEGEEEEENGEEREVEEYQEEEEEEEEEEKKVDLSHSSSTLLPDLMEFERYLNFYKQTMDLLTMNSIISAHEVTLPIVSAAISHLWQTLSEEKKARLLQVWEQQHSAFADLTEACLELAGVEGSMKDSGVDSQGASCSLESTPEEILFEDAFDVASFLDKSEAQHMSNISAMFATCNSENPEEKFQLYIQIIEFFKSLGCVNTPLNQEPEPPDDDDAMLLKCLETFDDL

SEQ ID NO: 1811 - DNA, 46519 bp, Homo sapiens
gccaaactcttttccaaaacaaaggaaagaatgcaacaggaagtatatatgaagaaataatggccataaacttctcaaatttgatgaaaaacattagtctgaacacaaaagaattcaacaaactccaaatagattaactcaaaaagatctagacctaaaaacagcataattaaatgttgaaagccaaagatgaagtgaaaatcttaaaagcagcaagagaaaagaacttatcatatagaacggagcctcagtaagattaacaatgaacttatcagcagaaataatggagtttagaaggcagtgagatgacatagtcaaaggactgaaacgtaaaggctgtgaactaacgattctatatccggcaaaactatacttccaagataaaggaaaaagatacttccatctaaacaaaaattgagaggatttgttgctggcagacctgccctataggaaataccaaagagattcctttaaactgaaaagaaagggcactagacaatcatttgaattcacacaaagaaataagcgctagtaaaggtaattacataggtaaatacaaaagacagtaaaaatgtggtttgtaactcttttcttcatattgaaatcagcttattgcataaaccaataattatagacatatgtaatgggctcataatgtataaatatgtaatttttatgacactagtagcaaaaagaggtgggaaagaacagacctatattggaacaaagtttttgcatactatttaaactaagttaatattattgcaaagtagagtgttttaagttaagatgttaattgtaatccccaggaaaacaagttaaaaataattttaggccaggcgcggtggctcacacctgtaatcccagcactttgggaggctgaggcgggcagatcacgaggtcaggagatcgagaccatcctggctaacacagtgaaaccccgtctccactaaaaaaaaaacaaaaaaattagcctggagtggtggcagtcacctgtagtcccagctacttgggaggctgaggcaggagaatggcatgaacctgggaggtggagcttgcagtgagccaagatcacgccactgtactccagcctgggtgagagagcaagactctgtctcaaaaataataataacaataattttaaaatatttgataaaggaaacaaaggagttataatggtataatacaaaatgtatatttaacacacaagaaagcagtaatggagatataaagaaacaaaaaagacataagacaaacataaaccagatactcaaatcatacatgtaaatcataccttctcagtaatagtgttaaatggaaataaactcagtattccaatataaaggcaaagatcagtaaaatgaataactttaaaaaacctgatccaactatatgctgtctacaagagacatgttttacattcagacataaaggagttgaagataaaagagtgtggagaaatataccatacaaacattaaccaaagtagaggtgtagtggctatactaacaacacacacgcacacacacacacacaaacaaacaaaaattgttattagagaaaaaaaaaaggacattttatcatgataaaagggtcaactcataaggaagatataacagttataagcatacatgcatcaaaaatatatcgggcaaaaactgaccaaatagaatggagaaattggcaattcaagaattgtataatttaacaatagacagaacaaagaggcaaaagataaacatagaaaattgaggagcagaacattataaatcaactaggcttaacgtatttctgtagaacactctacccaatggcagcagaatatacattattcccaagtgcagacggcacattcaccaggatagatcatgtattaggccacaaaacaagttccaataaattttaacagaaccaaaatcatacaaagtatttcttctctaaccacagaggaataaagctagaaatcagtaacagaaggaaaattggtaaattcacaaaatatgtggaaattaaacaaaacattgataaacaaccaataagtcaaaaagaaaattacaagcaaacttagaaaaaaactttcagatgaatgcaaataaaaatacaacataccaaaagttatgggatacagagaaagcaatgcacagaggaaaatttatagctataaataactatactgagaaagaagaaagatctaaaattagcaacctaacttcacactttaaggaactagaaaagcaagagcaaactaaacccaaaactagaagaaggaaggaaataataaagattagaacagagataaatgaaatagagaacagaaaaacaatagagaaaaccaatgaaaccaaaagacgttttttttgaaaagatcaacaaaattgacaaatctttagctagactgattataaaatggagagaggtaaatgactaaaattagaaagtgggggcatttctactaaccctatagaaaaaggattataagagatactataaacaattgtacactgacaaattagataaccacaatgatatgaataaattcctaaaaacacaaattaccaaaagtgattgaagaagaaataaaaactctaaatagacctgtaaaaagtaaagagattgaatcagcaaccaaagccaggaccagatggcttcactaatgaattctactaaatatttaaaaaagaattaaaaccaatccttctcaaactcttccacaaaatggaagagctacagctttctagctaattctatgaggccagaattagcctgatacaaaatccagacaaagaaaacacaaaaagagaaaactatagatcaaaatcccatgatgaacatagaatgcaaaaatcctcaacaaagtattatcaaattgaatccaacagcatattataagggttatacactatgaccaattgggatttatcccaggaatgcaagagtggttcaacataagaaaatcaatcaatgtaagacaccatattaacagaaccaaaaaaatcttcaatttatgaaaaaaattctcagttagggcagaagaaaattttgacaaaatccaacacactctcatgataaaaacactaaaaaaaactaggaataaaaggaataccttctacataataaagaacccctgtggaaaacccacagttaacatattcaataattaaagactgaaagctttcttcttaagatcaggaacaaaacaagaatgcctaattttatggctgttattgaacattgtgctgtaagttctagctggagcaattaggcaagaaaaagaaatgaagcatccaaattggaaagaaagaagtaaaattatttctattcacagatgacatgatcctatatatagaaaatatgaaagaatccacaaaataaactactagagttaataatgaattcagtagagttgcaaagtgtaagatcaacatgcaaacatcagttgtgtttctatataccagcaataaacaacatgaaaaagaactccatttacaatagtatttaaaagaataaaatacccaggaatgaatttaaccaagataatgatacgtacactgaaaactatgcaacattgctgaaataaattaaacaaggcctaaataaatagaatagcccaggttcatagaccaggagacttcctgttgttaagatggcaacactgtacaaattggccaaaagattcaagacaatccctaacaatttccaatgccttcttcagtaatgaagaacccagtcctcaaattcatgtgtgattgtgggggctccaaatgccaaaataatcctgaaaaagaacaaagttgcaggacttacacatgccaatatcaaaatttactacaaagctacagtaatcaagacactgtggtacaaacattgtagatagatgcacaggactatgaaattgaattgaggattcagaaataaacctattaatctatgaccagtcgatttcagacacaggtgccaagaccatttaatggagaaagaattgtctcttctccattggaacactggagcactggaacaactggatatccacatgcaaaagaataaagttggaccctagctcacaccatatacaaaaattaactcaaaatagactgtagaaataaatataagagctaaaattattaaactcttcaacaaaaaatacagaagtaaatcaaagcatgaacaacataagaaaaaaatagataaattggacttcatcaaaattaaaaatttttgtgcctcaaagggcaccatcaataaagtgaaaaaacaacccacagaatggaagaaaatatttgcagattttacatctaataagtgacttgtattcagaatatataaagaactcttaacacaacaattttattgattttcaatgacaaaccaatttaaaaatgaacacaggatttaaataaatatttctccaaggaaggtacaaatggccaacatgcacatgaaaaggtgctcaacatcattcatcactagacaaatgcaaatcaaaaccacaatgagataccactttaaacatactacaatggttataataaaaaggacagtaacaagtgtcagcattaatatggagacattggaacacttgtacattgctggtaggaaggtgaaatgatcagctgctttggcaaacagtttggtggttccttaaacaattaaacatgaagtttcaaagtgacctagcaattccatttatatgtatataaccaagaaaattgaaaacacgttctcacaaaaatacgcacatgaataattgtagaaacattatttataatagccaaaaagtagaaataacccaagaatggataaacaaagtccatacaaagaaccattatttgggcacacacacactaaaaaaatgaggcactgatacatgctacaacatggaaccttgaaaaccttatgctaagcaaagcagctagactcaagaggccacagattgtatagtctcgtttatatgtatgatcccatttttataaaatgcccagaataggtgtagccacagaaacacaaagtagactagaggttgcaaatgactgaatggtagggcagtggcagggtggggatgtggagggactgctaatgggggtgggctctcttcttggtgtgatgaaaatgttctaaaattagacagtggtgatagttgcaaaactccattgaacatactaacagttactgaattgtgcagtttaaaagggtgaattttatggtgtcaattctttctcaataaagccgttattgaaatgttgtagcatctttcacctatcagatggaccagtcctaaaattatgacaatacatagtactgatgagggtatggttaagtaggtactatgtatgctgagggtggtagtacaaattggtacagcttctttcaggagtaattgtacagcttctaccaatatttacaatgcatctaccctttgatttagcattttcaattttagcaatatgaaatattggtatattcagataggtacataaaagatttggtagatttacaggcagatctgtaagaatgatcttataaggtctgtttagttagtaatattgcaccaatgttaatttcttgattacaataattatatcatagttagataagtgaatattaaggaaagctgggtaaagggtatataggcactctaatatttttgcactttttttcctaatttgaaattattgcaaaaataaaaagtcataaaaaagaagatatattattaggtgaaaatgcaaggtgaagaacagtgtgtattcagtgtgccatttgagtaaaagtaatgaggtacataaacatatattcatttgtattggcatagactatttcttaagtgataagtttttaaatgtggttgccactggctgggtgcagcggttcatgcctgtaaccccagcactttgggaggccgaggcgggtggatcacctgaggtcaggagttcaagaccagcctggccaacatggcgaaactctgtctctactaaaaatacaaaaattagccaggcgtggtggtgtgcacttgtaatcccagctgcttgggggactgagacaggagaatcgcttgaacccaggaggcggaggttgcagtcagcagagatcataccaatgtgctccagcctgggctacagagcaagactctgtctcaaaaaaaaaaaaaaaaaaaaaaaaaaaaagagtggttgcctctgtggtgacaggaagactggagtagaagggatcctttatcattcagggttccaccagagaaacagagccagtaggagagagagagatttgttacaagaaattggcttacatgattcaaggggcactcactaggcaagtctgaaatccgtggggagggtgatcaggaggggtaggctgaaaactctcagacaggagctgatgctgcagtccacaggccgaatttcttttttctcagctttgtttttaaggcatttcaaccaattagatcaagcctacccagattatctagggtaacccactttagtttaaatcacctgatagtagacattaatcacaactacaaattaccttcacagcaacacctagatcagtgtttgatgaataactgggtaccatagcttagccaattgatacataaaactgcctatcaccaggacttaaaagttacagtgcactatcttattctgcttgaacttttttataaccatgtgtgtgtattgctttttccattaaaaacagtgtattagtccattctcacactgctaaaaagaactacttgagattggtaatttataaagaaaagaggtttaattgactcacagttgcacacattgcacaggaggcatggctggggaggcctcaggaaatttcaatcatggcagaagggtgaaggggaagcaagcacatcttcacacggcagcgagcgagagagagaagaagaaagtgctacacacttttcaaacaaccagatctcatgagaactcactatcatgagaacagcaaggggggaagtccgcccccatgatccaatcacctcctaccaggtccctcccccaacattgaggattacaattcaacacgagatttgggtggggacacagagccaaaccatatcaaacagctacatcaatgttccaaaaaaaaaaaagtagagaaagtgttagtgctctctggccatggaggtcatgatttccttctctcaggcagccatctctctcctcatcacaccagcctagcatcctgtctttctacttcaaggtctatatttaccatcactgtctgtttcaaaggacatgtctccattttgcatcttcttaaccatttgcagttttatcaatccctccctttcaaggggagtggccagagtttaaaaagctgtcttcatcctcttaaccagttaaatggccccctccatcaaaagagagaacccttgacctcaccccaactcctgagtcaggctatgtgaagttgggctgtttatttctcatatccaccacctggaatgttgtggtgaagaaagagagcccaagctcccatggaccagaactgagagaacccacatcagtcctgatggtaggagacagaagagaaaataatacggaggcgaaaaggggcgatccctctgactcgtctatttataatgaagtggggccactgaacccaaggtgtaatgcacagtggaattagataagactgtccctcttggatagccatcaacgtgggctgaggcctggggtaaccactgccctctcatgaaaatctttagctgcgcttgggctgcctaccatctctcaccctctgagaaaatacatgaagtccccagtgccctggatgctcacagtgactgatctaccctaatttttgctgagaagggtgaccttcacctgtcttgcagctgtggtggttattcaaaccctgctatagtatatgctggaaaccaagatattagtttggaacaggtgaaaaagaaacctaatggatcagtctctcagacatgaagcaaacaagcctcatttctcacccccatttgactgcccatgtggcggccaagactgccccagcaggctcttggagttgctaaggagctgcctcatcatcggaccatgcagtttccatgttcctgatcctacgtccttgaactattaaaccctctggttccaaggattcgttcctactccacacacaaccccacccaagaaactaaactctcccttccatcccaaagtagcccaacattgggatggcccaatattctcatataatcaaaaaagaagtgaatcttatcacatctgcaaatcccctgtccttctgaaaaataactaaactgagtggtataaaaactgtaaaggtcattccctaaaaggaaacaaaataaattctaacatgaattagagaaaaatataatgaaacagatgacgatagtgcactgaaatacctattgacttagtatctctagcttaaagtgccatctaaattgagcccatttgaggatctacaatcaattttatccacaaaagaaacaatctttcacagcaatagtttgcccattttgatggtgaaacattaagaggcccatgtattttctcagtgaatctcaagcacaataggttaggtctattaactgagtgaatgaaagcaggctttaatctttatagtgaaataaattgtgactccctatagcagaagttccctgtcaaaccactgagaagctaacacaaagaatgtacttttattcacaagtttcaaccttctttatcagtatttctacagctctttctacattttgaagcactttcacttatacattaaacccttaaaatagaaactccaaaagcagtcccttggaagttgctgctgagttgtgatgacagtatgagtctttgggaattttcactatggaggtctggggagggtggggactctcaccctgggacatgtcttgatggggtcatacatctgccctcctatagcaggaagtgcccagccatactgacccagcaatgctccccataaaggagtttactgtatctgcagggtcccttggaagccaatgtctagccccatgcaaaggacacggtgagcaaaagcctatctaggattgtgtctcaggctcatcttggcagaagtgctgggagcccctgactgcagtcagagagtgcatccctccattgtgtctctgcctttttcattctttcctgggagccaccatctgcagacctcagctcaaagctgagggttttttgttctaaaagttacaaaatcttgcatatatctctctgtcctaaggtagttgatatttaagggaccaaatgccccccaagggggcatggagtgcagaggaccagagagaagatcttgagcaagtccctggccctctctgagcctggggagaagactcttcacagagttgtccctgaggatgctgagcacagtaaagtctcagtataggatccatcactctcattttaattgggggataaaaagataatacagcctgaagtcccggccttttatttcatgaaatggatggacactaacaaggagaataaattcagagggttattccttctaccagaaagttaggccaaggggcgcaaaaaggggtggccatcccgagttggtatgaatgcagggatcttggaaggcttcctgggtgttgagctggatctgcaaggagggcatgttctccaactgggagagaaggagaatatttcccggcaggatctctgctggggtggagtatttcaagacaggatctatgccactgtgctggaggaatttcagggcagaatctatgttgctggaggaatatttcagagaaggatctatgttattgtagggggagggcatttctggacaggatctatgttcctgtggtggggagggagtgtattttagggcaaaagttttgctactgggaggaaggggtcaaggtcagagggtggtggtgtgtgtgggtgttaccagggataactcttcatatccagagctagtgagaggccaccaggaggcccccagtgttcatggcagagccttctgccttgcagctatggggaagattgatgtggacaagatcctctttttcaatcaagaaatcaggctgtggcaggtaaataagcttcttagtaactttccccccaggactacattttttctgggtgcacatctgcttgtgtgtgtggcagtggttggggcgggaggtggggtgactacatgaaaggttgaggcaggtcagaggtcagtttccaaaccactctgtgtcatcttggtgcgaggataaggctccccaagacagagcttcacaaacccctaggtccccagcaacacggcaggtagggctggtggtgggaggttggtggtgggaggtgtgggcaggcccaggagagaaaagtcagggagtgggggtggagtggggtggtgacaatttccttaaagccctgagcgaccctaggtcaagggctgcgtgacagccagaatgggggcagcgacccaagcagaattttggagtgaaatgaacattttaaattttcctagaaaggcctgtctctacaaaaaaattaaaaattagcatggtgtggtggtgcggggctgtagtcccggctactcaggaggctgaggcaggagaatcgcttgagcccgggaattcgaggctgcagtgcactccaacctgggcgacagaacgagaacctgtctcaggaaaaaaaaaatgctagaaggggagaatgagaattgacccttactggaaggtttttctgtttttatgtgacggtttctttatatgtgggacatcatctcactgacgtcaaacttcatgagtgtctaagcctcccaggtaccctactgcgtgctttccgtagcggctcgttgatagtcctctcagtccctgcgaggtggattctaatccagaatcccctgctacgcctgctaagcctgtgacccctgtttcacccctgcctcaggagtgaaggagctcacccatcagatggcagcaagggggcgcctgggcggagccatgcttcttgcaccgtgcaccggccctgagccgggcacttcaaggggctttgtcctgcatctgctaccaaatgtgtagggcctcgctagtacccccaccagtgtcaaccagatatagtgggatcatgagcatcacgaaatattgcaggatataagcatacaagcaaaaagaagcctaaacgagagtacatctatatttgggaaggaaaaatgaattttttttccaaactgaaagaatacctacttcctactacccagagtgaaccccttttctctcttattcttgatattttaatctgagctattaaaggtcccttctctccaccccattttctccccccatcctctatttcttcctgccttatttaaaatgctatttccctttctcccttttatgcgtttatttccttcatgccgttttctcatgttttcgcttgaggcagcgagcctggtattttgattcctttatctaaggggttttccgtaaccctcaggacaaccctgtaagctggtggcattgccccatttgagagatgagaaaactggggcccagtgccaggtgagtggaaccagctggagggcatctacttagtcctctgaggacacatgaaggctgtgtggagcccccgagctgattactgacgcgagggtcccctccctgacccctcgcgaccctgcgaggtgagtcagccccgcccctccctcttctctctcctcccttttctgtcgccttcggacaacttgtaacactgtttcttccactgcccacacgcccattggcccgtcaccacgcatccccattggctgtggcggccagggacagggccgcgattggtccccacccctgtaacgaggtgccaggtctgttttctgacccagacaggaaccgcgatccccactccggcgcacgaagccgggtgactgctgtcccgggagtggggacgtcgcgtgcaccgttggcgagtaagtatcctttgaacgctcctctccagaaaggtgcccttgggcatatgagtgtttgtgtagacttgaaagaattcagtgcagcggagccaaacaggtgaacttttagcgcggggttcacaggagccttttgtatccgtcattgtggctacctacatttttgagaatgattctggatgatgatgatgattattattattattattattattatcattttgagacggagtttcgctcttgtcacccaggctggagtgcaatggcgagatctcagctcactgcaacctccgcctcccgggttcaagcgattctcctgcctcagcttcccgagtagctggaactacaggtgtgggccaccacgcccggctaattgtttgtatttctagtagagacaggggtttcaccgtgttggctgggctggtctcgaactcctgacctcaggtgatccgtccacctcggcttcccaaagtgtgggattacaggcaggagccacggcacccagccaattctggattatttttacataatttgatatagatagaaaatcaaaggaagctgtctgtgggttgtagtacattatgcagtgtattatactgtctggggcttgctaatgagaatggatcacactcaaatattttgtggactgatgcttaaaaatgaacatttctctgaaatttggagaaggtgagggcattttttttaaagtttagtctagggagttttttaaacgtcagctctgagtggatattaaaaagtgttttaataggaaaatatgtggtaatgaaagtatgctctgctttatagaggacaattaataaaaatatgtcatgtgacagtgttaatcctcacaaaatgcccttttagaagaaggtatcaacgaagctgcctcctaactttgttagactgaaaggttatgtttggcaagctgatctcatgaacaaggtcgaacacagcaataagttttggttttctttgttcacttgtttgcttttagacagaatctcactctgtcacccagactggagtgcagtagcatgatctcagctcactgcaacctctgcttcctaggctcaagtgatcctcccaactcagcctcctgggtggctgggactacaggcacatgacgcccagataatttttgtattttttgtagaaatggggtttggccacgttgcccagtctggtctcaaactcctgagctcaagtgatcctcctgcctcagcctcccaaagtgctaggattacaggcaagagccactgtgcctgggcagcaatacgttttttaaaggggaaaatatgttagagctatggccattctgaaaggcctagtattattttgggctccagtttcctgcagaataaatgggctttgcacagagagagtgttcagtaaacatttgttcataaacataaggaagtctccaaaattccttaagatgaagcttctcatactgctatgtgctccataccccacttctattggttatgagtggctttttttttttttattgctccagatactcatagaatcatgagcatgactttttttttttttttaagacagagtttcactcttgtggcccaggttggagtccagtggcacgatctcagctcactgcaacctccaactcctgggttcaagtgattctcctgcctcagcttcctgagtaactgagattacagttgcttgccaccacgccagctaatttttctatttttagtaagagacggggtttcaccatgttggccaggctggtcttgaactccttacctcaggtgattcacccgccttggccccccaacgtgctgggattacaggtgtgagccaccgcgcccagctgatcatgaccttttaaaaataaaaacgttcagactataatctagttaaagaatttttacctcctttatgcagataaagaaattaaggccaaacatggtggctcatgcctgtaaagccagcactttgggaggccaagataggaggatcatttgagcctaggagttcaagaccaacccgggcaacatagtgagaccctgtctctacagaaaaattaaccaggcccagtggtgcacgtctgtagtcctagctactcaggaggatgtggtggaaggattacttgagcctaggagtttgaggctgcaatgagccatgagcttgccactgccctccagcttggtcaatggagcgagaccctatctcaaaagaaataggaaaaaaaaaaaccttaagaactagagcccagaggtggtggctcatgtttgtaatgccaacactttaggaggctgacgcgggaggttcacttgaacccaggcatttaagaccagcctgggcaacatagtgagaccccatctttatatatatatatatgtgtgtgtgtgtatgtgtgtgtgtgtgtgtgtgtgtgaactagagagatttcttgcctcatccaaaatcacaaagtcacaaggttggttagcctgaagatgtggttatgacccaggtatcaagccaatccataacccaacttgcctttccctttaccagctcatcccatctttgactgtgtctctgcatcatccttaagattagcttccttcaaactactatctctgtactgagttccctcaattcttgctcattttagatgcccaaacattcacattcacctctccaagcatgcccagttttccaagtctggataggatatccagcttcttcaccctatataatcttcactacctttcttaattagcaattgaccaacatcaccttgaaagagatttttgaaggcttctcaatgagatacagagaggtctttcgggttagggtggaactaagatgttatttcccctccacccaccaagattttctcttaatctttattttcctttagctcattcaacccagtgtctctgcccatccccacgcttgggagatttttgtcttagtagtccaggcaatagaattcttagtggttttagtgtgggagaggcagccaagaaagggaagcttgagttaatcatctatgtctatgcatggtaccacttcctgggagggacacaactgatgcttgacacacaggtgccgatcaaagatttttcttagttgttgccagaacatgattgagttagaaaccagtgtggcctgggactgggaagctcattaaaggaattgggacttaaactgggaagggcaagttggctctagatccatagaaactgaagacaggggcagagagagatggtattatagatggaagaaggggcagtgggtcatggaataaatattggtgagcaggggagcaaaccaaaggggtaattgggagattctgagttttcaaggctattaaaatgcagttccaggccctagggaggagagttccagactgttttctctacactgctataattccttacactgctgggagcagtttctttgacatactttgcaactgcagagggcttttaggagagccgagttttgtttttaagtaacagatcacttcttgatctcatttttacaatagttagctccccctttcacagtatgtttcattccccctttctagccaaacggctaatcttggaataaggcggagggtcctgccctcctctccccatcctagacagtaacttctgaggcacttcttccaggcgagccagcccttcacacaaatcacaggtgctgacgggacagacccaagtgtattattagataaaaagagctctgtccaccgggcgtggtggctcacacctgtaaaccttgcactttgggaggccgaggcaggcggatcaggaggtcaggagttcgagaccagcctgaccaacacggtgaaaccccgtctctactaaaaatacaaaaattagccagtcgtggtggtgggcgcctgtaatcccagctactcaggaggctgaggcaggagaatcgcttgaacccgggaggcagaggttgcagtgagccgagatcacgccactgcactccaacccaggcgacagagccagactccatctcaaaacaaaaaacaaaacaaaaaaaaaagagctcagtctaacaaagatctacctaagaccctgtcagggccacagagacggaaaaaattccaagtcaatcgaaataactaggaaagaatgccttgtgcggatcatacatagcacagtggttcctagtagtgaacaggaggcaggatctagagggaagacattgaaaatcgctcaaggtctaattaagagtaacatctccagcgcttgattctgcccttaaagcagagtaggagggtcatctcccatctttcctgcggtgtgccccctccctgagccaagggggggcgggggtgtaaatttcccccagctcctgaccagggggcgcctgggggcaggcaagatggaggccacggctccaggcagcttggccagcatgctctggggctgtccccgcccctaggggcgagcagccctggcggctcctagaggcgactggtgggaagtctgccccctatgggggaggcagaggactgcactcttgtccagggctgaaactgtccacacagccatccaggaatttcaggctgagcgtgtttgggcagaagggaggacacccagcactggcattgggagaactccagattccctacaagcccagaggcctttggtgttagtatcctgagactgttagagaacttgaggtcctgggaggaccctgttatttttatatctctgttcatctagaacagtgcttcccacccgcttccctttttctgtatgttaacctaaatcccctggtgtccagacacatctgttgctccttaatttaaacaagtaaaaacaaaaaacaaaaaaaacctatattcttctgttcaaaaggttctcattttccctgggcagttcaaaatcttcacagtttcactttgcttcctattaaagattagttggtatctggaattgaagaccatgaaggcataggctctaatctaacataaccctggagctgggcttgaggggcctctgcagattggtgctgttttcccttggaagataccacagtgtaattcctggtaacagatgtgacagagacatgcacggaccagcatgggcaaccacagcatcactgttcccatcttcctgccctgttccaaaaagcaaaacaagggaaagttgatacactggggaagaccagattattgatgagaagttgttttctgagctaaaaagtgtttcaacatcccacactgcctgattgggtttaccatctcattggcctattttccatactatagcatagtgggaaaggtgtcttccatctcccttcctcataaccccttaatgaagattgtttccagctgctgccagctggggtgatgcttgacacacaaatcaagagttagcggtggctctcaaagtgtgaaagtataggaatcaccctgggagctgcacgctgggttcagatccgatgttttcaaggcagggcctgggcatgtgtattttcaacagtctctgcaggtgacactaacatacctcaaaattaacaaacccctggcggaggtcatgcattgtctctgtatggactgagctcagcagggagtagacctagcagaaaccgctcactgtaattcaccagaaactccagtactgagcacctaatgggggccaggctctgtgttacgcactgagggtacagaagtgacgaagtcgcagcctccctgtccaaagagcagacaggctagtggggagtagatctctgagtagtggggtgaggcctgatggaagggtctatggctcaggtaaaaggccctggcccctgtatcttattaaaacaattacatgtcagtcccagaatcgcctctcctagggaagggcttctggcttgtaagctcagatgtaacaaagaaggacacagtgatcatctccagaacccactagaggcaagataaggcaaaatgggtttcagttctctgtcgtcaggtgacttttgcttgcacaggtggtaaagtgaattttcttattttcttttttatgtttttccttgaggtatatcacagaaaaattctcgagtctaaagtgtaccccttgagggatttttttttcatatgcatacacctgtgtaactactatccacatcaaagagggggcattcttgaggtagaaaagacctcacagtggggacaagtacctgttcagctttgaacagactaaagtaaagcctgagatctcagggtacagctgctctccttggccacgcgtaaaattaacccctgaaattaacaagtgtctggtgagtatctgcaatgtgttggaacctttccaggtaagttccagggcccctcaactcttaagtcctatatgggtggtttgcagttttaggagttgaatttcaaaaacagaatttgtgttgaccctgtataatctccatctgcttttcttaattagcaattgaccaacatcaccttcaaagggcttttgtaaacttctcaaatttctctcactgtaaatcttgccaataactgaattcatgagggagtgaatttggggcctttacttgggaagggtacctcctttctgcctgcctcaatttgccttccttttcctttaatattgtatttttattatctagggcaaaaaaaaaagcatactattacattacagcttataatggcaacccctgaagaaaacagcaatccccatgacagagcaacaccccagctgccagcacagctgcaggagcttgagcatcgggtggcccggagacggctgtcccaggcccgccaccgagccaccctggcagcgctcttcaacaacctcaggaagacagtgtactctcagtctgatctcatagcctcaaaggtatggggacctggaggaggagaggggacatctccacggggaaggagacgttttcacaggtggagggactgtgttgcaaggcagggactggcctggagctgccacttctgctggggtagcgacaaatgccctagacagggtaatttataaacaacagaagtttattgctccaggttctgaagcctgtgaagtccaagacaaaggtgccatcagattgggtgtctggtgagggcatgctctctggttcatagacagggctatcttgctgtgttctcacatgggggaaagacaaacaggttccctcaggactcttttataagggcaccaatcaccttaatcaccttccaaaagcccccacctcttaatactatcatattggggattgggtctcaacatactaaattttggggggacacaaacattcagaccacagcaggtggacaatcatctttccaccctacgaacaagcccaagatgctggaaatcagtcagcccctggttccaagtctttgctgacccaacagcatcaacatgagctctgggactggggagagcaaaacacataggagtgctcagggagcttgcaatccactgtatcatcatgcagctgcggttcccttcacctcctctttggcctggcagagcactgtgactccagccccctcaagtctcctttttaggcaccactagaatccttggaatctagaatgtcaaatcccaggctactctgcccccagctgctttggggtcccccctccatgcccaccccacactctggccacatctcactgcagcagttccctgagccaggcctgcctctcatggcctctgtgtctctgctcatgcagttagctctgcctttgggattctgtgcacacttcaaagctgggcttggctcactctgctcagctgccctgctccatggaatcttctggacccctccagttggactattccctcctccttgtacattttcacagccctttgcttctaccccttgttagtacctacttaattctatattgtgttataaggggttgtttccatgcttgtcttccctgtcagaggtcagcaccctgagagaggggactgtcttatgtactctgtatccctgggacttaccacatagttttgcccttgtacatgcccaagggatgcatgcagcccctgacagatataggtggtcagcctaacaaacaacatttagcattgctcgtttttgaataatcttgctgttaccattttagcattgctcgtttttgaataatcttgctgttaccattttgactttaataatgttacatacaggaagtaaggagggaagaaggaaggaagagagaggaggaaggaaagaaaaaggaaggaaggaaaggaagggagggagggagggagggaaaaaaggaagttggaagggaggaagggaggaaggaaggagggaaggagggagggaaaaaaggaaggaagttggaaggaaggaagggggagggagggaggggagcagaagggaggggagggagggagagagggagggagggaaaaagggaaagagggaaatttagagttcaggttgacagcatttgataagtttttagatcatctggagcgtatgcagttagcaaataaaaatagtgggagaataggacatttaatattaactagccctttgcacagggttaccactgagctgaagtctagctctgctttgtgcaagcctggggttgacgttcatgcagaatgcgcctcttccatcactccttattccaccttcaagccgcctctgtagtcatttgcctttctacagcactagcaatttgctgaacaaagcttaactctttccaaatcctttggcatttcggtgagaacccacttctaggctacaaacaaaacttcctgcctcctgtgcatcagaacaaacttcctattctttttactgacaaggttaagggatgtgactttgcatctgagggagcgtggcctcagccctgggaagggattcctgggtccacaaaatcagtctctgcagtgagaggctggctttcagcattgtctctgtctatcctcagtggcaggttctgaataaggcaaagagtcatattccagaactggagcaaaccctggataatttgctgaagctgaaaggtaatggagcactacttgccaaccccatctccctccctggagaaaactggatctgtttttctattgaaaacagaagttgggttacaatgaatcaacaaatatttattgagggcctactgtgtgccaggaactgtgcttgggccaatgttgagggtccctgtccttagtgagcctgcagtccagcaagactggccagagtcaccaggccatgagactctgatgagttccctactggagtgctgccaaaggcacctgatctcatcttcagaggccagaggaaaagtgggctcctgcttgtctaaggctctcccttcacacctagaaggaaaaactggaccctggtctccctaatgctgaccctggagggttcagggtcccacccacagcccacctgggccagaagggtgggagagactcaacagaggcctgacttttctctttgtgttcctggtcttcaactccccaatagcatccttcaacctggaagatgggcatgcaagcagcttagaggaggtcaagaaagaatatgccagcatgtattctggaaatgacaggtaagacaccacaaaccccaggaagctggggacctgctgtgtcctcacagccatcagtactgtctggtggcaactcacccttcctctccagcctgcaggaccatcagggctgctgctcaccattcaaaacagccatatgctggagaccattcctttctcttttattctagcaacatgcatcaattttttcccaattataaaaagatacatgcttatcacagaagatgcagaaaatacacaaaagccagaaaatatatattgtcccagaactcaaagaaaatcaatgttaattttcaagaaaatccatcaagtttttaaaaaatgttgcacattattctttagagaaatgagcccatagtgtttacattatattatagctttttctatatgtattttttaaagccacaactaatgtctttcttggaggatacatatgacaatcaggaaaatgcaaatctcagtctatattccaagcctcctaagaaaagctaaattaaacttcagcaacgaaaaggaaccatggtacacccaggtgtcacaaatgctgaaaggggaacattattaatgtcacattcatactttgaaggagaaactgatttgagaaatgtacttttatgatctcatggttttttgtttttgtttttggtttggtttggtttgttttttgagacggagtctcactctgtcacccaggctggagtgcagtggcatgatctcagttcactgccacctttgcctcccaggttcaagaacttctcctgcctcagactcccaagtagctgggattacaggcgcctgccaccacgcctggctagtttttgtatttttagtagacacggggtttcaacatgttgcccaagctggtctcaaactctgacctcaaggtatctacctgccttggcctcccaaagtgttgggattacaggtgtgagctaccacgcccagctgagcttgcttttttgactcaacatgttaccttggggattattcctctaagtataaagagatcctgggtgcaggtcctgacttttccaaattatatcctattgtttcattctcttcaaggtgtcttttgaagagcagaatttgcaaattttgatgagtccaatttatcctgtttttaatagattgagctttttgtttaaaactaagtatgtcattttttcatgctattgtaaatgatgctttttaaaatttcaatttccaactgttcattgctactatgtagcaatattattcatttttatattctgatattgtcttctgcaaccttgctaaattcccttcttggttctaatgacatgtgtgtagattatttgagatttttctacacagataatcacactgtctgcaaataaagacagatttgtctcttctgctccaatgtatattcctttttttgcttgccttactggactgtctagaacctccagaacaattttgaatagaagtagtaagagtggacagtctcattttattcctgatcaagaggggaaactgtcttttgccattaagcacgatgttagcggtaggttttttggagataccctttatcaggttaacaaagctcctttttattcctagtttgctgagagtttttatcatgcatggatgttgattttgtcagatgctttttctgcatctattgaggtttttcttctgtagtctgttgatatggtgaattgcattgattgattttcaaatgttgaaccagttctcttgcattcctaggaaaaagctcatttggtcatgatgtgtacacctacacacacacacatacatatacatgtatacttgctaaagttgctaagaatttcttgtccatgttcatgagggatattaatctatagttgtcttgtttctgttttctttcccagcctgctttcaaacagttttcctcagaatggttcctccccttggtgcccaactgaggcagtcaggaaggatgctgaggaggaggaagatgaggaagaggaagatcaagaagaagaggaggaggaagaagaagaggaggaggaggaggaagaggaggaagaggaagaggaggaggaggaagaggagaaaaaagtgatcttatactccccaggaactttgtcgcctgacctcatggaatttgaacggtgtgaacagttgggtggggtggctctgtgcacccatggagctccctcccatggggaaggggacagaggctctggctggggtatgctgcagctgtgtgccccagctggagtgcatggttcagactaggccctgaatcacgaaatctccaggattttcatatgggaggggctgagggacaggactggcagagaggctagagaaatagtctcaaagctacattagcatagcacatacactcatacagtgtttttactgagactgggtgtttatttggggtgccttgtggggggcacagctgatggtgattatgagggctaacccctctctcccccaaaacacatacccccacaagtccgcactgctcttacagtaggaaagatggcgaatggctggctcagacgtcccttgccactgcctcctccatagactcaaagcccctcagcagccatgttggcttccagaggagttggctcaatagcaggaggctctctccacagccgagcctgactttcgggctgcaggttaaagttggagtcctatcatgccagcacattcatgggctcagaattttcaagaatattcccttaggatgagagctgaggcagctacgcctcttatctgcttctgtctaacacagaaggcttcatggggcagggactgggagaacttggggaggggccccaaagcccaagtctatgtccttcatggcccccaggaaggctgctgctctccaagggccaggggcgtgcagagtctgagaagtctcagccctggtgagccgtggcgccgtggccgggcctgcgtgctggggtccacaccatgaaccgaatcccgaatcgcttcgagagggagctttaggggtgcgagacggcgccgcttctgttccaggtatctcaacttttacaaacagacgatggaccttctgactggcagcgggatcattaccccgcaggaggcggcgctgcccatcgtctccgcggccatctcccacctgtggcagaacctctcggaggagaggaaggccagcctccggcaggcctgggcgcagaagcaccgcggccctgcgaccctggcggaggcctgccgagagccggcctgtgccgagggcagcgtgaaggacagcggcgtggacagccagggggccagctgctcgctggtctccacgcccgaggaggtgagcaggcccaccggggtggcgtggatggggcacgggaaccaccctcgccctcgcctggggacaccagggctttgcatttagcaggttggaggtgcagtttgccttctggctcccaaggtcggtttctgattttcttttttctcttttttttttttttgagacggagtctcgctctgtcgcccaggctggagtgcagtggcgcgatctcggctcactgcaagctctggctcccgggttcacctcattctcctgcctcagcctcccgaatagctgggactacaggcgcccgccaccacgcccggctaatttttttgtatttttagtagagacggggtttcactgtgttagccaggatggtctcgatctccttacctcgtgatccacccgcctcggccttccgaagtgctgggattacaggcgtgagccaccgcgcccggccggtttctgattttctaatccctggggtcacggaacagtatttgtttttctgcggttagtttcctggcctttccctggggatggcagaagacaagtcttgagaggttgtctcagttgggattctttgggctgccagggcctggattattaaaccacgaagaaatgcactcctcacacccggggaggtccgaggcaggcagaggagctcaccatgtccgcgtggattcaggcctctcttggctctgctcagtttcttatctttccctgccctccccacctcctccggctcctgtggctatggaatggcagctagagcaatcgaactgtctttcttcctactctacatcaggtaagacaaagatttcctacgaaagctctttcttaagagttaaggaagaacttttccggaaccgctcctcccctctcattggttggaactggccaaattgccagcctgctgagccaatgactggccatagagggaatcacacttggaccaatcaggtccagcccttgaaaggccgtcagttcccaccccaaagagcactgggatcgctctgtgaaggggaggttaccacaactgctaccgtaaatgcatttctcagctttcagaacgctagtcagaatggccgtggccatagtctgcaaagcagagcatcaggtagcatttgaggtcgccctgcacggagataaaagtgggcccacagctgctcttccagtatgaggacggcctcagaacactgctctaccacacggcccacgctcgctcctctagcccaggcgcagccgattcgcattctgcacatgccctgtgcttcgtggacatttagcatccatggcttccgcctgatacaggccacccccttgccctgactttccaaatgctcctcagtcggggcgcctttgaggagacgacatgctagtttcccagagtctctctgtggagccttagggccagagagcgtccgattgtctctgaccctggagttacagccctggaatgcctccgttttttagaaggttcctcagctatcaggcccaagcctggagaacgacagagatgtcacccattcctgtccttccagtttgcaggcctaaccagcagtgtgacttgcccagaactcccagctcctgcttcagtgactgtgtctctgtcatcacacattttttcacattactctgccctttggtcacctgttgatggtcaaccctccattatctcccctgatgcttctcaactgaatcacctgtggagttttttttaaagtcaggtgcctggctgggcgcagtggctcacacctgtaatcccagcacttggggaggccgagcaaggtgggagcaatgcttgagcccaggagtttgagaccagcctgggcaacacagtgagactgcgtctctactaaaaactaaaaaaaaataaaaaggtgtggtggtggtacacctgtagtcccaggtactcaggaggctgaggcaggaggatcctttgaccccaggaggtcaaggctgcagtgagctatgattgtgtcactgcactccagcctggcaacacagcaagactctatctatcccagacacactgaatcagagcctctgagggtggggcctcaggaattgcatttttaacaagcttccctcgtggctagtgcagtaggtcctattggagggaactcccagtgcagatgttcaatggcctaccagctactgccttggtcctttccccgacccccgaacatgggtccaccagactgtggcttctgatctggttttcctctgatgttgggtccaccatgagaagacatgcgttctgttccatgatggctcaaaaaaagccagaagattaggacctcatacccaaggcttgtatgaaagggcagccaaacagatgtgtttacagccccaaagtgccaagccctggagtctcacatgaagaaaacgaaaggaaaatacagtcatgggctacataaagatgttttgggcaacaacagaccacctatacaatggtggtcacataagatgataatggagcatatatggaaacctgatatatggcactcgatattggcattgcacatcaagtagggtaaataattgatattcagtaatggaacttggatttttggttttccatatgaaaaaatatatataaataaatatatgggctgggcgtggtgatgccagtctgtaattccagcattttgggaggccaaggtgggtggatcatctgaggtcaggagttcaagaccagcctggccaaaatggtgaaacaccatctttactaaaaatacaaaaattagctgggcgtggtggcgagtgcctgtaaccccagctactctggaggctgaggcaggataatcgcttgaacctgggaggtggaggttgcagtgagccgagatcacaccattgcactccagcctgggtgacaagagtaaaactctgtctcaaaaaagaaaagataaatatatgtatatatgccatctaggtttgcataaatacactctgtgatgttcacatgacaaagttgcctaaggacacatttctcagaacttatccccatcagtaagtgatgcatgacagtatctaccaaatgcctgagcaattctgccaaatttgactgtgccagcacgaacacttccccaggaagaacacatccaaagagaaaacaaccagaatctaatgtctccaaatcatggaaacagcttttctgggtttttcagggaggcctatgggctgatgtttgttgggtattaagggaagctggcagcagattccctcagctgtggccagaagcagggctctgcctgcactgctgtgcccaggtttaggccaggccagggctgggcgataaggtaggcagaacagagaactcccatgcccgaggcagggacaaagccacagttactcctgctgagcagtgacaccactgcagcccctggtccacctggagaggttctgctgcagaactgttgtgttagaggccagcagcacggtcagatgggcccaggaggctctggaatgctccatttcagttcagacatgagcttccctgtgagtgtggtggcactctggaaaggctgtggagcctggtctggggtcccctctcaggctggcttgtgagggggatttgcacaggtgagcacaatgtgtggcctgcgactttggtgggctgattgcttaaggacagggatttcagttctgggtccctgtttcaggcctgccagggagcaacatgtagctgataggcttcagagctgatggacactgaagcacaggtctttctgtggcccctttccagatcctctttgaaatgaccacagagatatcaagtagaaggacaacagaaaatgtccggaaaactaagagaggggccagagtcccaagggattcagttccaggaagtcaattgaaggaagacagaaagggcagacaccaatcctcttggaagagctgtgtgttgcaggaagggaagaggagaggagagaccctggcggaacctgccagtacctgccaactcagggtcagagaacttcctctcctctcctaggcgtgattgccagtgcaaaggagatgtcagttaaagtaaagcatgcccagttcaatttttaatacaaaaacgtcccatgcatgattcaaaacattcttatactaaaaattattcattctttatctgaaattcaaaatgtaactaggcatcccgtatttgtatttgctaaatctggcagtcatgtaagtgtaaatcatgtttctgtaacatatttaatattctctaacacattagggggaagcaggatgaaaaactgtctaaatagcaagattccaaattggaaatatatattatagacctagggaagtgactggagagaattagatcaatgtgtcaacaatggatatctgggtgggattgtttctcagtaattcttattttcttgatctgtttctattttccaaaatttccacaatgaacatgtatgtctcttataaagcagataatgttcaattatgtgccaggtatgtctgttataaagtggataatgttcaaatgtaactagatacttcacatacattatcttacttaattcttggaatagccctatgagtagacactaatgtgattcctgttttatagaggaggatttgtgagatgaagtaacttgtcccaggtcacacagctagcaagggacacaggcctgggagttggcctgcctgcagcctaacccagagccttcctgaccctctggattcagctgtcctggcatgagacagctagactggggaccctgggctccaataatctgtgcgccttgggaagttttgatgaggtttttctcagtggtaaactgaggctctggtaattgcatctcacacctgagctcccaccttcgtcggcaagaggaatcacaatccccatttcttcctgtccctcacagccacctccagggttggcagtttgtcctgggcactctagagtttagcatttaccccctaggaagaacagcaagcagagcccctgggtgtgggccccagctctgacatgcatgccctctggggtatgtgtaaagagagagcctttccactcatctctccccagcagcccagggcaagcatgaaattgtcaagttatttccaacacatgaagtgttgtgctttctttcagatcctttttgaggatgcctttgatgtggcaagcttcctggacaaaagtgaggttccgagtacatctagctccaggtgaggaagagggtgtgagatagcatgtgcccctgtgtgggtggatgtgagattgtgtgtgcgcaggtgtgtatgtgtgagtttgcatgtgcatgaatgtggtaagtcagagacagagagaggagacagagggagagagagagagtgtgtgtgtgtgtgtgtgtgtgtgtgtgtgtgtgcacccctgctggggtgttcaggggcctctcctctgcagtccctagatgggtgttgtattagtccattctcacactgctacaaagaactacctgagactgggtaatttataaagaaaagaggtttaagtgactcacagttccacaggctgtaaaagaggcatggctggggaaacttacaatcatggtggaaggcaaaggggaaacctgtatatcctcacatggtgacaggagagagagtgaagggggaagtgctacacacttttcaaataaccagatcttgtgagaactcttgtcatgagaacagcaagggggacatccacttccatgattcaatcacacaccccctcaccaggcccctccttcaacacatggggattataattcaacaggagatttgggtggggacacagagccaaatcagatctggtgcctaattcagtgggtattcttggggatccaccttttttctgtgattggaagtgagctggtcctaggattgtgtcattgccctggggatgacactatctgtggcatcttcagagtagaaaattcttccatcctggcgcagggctgggacataccaggttatcagctgtaggttgtggaaactcatctgttcactttgcaccccattcccagtgtgtgttagtcctgctaacctccactgagggctgctgtatccctgccttaagtccattatatactaaatgccataggctggatggcttataaacaacagaaatgtatttcttacagttctggaggttggggagtctacgaccaaggtgccagcagagtcagaggctcggtttttcacagacggcaccttctggataaaattcacatggtgtaggggcaaggaatctctctggaacctctttctttaaaaaaattttttttttttctaagacagagtctcactctgtcacccaggctggagtgcagtggtgtgatcttggctcactgcaacctccgcctcctgggttcaagtgattctcctgcctcagcctgccgagtggctgggattacaggtgcatgccactatgctcagctaatttttgtatttttagcagagacagggttttgccatgttggccaggctggtctcgaacccctgacctcagatgatccacccacctcggctcccaaaatgctaggattacaggcgtgagccacagcgcctggctctggggcctgttttataagggcactaatcccatcatgaggggcccatcttcatgccctagtctatgatctcccggagtcccccacctcctaacaccatcaccctggggattaggcttcagcatatgaatttcggaagaacacaatccatcggtctctagcacccagggcagcttgcgggcaggttctcccagctgacctggaaggagaaggcggggagggggctctggggcacagagaataagggccaacatgcaaataggcatgggccctgagtttaggggactctctgagttctgcaaaggggggttgctgcttttcatggtgctgatgggaacggatatggaaggaggggagaaaaggatagctgaccccatgaagtgggaagacacaaaataggatgtgaaaagattttaaaacaagaagcagcgtgactaacaatgtcccaaaggtgtgttttctgagagaaatcctttaggactgaaattcccttgctgctttgcttgaaaaacctgtggtcttagagcctgaaggcacaggttcttcagatacctgtgctgctatcatggctaaaaagaatcctggacatttatttttctgctttgggggtgagagggacatatccttgtgatcccaatgaatatctcattgtcctctcaaggggagcctggcctatgggtgcctgtgaggccttggggccacagctgtccctagtaacccagctggcctttcagcagagcttcagggaaaccacacatcaacattttccctccattctccctgttccacccaggcctagatggacttggggagaagtgggattgtcagaggagggctttgtcctctccaaatcgaccttacagagtgactcaagtgcttctcagctgtgagtggagtttcattttgctgcaattggctggaagacacattcctgtttctgtgctgagcttggactgcaaagacaaccatcgagaagctgccagcctgtccttgccaggcaatattcagaactccctgccctgctgatggaacagaaaaacaacctattaaaaatgttccacttcccctagaaaagtcaggggttgctgccagagggttcctcatcccgggaggaagtgagggctgcctgctgactcacagtgagtgagtgccagctgtcctacagacacacagcctctgtgctctaagaagccctttgaagcagggtccacattgcagggcctggctcttagcgggcattcctaaatgttgcacgagcccctgccacctttcctaaaggctgagctaactcatcatcttctgaggccctgcaataacagttgctgtcagcttttgaaggattttcatgtctgcttccaaactgtgctgcttatggtgacataagctcgagtcacacagggcttctccccttgtcccaggcaggcaggaggaaaagagcctgcacaacaggcctcctttctgcaccagggcttgagttccacgttagacccactgagcagtggcaactcagtgaactgaactcaagatgtgcggcgtgctccagagctgcctcagcagccacagtggaaccagaactgtgggggcattctgcagaagattgagggatagaggaactctcgttcccttgttccagtggccacagctcagaacactaaattagggcacaggagccagtctcaccacagtctcgattttccaggggattccagacatgatatgtgagcagaggtaacacaaacctttcaaggagaggtctgggctgtctgagaatttacatgtgcttggttcatactgtaacccaaatctttcaggggagggggaagcagagttgaaagatcaggatcctgaatatttgttgccttttcttcctttctgttgtcagttcagtgcttgccagctgcaacccagaaaacccagaggagaagtttcagctctatatgcagatcatcaacttttttaaaggccttagctgtgcaaacactcaagtaaagcaggtaggatggagtagagggccgtggtacctctgcccaccttgcttagatagcaaaaagggctcttaagggcagccctaaccagaactcaccccaatcataccatgaggagccactgggcagggacactctccattctctctggcttgctccatgaatggtcaccttcagcctgatgcatcctgtagaatgaatggaagatagccagggaaacaggaaagacagagaagtgtcctctagggcaggggtccccaactcctaggccacagaccagtacagatctatggcctgctaggaacacagctgcacagcagagggtgagcatgacagcctgagctttgcctgctgtcagatcagtggcagcgttagattctcataggcgtgcagaccctattatgaactgctcatgcaaggggtctaggttgctctctccttatgagaatctgactaatgcctgatgatctgaagtggaagagtttcatcctgaaaccacccttgccccccaggtctgtgggaaaattgtcttccgtgaaactggtccctggtgccataaaggttgggaaccactgctctaaggcagaccttgactgggagccctttgaagcaggaacccgatcccaggggcctgactctcagcaggcattcataaatgttgtgtgaacctttgacaccttcccaaaacgctgggctatttcatcatcttctacagtcttcatcaccttcggtaatatttgctgtcagcttttgaaggatattaatgtctgcttccaaattgttccacttacagtgatatgagcagtgggactcttggttaggagggccattcctggaagcttttgtcagagaaggggggttatacctgagccacaaggggacaggtcctttcaaattcatagccatggatttttctttactagtttagcaataatacaactgtttatttaaaaggtaagttataataatagcaaatgtttgtctaaaaatagtcaagacacctgttcaataggctaaggtataacttgcccttttccaactaagtcttcatttccttcttctgggaccacagtgaatccttatgtggagcccttccttgcagtttgctctccccttcccaccaatccttgggtgacagtcccctggaccagttgtcccctctttctctcagatacagttaaattagcccactttatcaagactttgagaatagacgaaaaggacaatctttgcctcccctccttctccatatatggcagaaaagataacaagcagggattcttgtatccatacaaagcaaaggtatggccgggtgcagtggctcacacctggaatcccagcactttgggaggctgaggtgggcagatcacttgatcccaggatttcaagaccagtctggacaacatggcagagcctcaccactacaaaaaatataaaaattagctgggtgtggtggtacatgcctgtagtcccagctactcaggaggctgagttgggaggattgtttgagcctacaaggcagaggttacagtgagctgagatcaagccactgtactccagcctgggcaacagagtgagactctctccagacaacaacaacaacagaacaaagcaaagatgccaaacttcagcactcctagattcccgatgcctcagtgctgcaagaacgggccccagaaatctgcatttggaatgagctgtccaagtggctctggggcaggaggactcaggctttgatagactctggtgtaaacagaaaagttgcattctcctcccaacctctgccactgtcttcctgctgaacaaggggcccacaagatttgcctggagactgtggtcccacctccctgacactcttgatccctatttccctgcccctatcaggagagcatggtgaatgggaactgcttctccagggcaggaaaggctcagtttgtggaggtcgtccccactatgaggatatcacccttgggaccaggtcccacattcattagatggttgactggggtcagggatgccacctggttccatggggatcaactctgatctgcagggctgacaagttacaggggtcattttctgctaggatggagacagacagaaggagcaaagcctcaggaacatatttttagaggaagaagtcatggagagtcctgaggtgttggctgggatcactgtttacagtgtccctttagggactgagaaacccttgctaagcaaacagtgctgctgcttttttttttcacccaggatggtgtgtagtcatggtgtgatcttggatcactgcaacctctgcctcccaggttcaagtgattctcatgccatggcctcccgagtagctgggattacaggcgcacaccaccatgcccagctaatttttttgtatttttagtagagacagcatttcgccatgttggccaggctggtctcgaactcctaacctcaggtgatccgcctgccttggcctcccaaagtgctgggattacaggcattgagccatcatgaccagctgcagtgctgctgcttaaaaaaatatcatctcctaataggtaacccatatacatggcataaaatttacaagttaccaaaagatatacaatggacacttagtctctctctcttccttgcttcctaccccataccctcccccagaggcaactacagtgaccagtttcttgtacactcatccaaagatattctacagatattatatattctttcaaacacaaatagtagtagcctacggtacacattgctttgcactttgccctttgtaaatagtgtatcccacagagagcacgctgtctcattatttttgttggaaatgagctgcatggtgtttcattggtgggagcaccgtggtgcagtgcaccgtcttctattgatgagcatttggataaagccttatgaggtcctctgtctctcttgtgggaacctggaaatccccaggataaaaaagaagccagttctgctgtgtcctttctggaggtcatagaatgctgagttgagtgaaatggaaatgggaccttccccccttagagcccttgcttcctggcccaagctggaggtgaaaatgcagcggaagagacgtaggatagagtctgggggctgggcacaccggagatgcaggagccttcctatctgcctcgggcccaagacccacagataaaaagtgaccctcttccaccctgtgtcttgcaggaagcatcctttcccgttgatgaagagatgatcatgttgcagtgcacagagacctttgacgatgaagatttgtaatgcagaagaggagctgcgaggggagggactgaatgaggtgggcagttcccaaggttgaatgctggcagctaaggttgcacctgccttggcctccaggactctttggagtgggttgttccagaagcattttgatgattttagtttctgattattataaagtataagagaagcacggcctcgtgttggtctttagggactgtttggcacaaagggctggcctgctgctattgtgctcctattaagggggtagaaagtacagctggggcccaggccatgggcctttcaaggaggacaggcaggatctgtcctcggaggtgacataacaccaggtactttcagcatgtcctgggcacagggcattgccctgatgggttctagagagttccacagcccacctgctcatcctgcacactctgagagccaggggcagtgctgacctcaaccctgtgccacaggacagctgggtggaaccagattcatctgctgctcctggtaataaagtcacctgaacaggagctacagtgaggtccgagggttccgagggctttctggtgaggcttctgggcaaagggtgcatacgtgtacctgggcttggacactgggggtgagggtgaattttatgtgtcaacctggctagtctgtgatacccaggaatttggtcaaacattattttagatgtttctgtgaaggtattgttaatgaaattaacatttaagtcaggagacttccagtaaagcagatgatcctcagaatgcttcctataggttaaaggcctgaatcgaaagagaccgacctcccgggagaaagagggaatcctgccagcagtccaactttggacttgaactgcggctcttcccagcctgccggcccgccttgcagattttagacttgcacctccacaactgcatgggtcccttccttaaaataaatatttcacctctctctttctctgtatctacgtatatacacatcttattggctctatttctctggagaacccagactaatgcagggtgtgcggggagaatgggcttgcatggctctttacagttttcaaggcatcatagcagcccctcccctgcactgaggccctcccaaaggcttggactgtgttatctcctagcgagagcctgaaacaccggctaagtcttaggacccagacccagtcctgtgtgactccaaagcagtcctgagatgcatgagcccgcactcaaggacttcccccggggtgtgcagggataggagcttcgccagcccttcacagcttacaaatcaccgcaccgagtgggcagagggaggctctccaggagctgggcaggaagggcctttgtgctcaggggcagcttgaactcctgctggaaagacaggaatgcaggagctcaggttggccacccctagaggctcaccaagccagctgtgtgggaaagaagaaatgcagctttacagaggggcgtgcacatagtaggccctcaagcaatgtatgccagtgctagccagcccctccctctttgtaccaagctccaccctgatcctatttagtccaaggctgcgacttcattccttgagccatacctgccagcagcccctagtcagagaggacctcagcaggatgtggaggtgtcccttccccccacaaccttgtgctgggttgtgagcccaacagccctctgcttctctcctgcagccttgggtattggcatagcctgggatggagttattgcataaaactaccttcacgtggttctcaatctcccttcctccccaccaaggacttgtatcgggaaggtatcttcctatatcagtcagtactgtagcaatcagagttctgcagaaaaacagtgccaatacgatatagagacaccgagatttattttaagaaattggtttatctgtttgtggggactgcatgtctgaaatctgtagggcttccaggaggctggaaactcaggctggagttggcagtgcagtcttgaaagaatgtctcctcccagaaacctcagttctgttcttacggccttcagctaatggatggtgagccccaatcacatcagcaagggcaatcttcttaatttaaagtggactggtttgttaaccacatctataaaatgccttcacaacaccccctaaaggagtgcctgattagataactggatactatagcttggccagcttgacacatgaaaccaacatcacgggtaccccttggggatttttatgttgttgttgttatagcagctccctgtggaggttgggcctctgttattactgccatttgacagatgaagaaacaatgatttaactgaagccccaaaccatttaatagaagaatctcagatcacctcacctctaactctttttatccccaataagttaatgaatggggaacaattttgttgtttaaagtcacaaaaaagccctgcctctaaagaattaggatgtaggaatgtgaagccagcccttggagttcactctgtcggccactctgtgcatcacctctaggtgatgactgggagggggatcatgggaggtcaagtggaggcgggaagaagcaagattggaggtgaaggagggaagctgcgaggccgtggctctaggcactgcattatcagaacaggggattcagattctgatagcgaccttggaatgtgcagaaaaagctccaacagataaatgcttattgagtgcagatggtgtgggcgggtggtggctgggctgagctgacatctagcttgggtaactcagttccacctcatgctaattgaatcaagctaattaccccaagcccatctcgtcaattacttcttatccaccagctacttctccaaccttgattctgaacaaaacaagcctttgtgcttttatggaaatgtcagaaatctgtcccttcttgcatatgcttctcacaaagctgccttgttcctgaagctctgaaactacgtgttctgacaataaaaaaaagtacagctgagggaagaccaggaggctgttccaggagagggcctggctctcttctcctgctgttcatcctgctttggctgcctggggacagcacgatacgaaaataaagtacaggaaaacccacttggaaaactgagcctggctgcctggcagctgtttggtgagaacatagggaatgttctgaagtcctggagctgtcaaccaaaggaaaaggaacaaagggcagaatcagacaggatgtgaagggcttctgtgggcacagaagcagtagggtaaggaaagaggatgggcctgctcttgactggtatgagaggcatccaggactcctggagcagctaagcgcaggtcctcggctccagcacatttattacagcatgttagatgggcgggaccctgttactttaagcctaccatggcacacactcacaaaagtctctttttaagaaaaaaaatctttttttaagatagcagaaataacagcaggtgtgtatgctgacatgcgttactgaaagaaagagaaaacttgatgcaagataggagagttgtcgcagtgaaacccttgagtagaaatcagggaatgggctctggagcacaaggggaggaaccagcttcagggaggagccaggcagctcattcacccaacaggagggagagtcaaggggcaccaaagctaggagtggagacatgcaggtgtttgcacagtttctcatctgattactcctttacagatttctctgaaataagaagctgaggttgggtatggtggctcatgtctgtaatcctagcactttgggaagccaaggctggaggactgctcgagccgagcggttcaagactagcctgggcaacatgacaagactctgtctccacaaagtattttttaaaaaattagcagagtgcggtggcacatgcctgtagccccagctacacggaaggctgagacaggaggatcccttgagcccagaggtcaagactgcagtgatctgtaatcgcactactacactccagccagagtgacagtgagcgtctcaaaaaaaaaaaaaaaaaaaaaagaagaagaagaagacagaggtggaaagagttttagcagagagagcattgtgcttgggaaagggttccttcctgccaggcggcactgaggatcccgtgaagttcaaaaaaaaaaaaaaaaaaagaagaagaagacagaggtggaaagagttttagcagagagagcagtgtgcttgggaaagggttcctgcctgccaggcggcactgaggatcccgtgaagttcagggtctgaatctaaaaccactccgttcaactgtatgttttccccagagatgctcaactgcacgagtgcaggtgcagagtgaagagttatttctcatcagcgttcaggttttgccaagagagtgtaaagaagagagcagactaagggtgttgcaaatgcgagaaggtggttattatgactgactgtggcattgaggttgctcaaggagggaagaggggaccagcggaaggtgggaggacggtagattcagatcctggccaattaaagagttattagacttgggggactagaagtagtgagctggaaaaataggaggtggtggtcagacaactgcttgaaattgaggattgcaggcacagctactgggaatccccaaggctagtctgagatgtggccacagaatgagtaactgagatgagcaaagtcacacaggattctttcagtgccacttcaccagccagaaacttctgtgaccagtggcgcctctgaccaagttttgctcacaactgctgggctggctctgcctactcagcccagcaggctgtcctcagcttgcactactggcccagatcccattcccatcatgggtgagccaggcgcggagtagtgggaggtgtgtgagtgagcacagggtccagccacaccacagagccaggtgcaccagctgctgcagaagggcaggcagctccaggtgtcggaaccatgtgaggctgtggctggaccaggtatgcctcaagtggcttccaccttgggcactggcatcccaacaaggggaacgccgtggtgcctgaaaactcaaagacaccagcaaccgtggagctgcaagagggtgttacagcatgtcacagctctggcttggggagccccaaggtatgggcccccagaagggtcacagatcttctcttgtagtctggcaaataagagcgtgtcactgcccacagcttggcaggctgggcaggaatgtgtttcagcttgttcatgttaccgctcattcggtcccaatgccccactctagcccatggctcctgggctgctggtctggtcacaccaacacttcctgtcatgtggggcagccatccggtgccagtggagggtgggacggatacagtgctacagctcctttcacgccggtcctttggtgggctctgggttcttgttctgcatccaagaaaaataaggttatgcagacaaccagagagtgagcaaggcagagaagagttttattgagtgacaacacagctcttgacaggagagaggaccaaaagtgagtagaccctacccaaaggcaggtagtcccagtgtgtggctgagtctggggtttttatgggctcagaatgggggaatgtgtgctgattggtgtatgggcaggcctggaaaaatcaccattggattggctaaaaggtaacgaggggctaggcatggtggctcatgcctgtaatcccagcactttgggaggccgaggcaggcggatcacctgaggtcaggagtttgagaccagcctggtcaacatagtgacatagctgtctctactaaaaatacaaaaattagccgggtgtggtggcatgcacctatagtcccagctacttgggaggctgagaggagaattgcttgaatccaggaggcagaggttgcaatgagccgagatcacaccactgcgctccagactggactacagagcaagattctgtctcaagaaaaaaaaaaaaagtaacaaggaagttctcactccagcttgtggactctacctggaactggcagcccagttttcaggcttaaacaaggaagttctcactctggctcatagactctacctggaactggaggcctggttttcaagctttaagctgtctttggtttgaaggtcaggcttcaccagggatctgcccctgtctgtctaggaatttgtctgcctcctgctgctatcaaaagggccagatcatggagctcaaggaactagaagccaaggtgtgggaaggatgagctctgtggatatgaagtctccaactatgaagacaagaattttggagacaggaacagtgaccaacacactaacatcctcagagaaggagggttggtctgtagatgccaacaacaaaaaggtgcataggtagaaaatccaatggtgtgaggttcaaagcaaaagcacagtagagatgtcctgtaggatctggaattaaagttcttccccattcctcactatcctgaagtaaagtactagttttgttagtcagcttccagtagagttttgcaaaggttacatttcacataaatatgttatctaactatgtaacaaaaagaaaaatgtgtagaggaatggcttaccacagattacataaaaataattgtcgatttttgcatgggctaagactgcaaaatgtctcctaagaacaaattggatacattatgtaatcaacataaaataggaaagaaaaacttcttcaaaagagcagaatttgtttagaaacttcactagcaagcggtgaaaaaaaatacatgacttttcgtcaactaagtgtatacataaggaagatatcttccataaaagcaagagtactgtggactctgggcagtgtgtttaaaaatgtgaagttaaaatttaaaaaaaaattttttttgaaggctgggcatggtggctcatgcctataatcccaacactttaggaggggaaggagcgtagcttgatcccaggagttggagaccagcctaggcaacatagcaagaccccatctctctatttaaaaaaatagtaaattaataaaagtgtgaaagtgaccatgtaaccaggctttgatctctgtgcccaccaatttcccaaagtgtagaaaatcttcaggcttgttttcttaaggaagagctgccatactataaaggaaatgctatgatctgaatatttgtgtccacccaaaatttgtatgttaaaatcctaactctgatggtattaggaggtgggggtctttgagaggtgattaggtcatgggcagagcccacgtgaatggaattagtgcccttacaatcaaggccccagagtgatcctcctccccctcaccttgtgaggttacaatgagaaggtggcaatctgtgaggaagtagactctcaccagatctctcagtgccttccttgatcttggacttcacagcctccagaaccataagaaataaatttctgttaagccactcagtttttagtgtattttattatagcagcccaaacagactaagacagtaaccaatacagtagttcccccttatccttggggaccacattccaagacccccagcagatgcctgaaatcaaggatagtaccaaacccctatatagactatgttttttcctatacatacatacctatgacaaagtttatgaattaggcatccctaataacaagatacccagcaataaaatgcaacaattataacaatatcgtaatattttcaagggttacctgaggacaagcactgcagtgcctcgacggtcaatctgatcaccaagacagctactaagggggcgggtatcctccacagcatggagatgctagaccaagaaatgattcgagtcttgggtgggaaagaacaggatggtgagagatttcatcaggctactcaatttaaaacttacatattatttatttctggcattttgtatttaatatttttgtatctcagttgactgcaggtaacttaaaccagggaatgagaaactaaggataaggggaggctactgtataggattttttatttttatttttatttttatttttgaggtaaggtcttgctctgtcacccaggctggagtgcagtggtatgaccatggctcactgcaaccttgacctcccgggctcaagtgatcctcctgcctcagtgtcctgagtagctgggattacaagtacacaccactatgcccggctaatttttgtattctttgtagagatgaggtcttgctaggttggcaggacttctctccaactcctgagctcaagcaatcttcctgccatggcttcccaaagtgctgggattacaggcatgagccacagtgccttgccctgtataagatttttaattaaggactgtagtaggctgaataatggcccccagagatatttatgtcctaaacaccaaaacctgtgaatgtcaccttctatggcaaagtcccttctatggcaaagggacttttgcagatatattaatcactacattaaggatcttgagatggggcgattatcctaagttaactgtgtgggttccaaatgtaatcaaagtgtccttataaaagagaggcacacaggtcaaaggaaacagaagatgggacaagggaagcagaggtgggagtattgtgcttttaagacggggaaggggccacaagccaaggaatgcgggccccttctagactctagacactggaaaagtctgggaaatggattgtcccctacaacctccaggaggaagcagccctgcccacaccttggtgcccctgtaagactcactttagacctctgagctgcatttcttccaggaatgtatacatttgtattctttcaagacacgcagtttgtggtcatttgttacagcagccataggaaatgatgacagggacaagaaagataaagtcttcaagcccggcacttacaaaacttccttgcatagaatactctgacctaccattgtcctccctgggatgtttctggtagagccaatggaaggctgtgtttttcttttgcctttgcaatgacagtggaaggctaggagggcatcatcctcagctgcagcaggagaggatgaggtcagcaagcaaggagaagcagcaaagggaggcagagagagacaggcaggagagaagcctaggttcttatccttcaggccctagttcttctacctctcccagtttccttccttcccagctgcaagaaccaacaaatcccacccacttcccatttttttagttaaacttttctcatttgcagccaaaaggactctgactaattatgcagagatctcttgtgtggctcagcagagaatttagaggctgtgaccatcttctgatggctgtgctggggcagagctgggggtgccgcaggtacagcactctacaagagcctgccaggtcacagggatgccaggcttcaaggacctgcaagatcctccctttcctttaggatccatctgtgagtcaaagtttttaaaggtattttcagcctggatcatctttggggatattatctgtcatgctcctgtttccttttatttacttctcactcaactcccaagcacgcaggcatgactactcctataatattccaggatctaggactcgctgggcaaattcactcactgggcatcattcaggattgttcttagaagtattattatcactctgctccatcatattctagaattcagctgtatcacactccttcccctgcttcacttctcgcccccttaaagactgaaattcctcatgctcagtgacactcctccttcctcctgggtccactgtctccggaaggacagcaactagaattgttccaggagacaaaaaatgtctgcccttctcactgaggtgcctgacagtcagtggtggggacatcagggcattggtccaatgcaccccaggactggtcttcagggttggccactctgaacccatcacccaacacagagggtcggaataaacatccctgcatgtgtgtgcttgaaactgcacacgccgaagtcatctccctcttccttgtcaattcctcccctttggctcctgttaccaccaccctgca

SEQ ID NO: 1812 - DNA, 990 bp, Homo sapiens
atggggaagattgatgtggacaagatcctctttttcaatcaagaaatcaggctgtggcagcttataatggcaacccctgaagaaaacagcaatccccatgacagagcaacaccccagctgccagcacagctgcaggagcttgagcatcgggtggcccggagacggctgtcccaggcccgccaccgagccaccctggcagcgctcttcaacaacctcaggaagacagtgtactctcagtctgatctcatagcctcaaagtggcaggttctgaataaggcaaagagtcatattccagaactggagcaaaccctggataatttgctgaagctgaaagcatccttcaacctggaagatgggcatgcaagcagcttagaggaggtcaagaaagaatatgccagcatgtattctggaaatgacagttttcctcagaatggttcctccccttggtatctcaacttttacaaacagacgatggaccttctgactggcagcgggatcattaccccgcaggaggcggcgctgcccatcgtctccgcggccatctcccacctgtggcagaacctctcggaggagaggaaggccagcctccggcaggcctgggcgcagaagcaccgcggccctgcgaccctggcggaggcctgccgagagccggcctgtgccgagggcagcgtgaaggacagcggcgtggacagccagggggccagctgctcgctggtctccacgcccgaggagatcctttttgaggatgcctttgatgtggcaagcttcctggacaaaagtgaggttccgagtacatctagctccagttcagtgcttgccagctgcaacccagaaaacccagaggagaagtttcagctctatatgcagatcatcaacttttttaaaggccttagctgtgcaaacactcaagtaaagcaggaagcatcctttcccgttgatgaagagatgatcatgttgcagtgcacagagacctttgacgatgaagatttg

SEQ ID NO: 1813 - protein, 330 aa, Homo sapiens
MGKIDVDKILFFNQEIRLWQLIMATPEENSNPHDRATPQLPAQLQELEHRVARRRLSQARHRATLAALFNNLRKTVYSQSDLIASKWQVLNKAKSHIPELEQTLDNLLKLKASFNLEDGHASSLEEVKKEYASMYSGNDSFPQNGSSPWYLNFYKQTMDLLTGSGIITPQEAALPIVSAAISHLWQNLSEERKASLRQAWAQKHRGPATLAEACREPACAEGSVKDSGVDSQGASCSLVSTPEEILFEDAFDVASFLDKSEVPSTSSSSSVLASCNPENPEEKFQLYMQIINFFKGLSCANTQVKQEASFPVDEEMIMLQCTETFDDEDL

SEQ ID NO: 1814 - DNA, 175174 bp, Mus musculus
  misc_feature (1)...(175174): n = A, C, G or T/U
attgctgagcagatgaacagaagagggtggtgaagcacggaggtcagcaaggggaacttacaactcccagtttccttcttgctgccacggacatacctgccctaggtccccccccccnnnnnnnnnnnnnnnnnnnnccccccccccccccccgctgtgaatgcagactagtcaccagcgctgactctgtctatggaagtcaggacaattaaaacagtcctccactaagtagaaaatagaggggagaacggagattccaattatttatgtaaaagtgacttgcgatcacgttgctgggaatgaaatttgtttgtgttctgaaaggagatgacacagaaatgatggatgggatacgggggaaaagttcaaatattaaagggaggtgcccaggtatggtggtgcgtgcctaaaataaaataccagtattggcaaattcaagataggcctgaattatataattagaccttatcctaaaataaacaaagttaaatgggcgtgagaggaaaatatgaaggaatttttgagtaaagtaacattcaatgcaaattatgggcaaatacccaaggctgtgcttaatggctgagatcaacacatctctgtgtttctgttttctctgtagtggcgtgctgtaggaaaaaagggaatttgtttgagacttttaaataatatttgatgttattcttattggccttagagtagtaatttgtaaggctctactgtttaatattgacaactttgaaagtcactgaaaaaaattaaatggcaatttaatgttaacagctgcttatggttatcaaatccatcaagacccttcatgaatatattaacacaaacccactaaattactgttgctgtagacagcttggtattttaaaaatgcctggtgagaataaggacactgtgataacagaaagggccctggtctcagctcactgttttgtattgacaaaggcaaagaaacacagacctggtttacttctttcgtgttgcacaatctctgctaagttagctataaagagatctctaggaaatgtattggaaaatattgcttgacctaaattcgtgtttttacttgccacgaataaagaagcgagaataaaagccatgtaacaaaagtaacttctcagcaaaggttagagaaaattcagccaatagttcacactgccatgtttatctgaaacccagtcctgagcttagttaacaaggtggccatgttcttcggtaccttttcactaaatgttgacaggagattgtgcactctatgacatatgtccacagacaccttgcttgcttcacatggggagtcttggagccatcctctggaagaatcatataacctaaactacaaaatattgtctcagttatctttcatctaaagctactttctttgaaggaggcacactgggaattgaacctaggaccccacatttactaggcaagcactctaacactgcgctgcagtccagtcttcagtttttactctttattttagataatagcactacgtccccaggctggtgttaaacttttagtcaatgtaggccatgaacttaccattcttctttctcatctcttaagtacctgaaaaagtgggcttagagctaccaggcctagcttgcagcatagaaaaatataggtgccccaagacatggcttcacaggccaaagtttctcacttaaactcttaatgaattgctagaatgtcagggagtgatgatgatcagagccagcttgagaaaggagggctggagaaatttaaataacacaagcagctctgcaccttaccctttactgaacgatgatgactctccctaactctgctatgaacacaataaaatagaattttcaaggtcagccatcatgtctctcgagcagaaagcagagacttgggtttaaagagttaaagaggaggaaatgttttctgtgtactcgttcatgttcaaactgaccatatggggcagagcaggagtaaaacggttcacacagaggaggactgctcattaagctttagatcatatggaaaaagtattttctctgcatgttcttagtgagccttggggactgagactgatgagtgacagaaggtgacaagggtttcgcttcctctcttctcaggagctccaggtggaagagaacccctgtgcataagactgagtgaattcattttccgtatccagcgataaaatgtacttaaaaaaacaacaaaacaatttgaacccatttgagagggtacagtctatcatggtggtgaaggcctgacagctatagctgcttgaggcagctggttacattgtgttgtcaggaagcagagagcttggggcaaggattcaggatcggctatccctttccagtgcctcctctagggtcctatatctgccaactagatcccatgtccaaaaggttccatgctttagaaaacagtactgccagttgggggactgccatggactggactcagtcggtccttccacccgctgggaaccaggatttcagcaatcgggtggacaagaagtcagcgggatgacaaacagacacggacaccagagagagggttgtatctgaatgtaatttctcaaagcaagcatcaaatttttaatacagaagaaaataaggaagttaggtgacacatcagtcaaggtacactgaagttaccggatgcttaacaactcttacacaaaacagaggaatgcatacataaagcctagcaggaactaggcaataaaacaactgagacaaagtcagctctatctaaggtcagctatagtcttagaatccaggtgtgaggtctttatactcccagggcaagggctttcatgcccaagccatggttctaattagggagttccgctttagctaaccttctcatgaataatgcaatattctagttcctcctcaaatcacagcccaatctattttctaaactattgtaaattcctgtatatgagagtgactcagcttttattctaagtgattgtgtaggggactttcaatattaagtaatgtagtctgccattcataactataataagaattctcaacttactttgttaagcttgccctgagatttctaactctatgtagtagatagtagtgcctgatttctttcactatctctcttacaatactagaggcaattctgaatgtcactgaataggtaacattcttactgaattccaagcccagggttggctcaaggactgcctagggcattggagaaggccaggaagcaaagtttgattttgcttaggtatttggcaagtcattgcttggaggcacctataataaaacaatactgaaagaaagcacatagatccattcactgactaacgcaaggacaatttggagcattcgtgctatgggatgccaaggctccaggagactaagtttccgtgaaactttttgcctcagaactgtgtccaagcttttgggccagccacacagtttttactggagtgggtgtggcagaggcccaaatgttcaaacacacaactctgtagggatctatttaatattcaattcctaacaggggtaagacagtcagcttccaggaagactaaatgtaatcaagaccaaacatttccttactgaaagtaggtttaattgagacttggtttcagagacagttagaagtagaataaaaggttagaattaaatggttaaacaaattggccttacagctaggctggtggtagggctcagttgaaacttagcatgctgaggccttgtgtaggctgctggcgaggtatgtgtgcattgagtctggaaaggaagagagggcttatgattaggtaggaaccaactatctgacagatccagaactagagggagggttctctcatcttatttctaactggcagaatcctaaagatagaatgtcttggagctcaaatccaatccatggaaaactgtttattattcttatattaaaatgaattggtctggacagaaaaggatctgagtacatatgtgtgtgcaaatcagagggacagcatattgagtggatgcgtgtgctgccttgctatcttaataaactatataacccgagtgatacctatggcataggctggaaatgtggtagcacacttgcttggtaagcataggctgtgacctagatctctggcacaaacaactaagacagagaaagtagaacctaaaagctcaatcatgagctagctctatcagaatcttctggttctcactgggttcaatgccacatcttttaggacggataaattcacatgagttccaatggcaatgcaatttttcatgtttactgctatataatgataagttcacatcatacctagaaacttcaaatggaaatacagttaggaaacaaaacttcatttctaaataccctttacacgctactactagatgacttgaaagacaggtttaaaaatttacaagttttaaaagacagttttaatgggttaaacgtagaactaaatatcacctcagttacttcttttgtctaatatatccatcttataagagcacagatctgtcttggttgcttcatctcttggtacttgctctggaaaagaaagctgttacattgatctgtcctggcactcatctatcctgaagaaaaacctatgttgttaagaactgaagccttttcccagtggccaaagaggaacaacgggagcctaccagaagttcatgggtgagttatcttcagtcagatcctcttagctacggtcaaatctgtgaatgactgccatatagcctcctgagagatgttgagccaagatcatgccaatctgcttgtggattcttgaccatcataagtgtgtaacaaaagctgttaactcttattatggaaaaattaaacaacagattttatgcctaaggataatctttcttcataagactacaaaagctagccaaaagtgaaaattggggggggggggagggaaaggtaaattgtgtttggccattgtcttctttccttctaggcacacctacattcttttaaatataggcctgcgggcatgtccttgttcagcactctacatttatcttgaaagtaataaaaaggggattagttttaggtatatatataccaaaaactaaacattatatatacatatatctttgaaatagaggatctatttttttaattggatattttatgtatttacatttcaaatgctatccccttttctggtttcccttccagaacccccaacccctccccctgcccctgcttctataagggtgttcccctacacagtgagtgctgagattaaaggcatgtgccactatcccagcttttttattttattttttcctctccagctttctttagaccaattttctttatactttagtctgccttagaatcacagagagaagctactaaggtgtagagcctaaagtcctaccaaaggaattctgattaaatggaaaacagtatttaatttaatactcctgctttcccaccctggcattcccctacactggggcatccagccttcacaagaccaagaacctctcctcccattgatgccagacaatgccatcctctgctacatatgcagctggagccatgggaccctccatgggtactctttggttggtggtttactccctgggagctctgcggggggggggggtgtctggttggttgatattgctgttcttcctatggggttgcaaaccccttcagctccctcacttctttctctaactcctccactggggtccctgttggggtccaacggttggttgtgagcatctgcctctgtatttgtcaggttctggcaaagcctctcaggagacagctataacagactcctgtcagcaaccacttcttggcatcctcaatagtgtctgggtttggtatctgtatatgggatggatccccaggtggggcagtctctgatggcctttccttcagtctctgcttcatactttgtctcatatttcctttagacaggagccattctgggttaaaaatttggagataagtgggtgccccctcccccagtagggggccttgcctaacctctgaatatggtttctacaggttctctcttccctttgttgggcatttcagctaatctcatccctgttgggtcctgggagcctcttgctttcctggcatctgggacttgctggtggctacccccagttccccatcccccattgcttcacacctctgtttaaattcctgaccctctgtatatcatccctgactccttccatacttgatcctgcccacccccccttttctgcccgtccctcctctcttcctcccaagtccctcttaccctctaccacctgtattttgtttccccttctaagaaggactgaagcatccgaattttggtctttcttcttgagcttcatatggtctgtgaattgtatcttgggtattccaagctttggggataatatctacttaacagtgagtgcataccatgtgtgttcttttgtgactggttatctcactcaggatgatattttctagttctatccatttgcctaagaatttcatgaagtcattgtttttaacagctgagtagtactccattgtgtaaatgtaccacattttctgtatccattcctctgttgaaggacatctaggttgtttccagcttctgactattataaatatggctgatatgaacatagtggagcgtgtgtccttgctatatgttatgtgatctatttttgagaaaaaaaatcaagagctattcctagagtctagtatttttctgtgggatggtatgaaggcctcagtctcttttgggttgagattttaaagtttcatgtattattattatcattatcatcatcatcatcctaatgcaactaaagtatgaaaagtactatttgatttctctactaatttttgctatgaaaacaagagaaacaggaacaatttctttcagcctctctttatttctctttccatcttacaatcaatccagtaactttaataataaacagtagaaatcatggcatatacaaaacattgcctaagcgaatacatcatgagcctgtgtctcagaatggtttgctagaggaagtgtgtttcattaaaaaagtccattttctggtattgcctttttgatttggactcctagatgctctacatttaaggcaatcttaatatttttttgtctcttgctaacaagagtgatctgtcataatgagcagagcagacactgcccatttgatctactcgagagagctgtctatttgatacagagcaaatcacctcaattcctttgtggaatgaatggagtacaaataaaaaagacagaagaataaaaataaatgtagtcagttctttctgaaggcaacaaagtattgaaacatttagagcctcttaataaaacatgtgagaagacagaacattctgtaggacaagactaaaggaagggataatccttcctaacacagactgcctatgcaatagtttcttatttagaaaagtggattagcttgtagtttattaacagttcttaattctttcaagtcggaagaatgaaattcatttttaactccacaagagagaattctaattttcagcactcttttttttttctaataacttatcacattgctcatctgggtagggactttggattccattttgattaaacagacactttggagatgtcttttttgttatcattatgcatgttttacttattaagcttttgtttttgctgttttgtaagatataggtacctatagatttcaattttcctttttaaaatcaatgttttatatcatctctttgagaatgacataaatgtcatagtacaatctgaaaaacacaggtatgtactcacttggtactgctaactgtacatgctaagcacatgctctgatgctctgtgctgtcccccagccctgacactttttgatgaaatattaatagaactattttattctagttgaagatgacacttattacaaattttactttgttaagagttaggaaacagtagtaatatagttctcaaaaccaaaattaaattaaatgctgttttccatttaatccgaatttctttggtaggactttaggctccacattttagtagcttctctctgtgattctaaggccgactaaagtataaagaacattggtctaaagaaagctggaggggaaaaaaaagctgggatagtggcacatgcctttaatctcagcactcattgaggtaaaagcaggtggtgctctgtgagttcaaggacagcctggtctagtgagttctaagacagagagaccctgtcttgaaaacaaaacaataaatagataaatggagaagaagaggaagaggaagagggggagagggagaagaacaagaagaagaaggaggaggagaaagctgcagggtacatgtgttggcatttagtctaggctccgcctcacagttagctggcaacagtcaggtgtgcctgactcactataaaaggggctgcttgccccccttctctctccctctctctcttgctcccttctgaattccaccacaggaaagannnnnnnnnnnnnnnnnnnnnnnnnnnnnnnnnnnnnnnnnnnnnnnnnnnnnnnnnnnnnnnnnnnnnnnnnnnnnnnnncccctctcctctcctctcctctcctctcctctcctctcctttcctctcctgtcttctcccctcctctccccctctctctgcttttctctgtctccactcaattcccctccccatgcccaaaatattctatactatactttcctgtgctggtatctcagcatgtctcacagagacacccccttcccccacaccatactgtgcctcctacaaacatactcctgattggagctttgacacaacattctgagcacaacttaggagaaataagaacaaacaaaccactgtttgtttctaccaatgtaggtaggtgatattcagatgtcattttgaaaatgatgtgcctggcaaaggaaagtggaaggtgcaacttgatgtgtatcattagccacctttccaagcatatttttaactaaatacacactttacattcaaaatgttttcccttgtcagttcctctctgaagactcgtatcatcctcttttgtatttaagtagctctggtagcgtcatctacatgacaaatatgtctacacagtaggttttaatggattgtaaaggttgatggcacttgaatgtaattatcatttctacacacacacacacacacacacaccacccattttaaagactaaaggacccagaactttttggattttaagtgtaaacgtgtaatattgaaagactcaacctttgctgactagattgaagtaaattttatattttccctgttctaaccactatttgcaattaaaaaatacttagagcgggcaacggtacaggtggctttctggcacatttcaggtgcctgaccctaaaaggatattatctagaactaattccgtcagagcgagagaaatcaaccacaccaagaataagtaggaaagtaatgtcagcgccaatcagaacgctccgccgttttaggactaagactctcaggaaggattggcggaaaatgggactccgttaccttcatctagtgggacaaagaaagccatgctagttggggggtaatggtagaaacttcttggtgggttaccagacgggggtttaaaccttggtggaaaagaccagtatttagatgaccccttaaagggaaagtgcgtaagccttgcggaggctttattttccggaatcctggagaaagagaggtgtggctgacataccagtaacgaaaatggcgcggacgagcttcaagggccggtcaggtgacacagctccaattcgctcccttccttcggaggcctcgcctcctgctcgcttccgcgtatgggcgtggccttcccggctgtgtgtgggcgtggtctacccggaggcgctttcttcggacagtcagaaagcaaggtctacgcaagcgcagtcaggttttaaggccggtctccccgccccttcacccatagccccgcccaattctcccgggcggggagggggcagggcccggcgtccagcgaccgctggctggagagctagtgacttccttgttggcagtctcggacgggccgtgtccggagtcgtagcctctcggtgcttactcggaccgctattgcgagtctaggtccaagccattatcatgcccaaccccagctgtacctcttctcccggccctctccctgaggaaattaggaacctgttggcaggtaaagagcgggaagggggcggtgacgctaggggcgggggcgcggggacggcgagccgacagggacagaagcgcttagccctcaccctatgcggacggtggggggcgggccgtatagggggactgggatgtcgggactagaagggagtgggcgtgtatgctgaaatgtgctgatcctccctggacagccggacagttatgcgtttcatgaagaccggaatgtgagggcgggagatggacagcaaatgttgatgaatgcatgtttgagaactgcgaaagcagaagtccaagcactaggtcctgcctgggtggcctggccagtaaggatgcaggtgcatctgcagggccgcaggtgttgggagttaggaggccaaaaggcactatttccaaccccacccccattttcttgaacagtcaggccaaacatgtttatagttttgaagggtgcccgattttcaaatagccactatttctaaagcctcagtaactattaaaagtgaaaaaggaaggctgtgttaaaactcctacttcctgtatcatgtgatcaaggaacttcatctttgcaacctcatcttcccctttttggttttacattcccatttataggaacttacttgtaggagttgaaatgcggttcctcagttcctcagttaggtcagtaatgtctggaggtgtgtagttccactaagcatcaagaaaagctcgatagttctgcacaaaataaaaaatacatctttttagagtatcacaagtctcacctatcctgatggtcttagataccaccatatactttgtcttgtagatgctaacatctggaaatggaataattttagtttggttgtctctaaaacattcctttcaatatagatcatggattaaaaagtttcgcttagatgcctgtgctgttaactgtgtgttttaatcgttaaaaacaatgtcctctaaaaggtacatttgaactagtaagttacagttgcaacagtatgagaccaagcatcatagaataccttgttaagctgttgggttgtttgcattatgtgtggatggagacttgtgtttgtatgaacatgatgcagggtgagggtgtgctatgtcactctgagaaatgcttctcatcattcatggatagcactaagagaaatgatgaaagaactgtcgatgctgatttaaggaaatgttttagtttcttatatgagagcttagaggagtaccagtttggtctcattacagttaacattttatggggtggcgggaggggcaatgcaggaattgcatgtttagaaaaatatcttaataattagatcagaaaaatgttttgttccagaaatgtcatcgtttttaggttgtccatatttgtaattaaaaaaaataacaacccggttttgcttctaaagcttggacccacagtcactcttccaacatcctatgttgtatgactacaacagccgtcacccactgaccctcacagattacagactgttttcgctctctcctgtatcctgtaaagagagcaggattatacatttacctgctaatcctaacttcctgtgtagttctgccatcttttaaattagaggttggactagcataatgtttgaaattagttttttctaaaatacatgagggattagaaacaaatatcaaaataataactttgcagattacaagttagctttacattttattcttaggagatgtttttagctcgtgggtgtgatctatggtaaaggaatagaggaaagtgagctagtcttcatggcttaaaacaacgttaaacaagctttcaaagaaagttgttaagattttttgtgtaattaacatccttagaggctctcagtagtcacttgtcccttgaatcttctggggaggcaggatgacggcaagtccatcactcaggtgttcttgggagaaagtgcatggtacaatttagaagtataaagttataacaaagtgattgcattgacttggattttagaggtattgctgtcatagctctatggtatatagatataaagatagtgcgttcttttttaaattgaagaagagatatggatcctggtagctgtaagcagtcaaggctcttaaaatgcatggcacagtgtgaattagttagaaaccaacctttacaggagtttcaagtcctttgcttttacaagaaagaaaataatctcactttatgtttcctatgctcgtcatgtaaatcatcagatgccacacaagtgtttgctgagataggtgctcaaatttatggttttttgtaatcatgatttttctttgtcattgtttggctttttgattacagtagcttttcactaccatttcaatatttgtcctcttttcatgcctttcctttaaaaaagtaactgaatggaaatgcaaaaataaagttactactcccaactcttagttagtaatatccttgaaagaatgacagtataatagtttgaacagttatattttttatggaatcaatgtactaaaaattaaatgcctttatttttttaaaaaataaatgttaaattattcctttttagtacagtttatataaaattttgttgaatcaacctttgacaccccccactctcaaacaatgaaagaacaggtttatcctggataattcaaaccaaaggatagccccaagccttggccatttaatcttaccttatacccaaatattttgactagaactaatagcaagcatggccttgatttatgtgggcgctcctctggcaggcagaaggtgaacagccctgggagtgctgcctgctgcctgcagcgcttgctggtctaatcaccctggaaggacggggctgctaggagttcgcaatcagatatttgcactcattttcatccattcatatcatatcaacagattttaagcgggaagtgttacctttttaataaattagaaaatgaaaccactgttagaagaaaataaccgttggggcactgaaaaattaaaaccaaattgaacaagccataagaaagtgactatatggttttagcaaggtgaccttgagatttgttcagatggcagttttggttagaaatattgccttttccccctactggggatttccaggacattttttttttttttcctttcacctccttcacacagtgtaatagatcacactgtttggggcatttgataaagaatgcaattcagttgaaaccaaggtagggtttttcaatgccaagtgcactatggcttgtttctcacctttccaattcctgtttataatttggtcaccactttagctttattttccttgtaagaattatttatggtatatctggtgttcatagcttcctcctggagccctggctgagtatgcaaagggaagagtgccacctactgagtcaccagtagccaccttcttctaagtacctggattatcacagagccaggacaagcctccctattttggcagcagcaactaatgaggatcaagtcgataagagaacattgggtctggaagtgagatcaacctacggcacctctaagagccttccttctacaaatacggatatgcatttgcaaatcaagggtccagatgttatagagattttgtctgggtcaaatagtatctgtaaatgaagaagtagcattaggaaaattacttatctatttacttaagggtaaaacaccttcttttcttgttgggggctatgttagcatggctttccagtgaaagtatttttccttggattactaagtaaggctcttgaaagtatgtgcattttaaattgttaatgtaatcttaatcagcattagtttctttcaaaacatctaactgtactaaaaaatgaactttccgactatgtttatctctgctgattctcgccttgaagtgcttgtagagagaaggtaaggacacaagaggagggaaaggctctggtggtttgaaacacagttcagttgttgcccataaattgaatattaagtgtcatatatgggtgataaaagtggcacaggctaggttttatatcctcattatttatttagtttgtccttttcaattaaagccaagtctatctttttcatcctactgagcttacgtttctcttccaatcacactctgaacacattacattaggtgctacccagtggtgggtgggaatagtgtaaatctcagacgctgtgttactcactgtggtttctttgaagtgtgtggtgaaaagattttgattagataaacctaaagagggtgaaagatggccaggcttctctttcaacagcccagccttttatcataataaaccatttagcttgtatcgccagttttgagaattttgtagcagactggattataaaactcagatttgcttcaccccttgcactcggtgatctgtgcttcttcatgtctcttgtcatgtttaaaagtccacagttcagcagtaacatgcgaaagtgcaaggtaattcaggggaaggcattggctagaacaatcaataaattttcaattagccagtttccaactttgggtgttttgctccattgatctgcatgtgcccggctgaattgatttttatattttcctcagtagctgtttggtcagaccattcattccctgttttaacagaaagtgtgattctgttctgatggcagctgaaagtgtaggctttaagttaacacattaagttggggtgactgacagctcattgaacaaagtaaaatctggttcccaccataaagtagggagacatgtggggttaaatagtaaagccatctgggggaccagggttggtctttacagttattttattgatgtgagactcagcaaacggtggctccccccagccagttcttgctttctcctttaggcagattcaggtcagcacagaggtgtgtgtgtgtgttaggtagagagaagagggaggttgccttgttctcacctccaggctgcaggtcttctaggctgttccagagtaggggtttgtgaggacaggtgctgaattctgactgcctcgtggaggagtttatcattggaagacttttgttcctgtacctttttactgttggattaccatggaagatggttttaaaaaaaagtgtgtgtgagtgtgtgtgtgtgtgagtgtgtgtgtgtgtgagtgtgatacttgtcctcactcagtctaaaggaaggcagggtggcagtttttctaggggttcacgtgtataaagaaaaagaaaacagaaaggagactcagtgggcagggtgtttaagtgctcacttctcaggggtcagttgtctgctgagtgattctctgatgtagctgcacaaggattgctgggctctcagaacacgtcatcttttcattgtgttttcagaccttaacatttatggacaaagcagttgtaaatctgatctgtcagctgccttgccccagacttttacagctgttcccactggatggcttactcttgacaaagttaaggtgtaacaggagcaaaaacttaccaccccgtttactgtgaccgagataactttttcctgtggctaccttgcagttgatgcccatgggagtggaggtgatgcttccgttagatgcaggctgtgtgacctgcggcctttgatggtgccccatcggtcttttgcgttggtggcaccctcttttccaggccttattggcataagcccagtagccgcctcccacccctcaatcccgctctttcgtggctggcgcccgtgggtaaaataaaacctctctttcggagaaaaagggagtctcagtccctgggcttaggggccagcctgcgcaggctgaccttttcctgtagtcaaattaccagttccccggaattacagaaaggagtcagggaaatctacatatgaacaggaggacacgacctctaaaggaaggtaaaaaagggccatggcggcttgctagctcaccgcggcaggctatttcaccatttgcagggctatttagagcacaataaaaagcttcaaatctcttttccaaccagccagaggagcgcttgatttacccaagagttttattgctgccttttgaaatattactctggctttgaggtacaaagccacagatccagccccatttgtctagcgtggctgtcccaaactcagctgctctgtgcccagctctctgttcccagctacgtggacaagagccggaggtttaaggcaggctggatttgggctggtttctggggggcaaggctggggcaccccaggacagcctggtccgtgatccctgttccagggctggcaaaagcgccagggagaaaagtcggcaagctgcgcagtaccgctattgctgccagcgcaggctggcgtacttcatccgttagatctgactcactgtatattttaagacttcaaaagcttaaataccaaccaagtctattggcaaccaacaatccagattattgcagcttttcccagctaaaattctcgttaaacaccacccccagcaaagcagtttgttccctgtatccttctggagaattatcgagaaagccaatgtttggaaaactcgtcctaacagtaaagcattttctaggaaaaagcttgggaataaatatattaaacgtgtcgctttaaaagtatagaccttttccatacctaggcctccccttgagaaattcgggtttttcctgcactttttcaaaaaaacgttttctcaaaatagagggatggggtcccattttccagacacattgggtaggcttttaggaaacagcaagttgaacatgcagcgtctttgtggtggttttctgagtttttataaaactgaaatgaccttttaaagaaataactcgtgggcagtaatttgttctgttattgcttacggagatagaaaatagatcctgtttgtttaaactgggattgcataatgaaaatgtaaaataggcaattaaatactcgtggaagagggaattaaagacaaacattgaatgaaaataacattaagccgactgttcaccagtctatgtgtctgtgagtcttgcaagtatagggtgggttggggagggctcgctgcagtagcctgctacttcttgtccacttttaaaaagttactgtatggatggatactagggaagccaatgatctctttcagctacagtcggcttgtccagaggtggcctgctcctactcctgtgggtagaagctgctgcttcaagttttactcttttgaacccacatgagaatttgtcccaggtctgctgacctctgcctctgcctctgcctctttcctccatattttaggggccacagaaggaaagaggagccaggacattttgctttcatttcgtttgatacttacttttaacatatacttgctgttaagagattgtttcatgttttaatcttattttttccttgtattattggcttagcaaaaaaatatgcgtttattgtgagtctgtaacagcttcatccatgttcctcattggagcaaaatactttctataatcaggaatttaaaattgattagattctaggttatatagtaggttttaaatggttaaatatgaatacaattgagattattgcactttttagtacttatgtgtaatattacattttgatctttttatcactgtaagttaggagacaaagtcgttagggaaaaagaaagtaagtcacacatctttctggtgtgggctgtgggtgatttgtctaacattttaatgtaattctctaagagatattttaaagtgagccatgaaattctgaaaataaaatatgtgtcagtaagctatccaatattttatgaacaataataatggatgtctaggagtcaaagcagcaaagacttcgtggaactttataggagaggagtcagccaacacaatatttaggagtttactgaaatttcagaagaggctgtgggaaatgttatacaaagctatatttggactctgtattttttcatagtagaagaacccatttttctcacttctctattcaactatggtattccaggtagctaagagcagggtgggaagcaaaggacaactgggtgtcttctcacttgagggtagccagcatgggtggggcaggtagcaaggaggaggatagtttttgagaatcttgattaggaaaaaaaggggattaattttttcttctaagcattagatattatgtgttcctgaaaatagatgatactggggaaagcaaagtgctatcagaggcttttagcttatctttataaaatgctgtgactggttcttagggcaacttaaaaaataattataaagcgacagtagcacgcgcataaaagctttccgcttgctttgcagaagagaatttgtgttatgggtcatggtagtttattaaaacttgtgtgtttcttcctagtttaatgatgtcaaacatccgaatagcatgtgctgtgctaagcatgcgtacaatatacagattttatttagctaagtggtgaactgatttgtccaacttagttttttaactgtacttcaactgctatgctttggactgataaataactaccatagattgcacagatattaacacttaagtgtagaaacaatcactgacctatttgtcttcacacagaaaggttcttttctataatttgtatactgtttttatatttcatggtttagatgttgaaacatttgtggcagacacactgaaaggagaaaatttatccaagaaagccaaggaaaagagagaatctctcattaagaagataaaagatgtaaagtctgtgtaagtcatttgccttttattactacttggaaataactctgtaattaatgtttattatggagttaagttttgtgttctggtttattaatgttaagtacttttaaaggacagaatatatttccactataatattttcaaatgtagataatcctttttgttgattattatatatttttttctaagtatgctagcaaaatgctaagcatttattttgaacatctgaggacatatttggaaattttaatatctatgtggaaaataccccagactttgaaaaagaaaatcctttaaatgtttagtgcattgattaagtaaacaaataaattaataaagataataaagatatgttctattattaggtcttgataaaaattctttttttacatacttaattgtatgtattatgactctgtaagcctttaggaattgtcatttcaggacagaaaatgtttttttttctagatgtatgtttgtaatacagagtttggatttgaaatattgttactaattagaccttgccttgatttttctttatttttgcagctatcttcaggaatttcaagacaaaggtaaatttcaaatcttaaataattttctttggtggagattttgaaaagggtagtctcaccgttctgaaattttatagttggaatcaaaattttaagttccatggtatgtgtttagaccttcaagatgagagtgctagctccccctgctgagaggaatattgagaaacggatctagaattctctgtgtagaatcctagtcttaggtcctgtttgttagcggtaggaatcgaagtacaggcatgcccttacagctccgccagggctcagctgaccccagcgagctgtcacctcttgccctctcacacaacagggattgtcttacggggtgcaggtgctttgggattttgtggcattggagatggaacacaggattgtcacgtgctaagcaagacactcccatgagctataggtcatgattttaaaggatgggtaaaaactggtacgaattttatttgacaggataaataaatgccaatctttattttggttcttttgtttggaataaatgtgtattttagacgttgttagagatgggcatttggtttcattgtttttgaggtatgcggtagtgctggcgagctgacagatttcctttagacttgagacacttgctcagcactggagcttccaggttcttcacagtttgagtcctttgagaggacctgcacactgtccttctctctaaggtgctaattcactctcatggccttcagcttgtgaaggttagtatgacgataacaacgtgaggtcccctaatctgtggaactagtttctaagtctggacaagaaaatagtgtggcaccttctaactgggtcctaacattaatcccccgtctgagctgtcagcagtgagaggccagccacagcttttaggacaccaagttcttagccccacacagcctcagtttcaaggcagttaacagtttctttcacagtcccttgtcaggatcggtgtgatccaagtgagctaagagaagctttgccatactaaaatgcagacaagagcaggcaaagtctcctccttcctagtccttgcagttgtgtgcctcagggagtcttaaacttggccttaatcctattgcatttacctaggtgaatgcacaaatgggcttatacattttgatgatgattttttaaaaatataatacattatttgtgaggaaataatagataccaggtcttacctcttcttaaaaggcgtatattgttgcactgagtatttgctgaactctcattgtggcttaattatttggacattaaacaattttaagctaagaaggcatggtaatgggaagccattgtataattgcaagctttccctttgggattctgttttagaacttgttcaggtgtgtggatattaaaattacattactgagatacattctttgtctccaaagagtatggaagtttatacagtatttgatagaaattgaaaaatgagcttagaataagagttcaaataatgtggaattcagagatttccccataatcatttgcctctgaataagtcatttgcagctcaatactgctgaattgagttaactaatcactgagagcgcctgcacaaagtaagcctgtggataaattagatgtataccttggagaaatatgagaagctgagtaattttatgccatcacaccctcacaatatatttagttttgttctaaaaagactattttctagcctattaggactagtaaaggacacagatttaatggttgcaaagtggttacccagcatgcatcttttttcaaaagatctctactctgtgagcatagattccccattgagttttgtcaagttgtaactttagaataatcatcagttgtttatctaaatgccttcatttttagtaaaaaaaggatttgaatttagacagaaaacagtgagcttggtatagtccctgttattcattagaaacactgcctcttcataaggtccccgtgactctggaactcttgagcaagatgggtaactaatgctactatcatagttgcaatatatcctgacactgtcgggtgctctcctgaaccctaaccctgtaggctccaggtctttgtgtactggaattatgttatatgataaaaaaaattttttttgagacagcatccctttttgtattctaggccagcctctagctcaggatttttctgcctctgcctcccaagagctgggatcatggatgtacaccatcctacccataatacataattattttataattgttctctgtcacagttctcttaaagtgacttaaaatagttatttttgcagttaccacattactatttttgtaaagactattattaatcattagctagagttttctaatacatattaggcttaccacaaagagttaaatttttaccttgtattagtgttagtactgatttaggtattgcttcctttatagatttatcagaagaaggtaacgtaacacatagtagatattcagtaagtccttctcagtgtatttctctattgtgactttattgttcaagaggattgaagttagtcttgattcagaagttcagttttgaaagaagtttttagaaatgtctaagtcatttaaaaagtaggtattaaatggtacaccatttcaagagaataagtttcaaatttgtagttattggaatctagatttttttttatccccctgcctttggctcttcctgtgctgggccagcatagacatgtactctggccgagcccttgcgctgggccagcatctagtttttaaatgggattgctttagatgcagcagctttggtccctttccctctaactgtgaaaaacaattaatagatttttgtccttacaactctatcagtattgttaaatatgcacagatttatttagaaagcaatttcctttgaccttctcgtttgtattatctaagcttattagtgggccactttgtaaaaatagcaagactgttaggtaagaggggatatattttagtttgtcctagtggagtcttcagactaatggaagagtcagtctttgggtttaatttcctaacatagtatattctcaattgaaacttaactccataatgaaatctgagcaaattaaactcaaggagttccatttcgcccctcctgtctccctccctccctccctccccatgcttgtacaagggtgttaaagcatgtttgagataatggggccggtaatggtaggagcctgtttccaaggtagtcccggagaaatgatgcccttattttgaatctctgcctcagtttggtgtgagttatgtttattgtttgttggctctaagttggccttctaagaatgagaggaaaatcttacttgtgtcattcagtgttttaggaactaagcttcctttaagaaattacagagtaaatgcatgaatttatatgtttattatgtattagtactggagaaatcagattggtcaaatgaacagatttagaaattaatttgttctcacttggagttatctctccaaattttgtcctcgatgctctgtgtgaaggaacaattattctctaaataatatgttagttataattttctttaagttaacagttatacaaatttatgaagtacaagtaacatttcaatatgtatacaaattagactgtaaattataggtatatttggctgattatctgattatgtttaaaatcggactttatttaacaaaataagcaacaaattgggcagaatgcctgcagtggtggtggagctcatgcctgcgctgtcactgttggctgcatctctaggcatttaggaaaatggtaattgattataagccctgtgaaaaggggtggctagcagtattataaatttcaaaatagttaccagggacctgtgctgctgtggtgcgatgaagcctggaaggtgccactaaaacgctgggaaggggagccttggatcattgtcttttagatggttaactttgtatcgttaattaaacttttgaaagttgtgggataaatcaaatgcttttctagggaaacaagaaacagtattaatgagcaacaaccccataattatccttgtgagtacataacagggacacattcatgtcttttctttgcgcaataacttttacaaagaagtatttttaaactgatcattaattttatgaccacagaaatgagatgcaaaatttatgctgttgtcattggcacaggctcaaggcaccatggacattatgtgtgattgtaatagaatgactgccaactaatgactctgcagacattacatttgagcatgcttttcttttagatgtctgattagtctgtaatgctttcaattatgtctgtaaattgtattggatacttttacctgatgcccattgttgattcggagttcagtattttattacataaacacacattgaacgtttttcttttaattcatagaatcctttgtaggtatagctatagatacttagccctggggaggaaagatgctgtgtgctactcaacagcgacccctgtgttcagttaaagatcctcagaggagaacagcttatcctctttattggttgaggaaatggttggaaaacaaactcagaggagggtaaagggatggatcatcagtgcagtaaagccatgctgaaaagtagtgtttttcaatataatgcacttttaaaaagataggtttcccgcacagatgctgtgtagattcccgtacatttagagcagttcttgggatcagagaggggtggcaggaggtggtgtgcgggccggtagtaaacagtcctgtagcagtatgtaatttagcttgtctttggtaaatacaaatatcacaccaattttaaaaatccatcctttcaatcaatttcagtttttataataggtaaattgaagacaatttaattttaatagtaacataaaagtatatattaaaaaaaacaaaactagagaagtcttcaacatgtcagtgacagatttttataggatatattttcttatattaaatgtttttgatgttacagtgtttataatctttgttatatatatcatatacattgaatatagattggtatatgagtccatgtgtgtaagatcacatacattaaaatagacaatagccttatcaaaagtttaactattgattttcaaaactctaaaaaaagttttaattcatctgttcattcccatgtagcgtgtgaggattaagcctgactgtccagattccattctgttcattagctttagtggttttgtagttatagtagctaacatactgaatgctaagtcctggaaatgtacataaagtgtcctgataccttaaaactttagcaaggtttattgtctagtgtgtaatatgaagagtccttagagaatcaatattataacaattcttacttcattaaaaataggtcacagcgggcgtggtggcgcacgcctttaatcccagcactagggaggcagaggcaggctgatttctgagttcaaggccagcctggtctacaaagtgagttcgaggatagccagggctacacagaaaaaccctgtctcgaaaacaaacaaacaaacaaacaaacaaacagaaataggccaggcaactaaaagtaactgagaattttgtgatctttattttacattccatgtacaatcaatcatgttcagaatatttcaaaagtatttttcgaggctccttttaaaatcaaaactttatgtataagagagacattctaatgtcctggaaagtactttgaatgtcttgagaaagatgagttctaaagaggtggcagcatctatatgcagtccttggaattttgattgcaaacatattaccatatttagtgcatcagtgacagaattgccaaggatgatgagataggtgtctgtcttcatgaggatgtcaccatctttacagttttgagggtaagggtgatggttatacacgaaatagcaaaatcataaagaaatagaaattaacatttaattttaaattatgtaggcaatattatcttgaaagaggcagcctctattaataatgtttagaaaaataagaagaagccatcagatggatgccaaaggatgtacatgtccctttaccaaacatccttcaactgatagcagataatttaaactgttaccagttagtatactattaagcatatgtttttctacactgttgaattcataagaaaaataaatgtataactgagcttagcaaatagctaattcatttaaaaaatattttagtcaagtacatgggaaaataccccaaagctcttatcatggggattaaatatgtaaagcaaacacattaaaaaaaaaaaaaaaaagccctaacaaagcatccgaggatttgagaatcaagtaggaaacaggctctcacatgaaaccagtgattgaaaccactgtgtgaaaacgggaaaggtttgtaggttattgtgtttgaatttagagggattatatgactcttaaagcattttatgcttaatgaattcctgcttttgaaaatgtaactccttttatcaaacataatcctatgacttttaatggaaactgtattcctgggcttttcctagtcagcccctcattacaggtttcagacgactgcataagtaaggggagtacctgaattattttctcagttgctctttccacttttcagttcttgttattctcattatcttattggtcttgcttagttttttttttttttaacttctagaaaccttggtcttgggactaaattcttttgggtcataagtaagcagttgtctgatgacctttaaaagtatttactaagtcatttatattacaactcatatagaataatgtcagacgtggttttacttagttaaataggtttgtgtgtgtgtgtgtgtgtgtgtgtgtgtgtgtgtgtgtgtgtgtgttctgttgcagtggtggaatttaatggtcaaactgacctcgtatggcaggctatccctatttccagtgggcagatcataggaggcttttttctgcttcctttacaggtgatgctgaggacggcgatgaatatgacgatccctttgctgggcctgcagacacgatttccttagcctcagagcgctacgataaagatgatgatggcccctctgatggtatgtgacatcctctcctagaatatacctcttggaaatgtcatacagatctgccgcatgtcgagggagtgggcttaacaggaagcagaaagtgtggaattgggggacctcagctttaacagaaccttttctgaagctcgctctctctctctctctctctctctctgtggtcctagggcggcttcttgaatgtgtagatgctgccttggtaaagagaacccttttgactagaatctttcggcaagtgctggtactattacaggaagggttttagtaacagtttgttggttcatttaacatgatcatagtcttgcttaatatttgattgtgttccttaatgtttttttgtattatttagtgtatgagtaatgaacaagagatttggtatattttttcttaaaacttaatacaaaatgagttcataaaatattaaattaattatttctacattaccttctcatattgagacagtttttttcctaatcaaatgcctttttactatacattttcatttttctgatcaccctttaaccctgccccatattatgcattagtagtacggtgtcttatattaattgaattagtagtagagttgattgtttatattttagtgatttttaaaacttatggtctgttaccagatttatgaatcttatttttaggatgcagcaagtgcctcctttttgatagctagtcaagtgactcggcactccagaaagctcataagagtgatctataggtataaattaagaatgcataccagtgcattagccatgcatattaatttgtgccactcaaagtttcactgagacatagaaatgaaggatgccttttgtcaccatatgataatcagactgtgcagttctgtctctaagtacagttgctgaatgaaaatgtgcttcctgcatcagagcgctccacattccatgttatccagatcattccctttggaaacataaattgcttttatgaggtataaaattatgtctattgcagaacagggataagtcgagtacatgcataagtgataaacattctaaccactgactcagaacaaaacagtctttttttacatccagaactttgtccaatgtgtaacagtgataattgcatccattttgtgttaacttttacatttaatacattttaaagggagggatgttatctgtcttctgtcttatacaaagatgcatgcttcttttcaccagtgcttgccatctatagccaagtaccaccctctctgccctcatagctaccattttataattgaagaaatcgtattttcaggcaaaataataaattattaattaagatgtactgttttaagcctcacttcaatgatttggtttgcttttctgtaaaacgtatgtacgtgtgtgtgtgtatgtatctatacaaatgcacagagacagaacatttatattcaaaagaataaatatacatttactatatcatcaagtcggtttatcaagttctcaaaaatagcacaaatattttgatatgtagaggccattatattattgaatatgaaaaaaacctacaatttaaaaaataatctaacagttaaatatatatgatccagaaatagtctaaagtaaattgttattaaattatagaatatttttatgattatcattttctctcttaagaataaatgattttggtgcctggtgagatggctgctaagcctgaagacccgagtcccatccccaggacttgtggtagaaagagaaaaccaattcccacaagttggtctctgaccttctcatgagtactctggtacatatgtttaccactcccataataaatacatataaacaagttaaaaattttccatgtgttttcaaagtcaaaataaatgcattaataggaaaaaaacgttaaaaggtaattgatggcatggttatgtgtagcactagttttgttaaatatctgtgcttatttattagtgcataaacatttcttgagcagattagatgttctacttttattatgattcattgtgatatattagtaataggattttagcaactttacatattcttggaacatgataggttcattttcatacagtcactggacagtcactgcaacctaacatctcatttgctctttgcagcaaagatttttgtctgtgttctctgtgatttgtggaatataatttcctttcctgttatcagtctaatgatgtgttaattacaaaaatgtatttaacaataactgtagccgcttagcctttgtcaagtcaggttgttgttttgtccttttgacttttaccttgtggcaggcactagcagtatctgaatgttgatggattataaactcgaagcatgataatgtatttttcatagagttaatgtaattttcaaggtattgtaaaggtcaaagctgcacatctctatgaattctaagtctgtctttccctttaatatttctttttctctgttcctctggttcaaaagttcacccagttcccaaatggccacctaattttccagttattccctcaagccatatgtgttttggtttctttatggtttattaggtactgtaggaaagtagcataagttatatcttctaatgaaattcaagcacacttcagtgatgcttcgacttgattgctggtagcaattaaatcacaggcaaggaggataatgcataatctcacaaaggccagacaccctatcgacactgaatggggatgaaaacagaaacaaaaacaacatcttcagaccctgccagacatgttgtttccagcctgcctggtttctgtcttctattctgtcttttgttgttgttgttgctgttggccagctgcctgatggatagcaaaatcataacttgctgcgtgctaacaggcagagttcacgtgtaggttattgagagctgataaagggttagatggagttttgattttcacattggaccctggtacaccagattaatggaatttcaatgagagactagagaagtcaccgctttgtcagagaaacagatggagatcctatagtcacgtctgctcattaatactagttgcgtgaaaggtgctctctcctctatacaaatgagttgatataattgatttttgagtggtacattgaaaaaaaaagcactgtattgatgactggacttgtaacataaatagtgacagatttttgtatagtttgtaacataaaaatgtacttcgtgtttttttttttcctctctctttggcaacactttattcttttagaaaagaaatatatctgagaccagtagctaaaaaaggacatgccacactgaaaaagaacagcaggctaggttttacttataaatgattgcagtcagagctgcagtttgttatggtaactttcaaaagaaagcagattctttctattagcttcatagctttctttttctggaaagtcaaggacacaagttaatgattgttttggtatcattgtagttcactcttaaaatttttatgctaatcgtgtggctggagatactttggtgtgccaatatataatgggtaattcagtatcagataaaattagagataattaggctgaaagcttcaaagataacccttattgaacacacagtgcaatgtttgtgcactggtgtaagccctgtacagttgttgctggtcactagtcacaactgattgtagtagttactagtacattgacttgagtttccactttctacattgaggtcatttttcctttattttcattgtttgtgaaaggagacctctaaccatacgacattgcaatggatctccgaggtgaggtgaaagaattcactggactggaagacatgtattggctcttcttgtcaatgacaggtcgaaggatccctgtggacatttgttacaaatctgagtcagggctagaccataatcacttcgtggatacgaatctggaacctctagggtgagagtgtaggagagctaatgtgagacagaagtaaagagaagtcattatgtgcttcctcctaattagaagtcccagtaaaatatgggacaagcagggcactggcaaaggcgtgtactcatatgcactgagatttgtctgtaagctattccttaaagcttggagaataagaaaaaggctaaactatttggatcataatttttgatatcaatgaacatttttcttcttttttaaatataccttcccttaaaaactccagtatataaaaatttggatttatgaaacatgaacactacttcttccaaaagactacttaaaaaaggatggtctgggccaggaggatggcttagtgggttaaggtactcactgctaaacctaattgtctgaattcagttctagcccacatggtggaagaagacaactgattgctccaagttgttctctgatctcttcacaagtcccatgacacatgtgaatgtgtgtgcatgtatgtacacacacatgcacacccacccacacaaacacacacatacacggagaaatgtaattaaaagaatttaaaatatgctatccaggatgcctataagtaatgagctttcacaggccatctaacacgtcttaggtattagcccacccacatgcacataaactgaatgacactcttgaagaagacttttttttccacatataaaatcagttatagtgctaattttttcttatacaaagtaaagcagtagttgttttacttctttcagggtgtctctagactgtgaaataatgtttgtaaccagaaaagaattctttcaagacagctattcaaatgcttttctgccatagtagcctatgcttttgatacctaaagcttttttattctaagaatttatcgatcaattggggattgaacctaggactttgagtgtggggttagcatctttcatctcctaagaatttaactttcaattttaacatatcctgtgtatgtaatgtacatttatatgtttaaatattttattttagtattctaaattactagcttgtatttttttatccaatgattattttagttatttctatgtatagaacatttttaagtattagtattgggtacatacttttataagacattgttaaatagaggacatgattttgtttaaagattatattatttgtgtaggggtgggatgcatgccatgcatggtgtggaagccaggggacgacttctgggagttctctctctcctatcatgtgggtcctacggattaactctggttattggcattggaggcaaatatctctactcattgagctttctcctctgccctagattagggatagaacacacatagacatgtaatatttttatggtacaaagtatgagtggataaaaacaaagggcaataagaactatctcttcaaagtttcaagatgacatagtgatttagcacgtgccaaacaggcacgaggacaggagtttggatacccacaatccatttaaatgctaggtagatgggtggcctgcctgtaagtccagccttgaaaggaaggcagggatgggatctccagagctagctgacaacaagactggtcctatcagcatcgagctttgggtttgctttagaaattctgccttactggataagatagaagagtgaaggaaggtgactcctgacattagtattatacatacttaggcactctatcaagatgaaaaaaagaaaaagtaatttttctaaggttttatgctatttaatgggaacacatatcaaagtaaaacaaagtaggtgaatgattatagcaaaataggctaagtaagaaaagattgcaaagttagaaagctcagacttaacaaaaatttccatttttaattcaacaaataagcggttatttgcactatacataaagaagggaacatgatgtttggataaggcaatgaagtattcaaagatgaataagatgatgttctttttttttaattagatattttctttatttacatttcaaatgttatcccctttccttccccaccccccgaaaatcccctacctcctcccacctccccctgctcaccaacccacccactcccgcttcctgtccctggcattcccctacactggggcatagaaccttcacaggaccaagggcctttcctcccattgatgaccgactaggccatcctctgctacatatgcagctagagccacaagtcccaccatgtgtactgtttggttggtggtttagtcccagggagctctggggatactggatggttcctcctatggggttggaaatttcttcagttccctgggttctttctctagcttctttattggggaccctgtgctcagtccaatggatgactgtgatcatccacttctgtatttgtcaggcactggcagagcctctccggagacagctatattagactcctgtcagcaagctcttgttggcatccacaatagtgtctgggtttggtggttgtatatgggatggatccccaggtgggtcagtctctggatgaccattccttcagtctctgctccacactttgtctctgtaactccttccatgggtattttgttcccctttctaagaagaatcaaagtctgatgaaatttgtcattgccttagctctagtcacttcaaataaacacaggcattctggaagaacttagattctgtaagcactagcaaagaactataactatctcttctaaagtaactgtagtgttattgtggatatgacaatatgtacaatagttattgtaagtattcagaaagggaagagtattgcaaactggtattagtaggtgcattataggagaacctagagtttggtagaatttagtaaggctagatagatacagttgtaatgagtagaggaagacattttcagataaaccaaggggatgtaggacaagaaggaatcatgcagaaagtgagtgtgttaagaactagtgaaagattgacaggacagagaaagcttggagcagaacaggaggtgagggttgagcagggaggctaaggaacacttggtgctggcttcacatcttttggttttgaagcagagtcactattagtcttgcgtggcctggaactctctatgtgatcagactgacctcaaactcacagagatctgcttgcctctgcctctcgagccacaatgcatggttggcttccggtattgatccacctactaacttagtttggtgaaagatgttaccattatgtattggtttgcacttaaaaagaaatctgttatttcaaattctgagtcaggggaagagttggttctataaaccaagtaacatttacatttttgccaagagaatatgataaagaatggtattgtagacatattactagttataactgctttattgaaatgtatttaatgtagccacaagatctggccacttaaagttcataacccagcattctttcattcagttacagagttgagtaaatattttcccagtaattttggaatctcttcatcaccacagaaggaaacgctgtgccatgagtggtcactgcccattctcccccaagcctgtcttctccttccctgacttgggcctagttagaatgaatgaatgtgctctctgtctgtgcagttttctaatgtgaagaattctgatgagtgttgtgtaacacgtggcttcctttccttaacatttcagggttcatctctgttgtggcatgtgtcagttattcactctgtttttttgaccctgaaatacatcactgtgtgtgtacgactgctgttcattcaccagctagtggatgtctaaatcattttctcttctctgctattatgaatagcacttctatgaatagctgaatgatcttctgtatgaatgtgtgcttgtatttctttgaggatataaagtgactcatatatgtaaatttatggtttttttaaaattgccagactttttccaaatgactctgcaacttcatgtgtatcctggtagtgtatgagactctactttttcagcagactgctctacccttattaatatattttttgtttgttcgtttttttgagacaggatttctctacatcattctggctatcctggaactcacttggtagactaggctggcctcagattcacagtgacccaactctatctgccttcagagctctaggattaaaggagtgggatactacacctgcccaatatcttttttgatctagagatcttaatggaaagaaagtactatgtcattgtagtttggtttgcttttttttttttttttttttctctagtgactgctgatgtaaatcagctttcatgtgtttgttgaccatttatgtgtctttgctgaaggctgtctttggctgtcctggaactcactctgtagaccaggctggcttcgaactcacagggattcacttgtttctgcctcccaagtgctgggattaaaggcatgcaccactactgcctggctaaaaatttgaagtttttatgaagtttaatttatttttcctcagtatatgtgattttattgtcacatctaagaaatataataggtttttagtgtgttattttctcatttttttttaacttaaggctaaagtgatttatcaaaacactggtttctcctaccgtaggagactgtgggattataaaccaagcggaagggacacagtgtagtctgccttcagtccagttatagccctgtgcatgtttaacagttgggcatatagcaaggggtaattttcttgctgtcttttcagttcagggaagtctcaaatttcatacctttttaacatcatttaataaacaactcctgttttcccatgtggtttacatcactgttctcacttctagcattatcatgcttttgacatgtcaaagcaacagtgtttgctgcattgcgtgtaaaaatacaaggctcttctgggtttacatggacacattatttctgagaacaggtagtctagattatttggcaaactttctgactttcctgggcaaggctctgccggtgcttcattacagaagcgtgctggggttataattttgaaaagttgttgctgcctttaggttttataaaagagagtgagtctgactttttgcattgacctcttcacccttgtaaggctatggaggtgtcatcagttaccaagctgagcagtcttgtcaggtacgggagccagtgtacagaaacagcttgtcacgcgtctgagcaccactgttcagtgtgctctaaagactgggcctgatgtggtctgctgctgatctgcatgtgacagtctcgctctaaaaacccagagaaagcacatagacgcattagcagcaatttgacattcttgttttatccaagttcataatcaccctttcccttagtaaccaatgttttacaaagctattagttagtgatgtgttagggaaggaggttgggaaatgaagctcagagagaatcgtcacaagaacactgactattacctcactatagagaatcgtcacaagaacaccgactattacctcactatagagaatcgtcacaagaacaccgactattacctcactatagagaatcgtcacaagaacaccaactattacctcactatagagaatcgtcacaagaacaccgactattacctcactatagagaatcgtcacaagaacaccgactattacctcactatagagaatcgtcacaagaacaccgactattacctcactatagagaatcgtcacaagaacactgactattacctcactatagagaatcgtcacaagaacaccggatattacctcactatagagaatcgtcacaagaacaccgactattacctcactatagagaatcgtcacaagaacaccggatattacctcactatagagaattgtctcaagaacactgaatattaccttactattttcttttttgagtcctgtatcttttcctttgtattctttcatagtcataatttaatgccaatttaaatatgaagttgggtctgctgtggagaaactttagggattgtaatttcacatttattgtgaaattacatatcacatatatattcagtttccaaatttataattagatatttaattatatttttatatgaaagccaagggatggggactctcaaagcttttcatttgtaacgtctagagaaaaagatgatgtaatttggttgttatctagttctttttcatgcctaaaacaaagcataaagcataaaccaaagcatcatgcttaacaatggtcagaaaagtaatgtcctctcagtgcggtgatcttgcttcagctggtatgactgtctctagaagcagctccttactttctaatgccatttgtgagtggttctcttttgaacctgttcatcactttcttaacactaacagaggttaataaaaacaatattttaatatcaagagtagtaatgttttaccatggggaaacgaaattcacatacatttcttttgttgaataggacttgttttggtattgctaccctgggacctatctcctggaatatatgtatgttgcaagcctctagtatgcttcaaatagttcttttcgaaaagaaaatacgccttagaggagataaggagtttatcttttaaaatctagatggtaagaaaaggtaacactattgcatattttaggcagagtgctaagtggactaaaagtttaagtcagtagattctactgttaggggaggctgcagaggatgagttgattaataagatacgccatggtctttgaagactttacaggttagtagattaactgtaattcaaggcaagttggaatagttactactacaagaaacatagaaggaagaaaataataattctgattggagtgaaagcagacttacagatggcatctgagccaggtctgggaggaggagatggtggtgtatgggttgtggagatagtaaacagcctagaaaaggggtaaactggttaggactatgagagctcaaatcatttaggcaaacacacaagtgattgtgcttcattttatccacgagagaggatacagctggcatctcgcttcatgcctacttgggtccatgtaggaactccctccaccgtggtgagcattctcacgcacatcctgctttcctagaggtaacttcctctaagagactcttcctgtagggtgccgaagcacagattatctgtaccagccaccaacagctcttagatattttctgccagtcccatggaaagagaaacctctcagctgctcctgttgaagtctgtgctttggcttctgtgtgtattttgagtcagtctccatggtgtatatgtatgtgtggaatcgctctaattacccaggacctggtcagtgttctaaatcaactcagctagaacttcatggggacggcaggagttgccattgtcctaaggaaaacggaggtactcttcaggaaagacacagcagttcagggtaggcagaaccaaaaatctgttctaatgtagatgtctgaaagtatagctaaatgcagagtttgtaaaggctgtgcggaaagaagagaacacatggctggggtcgatggtatgcagctctttcatacttaacagtgggtgtgtcaaggtctttagagaatattgttcctaaagcaatggcttaaaatagtgatgcatgaaaaaatttaaagttatttatatagggagttgctggaggcaaaaaattaaaagtaagggtaatggtctagactagctagttttgcttctgtatgtgtatgtatgtatgtcttgccctgctgcagattcagacaaaggcctcaaaagcatggaacaagtgctctgccaagctcctccctggccctgaccttttaaatgaaaccttcaaacctttgtgagggtcagctttcagcttagtaatatttgtttgcttttggtttagcttttcattttgtatcacagtactagtctataatatcggtgttcagaggctgaagcaggagggttgctcaaagttcaaggccagtcagggctatatgatctaggccctgtttcaacaaaacagaacaggaactgaactgaactgctgtttggctatattgctcttcctagcgttctgtggtgggaaacattaaataggtaaacagatcactcttagcttttggcactgacacaaaatgcagaactgtagagattagagataaattaaaatagaattttagactatttgaatttaatttgtcctcagtaggtctgctttttcttctttccccctcctcttcttttcttcctcctcctccttttcctcctcttcttcctcctcttctccttctttggcttagatctattttatatgtgagtgttttacctgctgtgttcaccacatgagtgcacaatgtccactgagcttagaagaaggcatccgatcccctggaactggagcttttgatagttgtgggctgccatgtgggttctgggacctgaccagcctctccgtgagaacaccaagtgaagacccttggctgctgagctgtctccagccccaggactgctttttaccttatttttcccagtttatattgtcttctaaaatcaatggaggcatagaaagatccagagacacatacatacattatgctaatgtgaaagtgaattaggagatgctaggcagagagggtcaggacagcttatgggaggccaggctcagcctctgggtctcccctgcacacctcagggccccagctctgctaggacaggagctacttgtgtggccttgaggttcgtgtgagtaaatgcaaaaccagaaaactgatatagtatattatttttagtgttcctgatataaaaatgaatcaataattcaagagagatatagctcttagtaggactaggatctgatgaaattacttgtaaggaggcttaagaaatggtgccatgtgtaaggcagtcatgaatgctttatagtaggtacaattctaaggtcagtaacacctggggttctgtcttaataggtccattagctcaaatatgaagcagattgggcaggacaagtcattgtatgggaggcaaaatatcatgggttggcttctttaggccgggagacaaatctggtcagttactatttatatatagatgctttaaaaaatggagcatagttatgacatttttacatgctatctctggtcaggtgtcatgttataacagcatcggtaagaatagtcatgctcttcatagtgatattttggtaaatgatagaccatgtatatgatggtatagggtataattgcctagtgacatgatagcttttatataagtattctctctcatgcttacacaatcatggaatggcatcatattgcatttttcctgataatccctccggtaaagccatgcacagtgacagttataacatacaccatatatctcacaatgcttagagcatttcttgtctgatcctgtactgaaaagatttgtaaatccttggcctaggagtccaactctctgatggtttggtttagaggtaagacaatataaagagtgtgtagaacagaagcctcaaattggttaggccatgttataaattcagtttaaaggtatagtatttttggctaaaatcatgatttcatttttgaaaaattttgtacatccactaaaaattcttcttagcaactgcccccccaccatccaccaaccaaccaaccaaccaaaaaacctggtggctctgggttgtattgtatttttctttcatttttgatgtgtcttttgaggtttgtccttcagtgctccatcagctctcagccctccttttcttttctgatccctgagttggacaaacagttgcactgtgcatccttcatctgggttcacatctactgctctttatagtactggatagcagagaaatttggggtgtgctttctgagtactgactggactgtgcttctttgttgctacttagagccagatcatacatctgttctttagccagagaattggaggaagggcggataggctcctgagagaatgaggggcttcccaaggcttgtgccacacagaggaccagcatactttgtgtgagtgacctaagggatttggcctgtaggcagtcttaaattttcctcagaaaagaattctaggtctttctcattagagagacaaatgacacgacgtagcttatgtttatcactgtggctcattagctgttctatttaacaaaagtcataattggttaagttatggccatataaataaagaatgaagatcagccaagaaaatatgagataaagcaaggaaaggtaaggattgtgaggaatgaatcaaaagacaaataataacgggctgggaatatagctccgtgggagagagctttcgaaatatttgtgaggcctaagttcagtttctagcaccttaaccaacacacagaaaaaataaacacaaaatttggtttgtagtgtcggaatattggagatggagaaggaggaggagaaagaaaaagaaagatgggggcttggtgcacttctcagaggcaaagacctgagatgaaggtcattgttcaacttggtgggtagaaaccgaggcgttaagaggcatgggagatacagagaatgacagtgatagacttagtagtgcttggtgttttgttttgttttgttttgttttgttttgttttgttttgttttgttttgtcagcttgacacagactggaatgatctgggaagagagatggcatatggggaaagcctgtaccatacaacctcgggcaagtctgtaggctatttcctggattactgtttgatatgggagagcccagtgcagctggtgctaactctgggcagggcctcagtggtagaagagagcaagccgagcaagccatgctcctctgtggtctctgcctcggttcctgccctgactccccttgactgtgggctgcaacttgcaggttgaagtgaaccctttcctcaccaggttgcttttggtcaccaggttggcattttatcaggacaacagaaagcaaacaaggacagacttgatgactgtgtaggtgatccttagaatcttctcttgaggaagtgatatcttctgcaaagaaaagggtgaagtggaaaacagagatcaggtctgttaaacttgaaggtatactgggaaaactagtccgagttatttgagagcaagacggagatatgggatagagatatggaaaatcactgattgatttgcctaaacatgttggctgtcatgagaaagataagacctgtcagatgttgtagaaagagatggattaaggtgttcagaagagagacatctgccccagcatccctcacaggtaagccaggagacttgctgcctttgtttctaagcatatgatcccaactaacaacattttataatcacacttgatgtgattatagagtcatgggatacattttattttggtagctttggcattcgtttgaatgttggtcagatcttagatatttttcttttccctttgtttttattgtctaattatttttctcttttaatgtaggaatcatgttatagggctgtgttttatcctggcagcttaaataacattaaatcatatttcaagctgcccagatatacttcctagtattcgcatgctgtatttacaagggccttatagaagctaaaccttgtatttcattagttcaaggataaaatatactgttgtggttaagtgtacaaattattataacataaacagcccagtttagtcctggcatgacacgtgactttggaaattttattttctctctatgttttattttcttaatttataaaaatagtggtaattatagtattttataagattacagtaagcataagtgcatggtacataatttgtataggaatatgcaaaatagttcttgtctattataatgttgcaagatggctagggtattgaatgcttaacttgattttcatacatttttttctctggaatttttaatctatgtttgaacatagatagtttaagttgtgttagactatattacatttaattatgttatgttataatagctggaaggggagttgataatctgtaattgtttttatgacttagtattcaacaggcagatctgtgttacagttgacatgcgccagcagtagcctcttattttgatgaaatgtatttagctttctgtctctcttgggcaataggagatgatgaagcagtggcatatgaatctgataagaatgagccttaaaccatagactcattagctgggttattttgttataaagatgctaaacatgttaatatgaagctgatcttgacattcaaaatgtcctttgtttgtttgactctttatggacttggccagaaagctacagtatacaattactaacattaagacaaacaagttttaaattttgttatattttaagtttaagagaacttattagtggattctattttataaatggaagattttttttatcatcactctttatttaagaatacgattttaaatctgatttttaaaagaagaaatatgtattgtgactatattttataatgaaagaaaactaaaatgttaatgttgttacctcgagttgtatcagctggaattatgatactgttatctgtagttttcctttgtatggtaatagcctgtggaagataggcttattttgtatatgagttgtgtttggactttatatactggtagctcctctagtttataactgttctgtgatgtatactttgtgctttgtttctcattgagctttaataaggtacctgttattatgttctgcttattctgtttatattagtttcaataatctctatttgtttttgtatctgtatgtttttattattcttcacaaatatacaaaactacttacctgtgtgaatatcgatacttctgtgacttagctgtattcctccaagactgtaaaaaacattattaatttgttatttagttagcccagaaatacaaaggtcgaacaattatttgaagacctaagaggatgattcagacaaaggatttgaagcacatatgcagttttgataggtgaggaagagtgagttaggtatcacctaggtaaggctgatcctctcagagtcaactttctgtcaccggttgtcagtgtgtgtgtgttagggattctgatagcacatggattgtgctgtctcctgtccctcagcttgttaggttttgggaacactggatgggttagcatgtgtgattcacctacactttcccaacagctttataaactcattcttgctcttaaaaactaattaaccagaaaaattccttgccttatcaaatttatttattaatgaaatctattttgatctgtcactgattggtacttgagacaaagttcaaaggccatctgtcagtgtaattgctaatatattaaatgcctcagcacatttatattgtaaattatatgttcttggaattaaaaaagtcgtgtgagttttctgcctttaactctttatagtgtctcagtttctgagtaataaaagtgggattaatgccaagtagccgtgtgtctgtgagcatgtgtttgtgcatgtgtgtgcatatgtatgcacgtgtgcccatgttcacaagtgatggaggtccaagatggtggtagtgcctaagctccctgagacatcaccgaatgcccaactgtcctgtgctgcaaaagcatgacgacagcagacagacatttcccagcatcatccagcaaaacagtgtgcgtgctttttactgtaaaatttacttggaacatgtcttgaaatattgctgcttctttagcaagtcatagataatacacagtggaaattgtgttttgaacaaaaacaaaggaatttttataaataaaaataaagcctgcaggtcaattgtttaattctgagactagcatatggagccattacctaggcagaattctcttagaaaacatacagaacttaacaaatgccatcatcaaatacaaaacaaagtggaaggtagacagaaaaacaaaagtaacaccccctcaccgacagctcttccaaaacacgcttcagtgcttaccgcgtatggattctctgtggttgggtcaaggttttagtactaggccagtgctgaaaacagaaattatgttctatcttttagttatatatcttatcattcacaagtaatgcttggactgtttaagccctgaacaacccactggcatggtatttagaatctgtcattagggtttcacaggaaggaggtgaggtggtagtaattgatttatccccactacacgcagcctcccgctcttcttccactctgccctcccttgggcaatactcatagggtcgagctgccaatctgtagacttaattttttccagcagtaccatctggcttcttggcaccacaagttatgttggttctttgtggttgctataaacaagatgagtttgtcatattgttagacaacttataggtggtttgttgtggcttgatcctgtttccttgcaactaattattgattattatttagagaaccttctctggtgtttgtgagagcacaacaaggtttctcgtgaaaagaatggaacacaccaaaacagattctggatgccagctgggggctctcctgagttctgtcggcttcttcagcagcttctcctttcaagacagattaatttcaagttaatggtagaggctttctctttcattcagagcacatgcatttgttttgaaaattacttgaatgtgtgtttaaaatcccattttgattgccctcatgaccctaacatgaatatttagaaatctcagttagtgtgcagatagctctctaacatctgcattactgtctttctttcttcatctgtcattttgaaaatgatcatctgtttatattttgtgtttcattttgtagatgaggggttttactttcatgtctcataacatccataaacaaatcaaaaaatgattatgaaaagtttatctgagtttcaataattgaaaagatatgtccaggcatgtattcataaaacttaagccattttccataacacatagtaaaccagacatatttttttctaaagtaaatattataaaactaatttcttaaactcttaagggttctttttataaagtagctcatttcgacagggacttaattgatcacatttgtgttaattcttcatggaacatgatcttcatattctttaggaagtttttaagagttgctcattcatgtgaaagtgtttctcttgagtttgtttttaattagatgctatgtaatctatgttgcttcataataacgaaaggataccgatgttgaaaatgcataccttgagtctttttagttgctggcataaggacatttgaaactcatgaactgatttagtggggattattttcataccaccatattagcaagcagtaactacaaagttgactttgcagaacattttcagaatgttgagcaaaatgcacggctaaactgatgtaatttgcttgtgatgtgacgataaggtccagttgttaataattcctttggttctaagtatgtgaagaaaaggagcagtgaatgtcactcggggagaagagctaaatcagatgtcactggagtgattcatgtgctgactggaatggttaacatgcattttattctactgtctagcagaaggaggtgggctatagaaaaatgaattcttcactgaataattcacaacaattatatcaaattttaataacttgagctaagaaggcatacatatgattcatgttctcagaattactcacattagagattaattgtgatttcttaaacaaaaatacactcataagtgtttttaattggtaaatcatgatcagttttctatttattaaagtagcatcatttgatcagtttttagctataatttaacttgaagtttaggcatcacaattcatctgctgtcataaatgtcagctcattagattttgcctctaataccaaaaaatgcctcgaattgtttgttggcttcatctcaaactcggatatgtaaagaggacagtagaacatttttctttgaaatcacagagagttcagtgacctttcagtggcaaattatgtagaaagaaaatatttatattcatttaaaataacctccgtgaagaaatcgtctcattaccctgtttgatcaatttcttgtagcctgagctgtagcatgctgctgttgccattggttgatggagtacactgagtagtggctaatggtgatggtgctcatcaggaagggttcagccagcggtcagcaacaaataattcaaggctctttctaagtttgtggctggtggaatttgcttcttgccccaagccagcggcattgctgagctgggctatttgattagaagagaggcatatttgcttcttagcaactgcacatttgcacaacccatagtcctctactgcctctgaaggtttcccctttgtgacggtagaataatactttattgttgattgacggacaaaagagattctaatacaaggcaagcttataaccacttttttagtgggtagtttttattggcactagaaattgtagcttcatattccaattttaaaagaaaatatagaccaattgtgtgcttattgtaaacaagcattgaaatcccagtgtactagaattttaatatgagtatcagcaaggtttgcagtgcatgaatgtgattgagtagtattacttttttgcctaccatgttcaatcacagaaaataaattgtgtgtgtgcgcgtgcgtgcaaatatgtattctggttgcatactttcaaactacaattaatactagttaaaatttaactaatactgttgagagaagagttaatgtaagttgtcctttttgatctgagaattaatttttatatgaaaataagtcagattttgaattctaaatggatgggtgcaagctttagactgtagttctcacaggagtgaatctatagaataaatgatgtgtctccagtaatagataaggttatttataactcagcaattaaacaagtgagaaaagagcaacatgggaaacacagtctgggttttacgttcctgggaagaaaactaggtttgtttttgtgtttttaaatatgattttatggcttttttatcattcaaattttatggattgactttgagttttaagatttttaagcaactgatatgaccagagatggagttaattgtatcttgcattttttgatacttttttttttttaaagaaaaaaccattggcctatataagaccttaagggaatggagcaaaaactagttgagagaatatataaatttaaagtaattattttgtataaataatttgtatagtttatggtaagatgaaattgtatatatataacatgagtataaagttgcttaaatattgcatgatgttatatttagaatatagagtgctttcaaaaatattttttgcctcttaaatttatgacagatatgaagagttttcataatttaaaatgatcaacaaaaaagtgcattggtgtgaattttccagttagcaaatcttgaaatgtgttttgggacttaggggaagtttaagcaagtgcagacattagcatagacataaagtgtatatgggcaaatgctctcatttcccagtaaagggaccttagggcatatcagtatgcgtaatatggccatcactgtatttactcactaataaatagctgctttcatgacaagctggagtccaaagaagggaagaggaacgaggtggaatgatccactactgcaaggcggtaatatgcccagtgtacagcagctgtctctgtgcatttcagctagcatgtttgaagtagtcctttaaaaacaaattgcagtactaggacaaaagggaaaacatgcctaagagtgggtttaaatcgtttaaacattaacatgcctgcaactaaattgccaaagttagggtgtgctatataaattaggattatagtttttgctatcattttatttataaggtaaattatgagagtttggtataataaggaaaatgatctttaaattactaaactcttgcagatagttcaaaaaatggatctttaaaaccctaatctactgcattaaattacgtgtatctgtctgcagcatcgtgtggcagttgttgctaactgccgtgccctccttgctgttttggggtacaacccacagcagttttcttagtggactttagggcagttgtcacctctgcttgaggggtctgtttcattattgaggctctcctctccatctttaatggtaaacataaatacagtgacatttttttagccttaagtctctatgtatgcattttgtcatgcagatgagcaggagcagagatttttttggtttttttgttttgttttgtttgttttttttttttttttccagactgggtgtcttagttagggtttctactcctgcacaaacatcatgaccaagaagcaagttggggaggaaagggtttatttggcttacacttccatactgctgttcatcaccaaaggaagtcaggactggaactcaagcaggtcagggagcaggagctgatgcagaggccatagagggatgttctttactggcttgcctcccctggcttgctcagcctgctctcttatagaacccaagactaccagcccagagatggcaccacccacaaggggcctttcccccttgatcactaattgagaaaatgccttagagttggatctcatggaggcatttcctcaactgaagctcctttctctgtgataactccagctgtgtcaagttgacacaaaactagccagtacagtgggtttctctgtgtagccctgtctgtcctggaactcactctgtagatcaggctggcctcaaacccagaaatccacctgcctctgcctcccaagtgctgggattaaaggcgtgcgccaccacgcccggttaggagcagaggtttctaggtaaggaagagacagggtcaagcaaggaacaaggacgtggggttggggtacagccagattttgccatctgtttaccagaaatgtcagtgttcagggctttaagatcaagtttgccaatcagaattgctgtcctcctattgaagaagctgtggcccagcaatgttaggtgatttgcccaaggccacacagcagtggtgccgagcagagggagcttattctctgtagtctggtagtcctccttcctatagcgctcacaggctctccagtctctgctccccaggaggaggagcctccggataccagctttgtgacctagctcaactccttggcttcctatttctatttattttaactaaagactcttaagtgacaagcttgtgtgtgtgtgtgtgtgtgtgtgtgtgtgtgtgtttgggggttgggtatgtgatgttttagcctatgtgtaccttgtggaatagccaaatcaaactatttaatgcatgtatacctcaattgttttgtgtagtaagaatatttaaaatttggtctcttagcaattccaagtatatattggagaacctagctgctaagatgtgcaatagctctcttgaacttactccttttgactgattgaaacagtgttctttggccaacttttcccagttctcctatcctccagcttcttgtaagccaccattttactcttgtttttgtgagtgtgacatctagtactctatatcattgagatggtgcctttcagtgtctaagtgtttaacataatggtctctaggttgtgataaggctttttttcccccttaaaagccagttactagcccttgtatatacaacacttcattttccttactccctggctaatgacccctaagggtgatcccctatcttggctgttctgaagcctgctgcagtgagcaggaaggtgtgcagatggctgcaggggcatcatagccatgccacatacacccattagaccatatatatatatgccaccagagattctgggtcttagagtagtttgcaatttttcaagaaaaactcaatgctgtttaatataagggttggattcacttaccttccatcagcactgtgcaggaaagctctgctccatatctttgccaacactggttctctttcatctttttttttcttcctttcattctgtgtgtgtgtgtgtgtgtgtgtgtgtgtgtgtgtgtgtgtgtgagagagagagagagagagagagagagatttaacttagattcccctgatgattgattttttttttcatttacttactggttagatatgtgtcttcttttgtgatatatcaatttaggtccaataccaaatttttaatagaatttttttgttaagctatgttccttaaatattttgtatattaatccatttgctgtgtaatttgcaggcatactcttccatctctgaggttatttatttactctcctttttctttgctgttgaaaacctttcagtttgatgagaccttatttgtttattttttgctttagttgtccgtggttttggggtcctacgcaaatggtctgcctacacaatgctgtgcagatttccccctcagttttcttctagtacttctacagttttagttcttgtgtatgaatgtttaacctatttttagttgatttttttgcatattagtattccatttccataccataatttatagaaaaggttatccttctcccactggatattcttagcaactttgtgaaacattaatttatagttaagtgcgtgggtttatttctggcatctttattctgttaggctgtttttatgctagcaccatgctgtgtttcattctgttccactgccttcggttccccttctctcctcctttcccctccttttctgtttttgagataaggtcttgttatataattcaggctggccttgaattttaattctagctcagctcctgagtgctacgattacattttaaaaaaatcactatgaccaactcattcatcatgcgtgcgtgcgtgtgtgcatgcaaacgtgcatgcatgtgtgtgtgtgtgtgcgcgtgtgtacgtgcacacacatacacatattgtgaatggcattgtttgtctgattagtgttggaaggtggagatgagctttcattgtatatagatatgctattgacgtttctatgttgagttttgtattttgcaactttactgaattaatgtttgttttaataggttatttttggggggagtatagcccttaggctttcctatatataagaccctgccgtttagaaacatacagtttaacattgtttcccaacttggttggtttttttttttttttcatttctgttgcctaattacaccagccagggattacactaatatgtcaactagaagtggtgggcatatcttctgggagacattaaacttcgccactgagatgtttgctctgcctttgttcatttgagccctatactgtgttaggtacatctcttctgtgtcttatttattcaattagttgctaccttaaagctcatgttatcactagaatagtataataatatacccacattgtagattggagttcaaatgagctaatctatgcaaattttatttgtgaatctgaaaataatttataataatgaattgtttcctaatttaataatctaagtaatttgaagaagttgaaatcttgatttttgatttctaactacaggaaggaacttggaaagtaatttgttttgctactttctcatctgtcttattggtgaacacttagtcatagaataggttaagtagcttttctagtcatgtatgtaattactttatcaccatccctatctgcaactaccactttgggcctaaaattgacaaggcattgtgctagacatttctcatatgtctaatagatgtgatatgggaagcattttatcatttgctgattaaactgagatttagactggtcacacagcaagaaagtgagaagccagggttccgaccagcttcacactagtgtttgttcatggagcagtgtaatctacctccatgatactgggtcccaagcactgggaatcctgattccagtttgtgaaatacagtctctcaaaatgtgtctatattttctttaaaatatttattaatattggtagtctttaatgttagcattaatatgaaatttaagtcatttaagtgtcttcttattcatttgcttaaaaatgaatgttttttgtgctagatacttctcatatgatttctgagatgataggaatcttatgcttgttttgtggtggtttgaatgagcctggcccccatgggctcacataggtgaatgctcggtttccagttggtggaactgtttggaaaggattaggggatgcggctttgttggaggaggtgtgtcactgaggtgggttttgagctttcaaaagcatagtccagtctcacttagcactctccctttctctccttcactctctggcttatatttgttttctcaatgtgtagtcttttagctgctgatccagcactatgcctgcctgtaccccataatgctcatggactctaactctctggaactgtgagccccaattaaacactctcttttataaactgcctttgttacaatgctttattatggcaatagaagagtaactaaaattgtttccttggtggaaggttagatatgaaaatgtattagttcaaatagatattagtaaggctaaagttcattgtagtgctgcagccacatagccgttgctttccttaaagaagggaactgtggaaatctgtatcacctactgttccaaaactagtagtgtgtggagtcagagtacatggtcgttctttttctcagaaacgatttctatttataattttatctggaaacattttagtttctttctaaaagtacaagatgcttgtagagcaggtattgacaactttataatcttcagttagtgaatataaaataaaacaagaatgagtaagacaataagcactaaattgtggactgcttgtcaatttagccctgaaaacagtgaagtgtaatcttagggtagtgagccttcagagcctgttcactggggcgaccttattagtgagatcacttttagaaggtgttcttttgcctgtgtagtagctaagtctttttctcatgtacacctcctattggatacagtgtattatatagctagtatataaaacggtactttcataattgacatttaaattttttatgctgtagtttttaagtaatgagaggagagagggagaggcatttagaagcaacaggccactgtgtctgagaacttgaaacagcaagacctgacaaggatgacattgtcactgatcctaatgcagcttggattggtttgatgcattattagctgaagtccatacttaatttggatttccttggttttcctctaatgttctttttctattacaagatttcatccagagtccacacattatccactgtgtctcgggcttctcttagctggaacatgtcctcaagttttctttgttctttgtgaccttgacagttttgaggagtagagcttttgttgtgtggtgtcccacagttgagatttgactgtttcccttatgattaagttaggagcaatcctgggtttagggtaggtgatgagttaaaagtgaagtaacactttcatgatgcacatctaagtacacacatcagtatgacatcacttttgctgttaacctgatcacttgtctgaggtagtgcctattaagtttatctacgatggagtcaatattttcttctctatagttttaagcttttactttgataaaatctatgtgtataggaaagttgcaacagtagtacaagtgattcccatgttccccttacgccgatacactatgtttctttatcatatctctctccctcccttccttcctctcttttccccttcccttttctctccttcccttcctccctcccttcttctttctctctttcctctctccctctacccttccttcctcttccctccctctctttttggtctgagctgttgggagcaagcaagttggagacaggatggcgggacttccaaagaagtggcttcatcttcctttctatgtggcataggcaaagcagagtaaggagacatagagctggctactttgataaatgttaacagactcctggatgtggggacaatctgtggttgtctgacacctggtcctggggtaattagtgcaggtggctagtagccggagtgtaagacctgaatttatgaaattcttagacaaatggatggatctggatgatatcatcctaagtgaggtaactcaatcacaaaagaacacacatgatatgcactcactgataagtggatattagcccagaaattcagaatacccaagatacaatttacaaaatacatgacactcaagaagaaggaagaccaaagtgtggatactccgatccttcttagaagggggaacaatatacccatggaaggaattacagagacaaagtgtgaagcagagactgaggggtgacctaagaaagagtcacacggaatttatattctttttaccacatagtctcaggtttcatataacgctactttagccttttgcagcaagtcactgagttgacccatattcagggggaaagctatcaggttctatcttgtaaaggaaagaatgttaaggaatttaggaatgtgttttaaaagtgtcaacaactgagatgcttaaagaagttaaaataagcctgcagtaacagaatagcagaaatgactcctgctaaaagtatcctgtatttctgtatatatgatctcatagttgattatgcttgccttatgacttgattttttaaaaatatcctgagataaaattatattagagatttactagagatttttgtgcatgtcagacctgattatctattcactattatttctaatttaatgtttcataggatgtatcttttcatgatagtaaatatttttctctaaataatggttgttaatttttcaagtattatattttattgcttttaaattgcatctattttaacatgaaaaggtgtcacattttcttatattttaattcattagtttcatttttttttttacagattaccttttaaatactttatttatttaatatgtttgagtattttgcttgaatgtatatctgcaccactacatacatgcctggtgctgaagtcagaggagggtatcaaatcccctagaactagagttatgagctgatatgtgggtgccagaaattgaacccagatcctctgcaagaagaacatgtaccatcttctccagccgccatactgctcacttcaacatgggcatattctttattaaacttttactttgtgttgagaattctaaaatattagcaaataatttataatattttgtattatatttttttttatttataatatgtgctaccaatttaaaaagtaaattgtatagggtctggagagacagcacagttgattaactcaggcatgaggactttagatcagatatccagaactcgaagaaaacttggcatgatagtatgctcctataacccaggtgctggtaggtatgtgtgggtggagacaggaggacccctacagctcccttggccagccagccttgacaaattatagaacttcaggttcagggagacctgtttttttgtttgtttgtttgtttgtttgtttgtttttaaatcaatgttgagaacagttgaagaaaaaaaaagacatgtctattcctcactgacactcacacatgtgcatattgcacagcccaacacagccagtactcacaaaactgcaattttgcagttagaagacaacagacggaatccaatatactgacgattcatcgtggagacacctattttctccccattaccgcagacctgtcttctgaccagaaagacttcttcagaaaaatcagctggcagtcacaagagtgaaacctaggatgttgcctaactcagaatctctccaactccctgatgctcataccaaatgcaccatcagtggttaaccgaggctgttaatgaagggctctttgtaagacagaaagacacaacatctgaccctctcatattctttatcttggttgcatgtagctactgattttatctttcacaactcataaggaacttgtcctaagttccaaagatggagaaattgattgtataaactgaagaaagtactaggtagcaagactattactggttttctgtgcctcttattatgaaggctgttaggtttttttgtttgtttgtttgtttttttgttttttgttttgtttatgtgctaagacactctttaagtgttaacagaaacatgttatcttatggtaatccatattttgtccaatcttttattcatggtgtgtctagggttattgagaaattattgtaggttactctcataacatttgtgccactatgtcactagtatgtcttgtaggcaggccactgttccaggtcacagggtttgtagctggatcatactgatgacttcttctcttttccactggtaagcagagtaccttccagcaccatgagtgggagtcagcaggggtgaagcttctagttgggcaccagttcagttttccatgtttgatgacctaagtaatgctatcttcagcaatagggcatgtcttagagtttttattgttacagcaaaacaccatgaccaaagagctagtgggggaggaacgtgcttattagcgacttacacttccagatcatagtctatcattgggagaaaaatccgtgacaggaactcaaacagggcaggatcctggaggcgggagctgatacaaaggccatggagggtgctacttgctggtttgtttcacacagctttcttagcctgctttcttatagaacaacccaggatcaccagcccagggatggcaccacccatattagcctgggccctcctcactgatcactaattgagaaaatgccttacagctgactctcatagaggcattttctcaaaggaggctccttcctctctgataactagcttgtgtcaggttgacacacaaaaccagccagtgcaattccttatcctcaggttgtggagagcaacagatagccttggcagtagcttgtgatgtttggggagggaggtgtccatgggacccttttggctaacaaatcaacacggtatagctcattcctgtcactggagctttggctttttgctataagatgtctagttgggacattgtctccctcgttatgtggtgatgccatttaaattcctttcatagatgtgtatattttaggaatcttctttagtggtaggcttccgtatagcttttcaaaagccctttagttagctgtccttgatcctatttcctcctctgttctcatctccatttattcctcctgttctagtttcctcatctctttcgatcattatattctattcccttccttggaaggtgctctcttccctctggtcccttaggagctacctggcctctgtacttaatcagattcttccctctggtcccttaggagctacctggcctctgtacttaatcagattgaaacacaaaattgacctcagagtttatttcagaggaaaagaaactaaagtactgatggttacgtgatctgtccaagattctatagcctgctaatatcaggaatcctcttcttaggttacctgcctctggttagggctggtgctttgtttcctgccttcactgttctaatttgcttgctagtccacacaaagcaggggcaagtctgtgtgtgcataccttaaatagaaaataaataaataaatctggaagcatgagaagaaaaccatttgacagaatttgcttgtttaatttattatttggtttgcatcttcagtctttccaccaaactggtgtacagtggtttctcttccctggacactgagcagtggggatttttatggaagaatagcttacttaaaggctttaaatttgggatttaggtcatagggttaaggcaagagccatcctaaggtctcccaaatctagaaaactaacagtttaatttctggtcaagcttgttcaattaaagataattggcaaatgtaccttagcttacttcacactcaggaagttcagagtcagacacaagtaagcccattggtcctggggagagttattttggaaacagcaggtaggaaagaagcttagcatttcagaaataagaccctaatttctagcagtctgtgtcactgctaggctggcactgcaaaggattggtttcttagaagggaaaaatggtggacatacgctttcccaggaaattatttctggaacatattgattaatatctaaccttaagaattttatgtaggcatttcaccattataattttgaaatatggaaagaccttgcaacattcttagattgccttctgtctgtctgccttgttaaagatccttttagttaaatggaccatcctccttaaatgatgtcattagctcagattgaaaagacattgcctgcagggaaatcatttaattgaaccaaagtgccttatttctgtagatcttagagcagtttgctcacttttaccttcagattggataatttatactggataattttttcagctctacaaatgataaaatgttaagaaaagaaatctcttttaaaagtattttgatgttttatagtttgccatttttgagttagactcactggttcttaaactgttgagtcaagtcttattttccagttaagtgttttagcttgttggactaagttgttagtgcactgggttattgaagtcactggctacaaaataaatgtttgtgacttaatatagaaatgagctggttacttttgctcttgtgatattttcttatttctctttttcttttaagtcacatttactagtgtgtgagtgtgtgtgtgtttctgaagtttgatgtgcttttgatagctgtgtgtagccgttaataactctaccgtcatggactataggacactgctaacactttggaaagtttccttgcactcctttgaagtcggttcctgctgtggttcacatctcctggcagtcagtaatctgttttctgattgtgtagttctgctctttctagaagactctgtaattggaatgtagtatgtaggcaggaagatctggctagttatacttagcatgacacttttacaactgatgtaagttattcagtgtaccaagagtattttcctttttattgttaatatgtgttccagcatgtggaggtaccacaacttggtatttaatttactaataatgaatatatatgttctttgcaactttgaccaatattaataaagctactgtaaatattttcatggagttttgtgcatgtgtgtttgtgttacattgctgggaattgaacttaaggcttcatatactctaggtaagctttgtaccactgaattacattcccactcctgaagatacagttttgaggcttatgtttttatttttcctgtgagtaggctctgcatgaaaaactaataagctgttttccacagtgctgtatcgttttaagtttgccccagctgctttgcatgctcaccagcacttgctgttgtccatctctaccttttattcctattttattttattttaggtgtgttaactttaattctaccacccatttaatctttaaaacttaagatttaaaaataagaacaaccaaactatagcatctgtgtgattgttggttgaggctattggtatacactagtttgttttggttcatggttctaaactgattataatcatacaacctaaaaagattgtattgaatctagtgcatcctactcagttttagcattataataatgataccgttataaatttggctatgttcctaaatacactaaatgatcatgctggtcgaagcagcacatgacattttacactgagggtaaagaagtagcttaatgcattctttcacaattgtgtatcattctgagatttcaaaagaacaaaaataactctttaaagtctcaatgttatatgaactattgctattgcatttctttaaggaagatatttgactattacaatcctgatgattgtctagtttgagttttttcattgtcctagcacaataaaaggtgttgatagaattgagactttatagagtatggctagttggtaataattataaagtcttactgatgtttggttcctgtttttatgcttagattagcactgctttgaaatcagaaaaggttattttaaataaaaattgaggctaaggtatgttgttcagagattgcgttaaaatcgtggagtcgtgagttaactgttttatcctaaatatgttaaaaacacctttaatattgaatacattagtttaaaagcagttatgaaatgtaaaaatgatttcttaaaacaaccactatatgaactatcttgctaaggtagaaaatgataccaaatggaacatatattaaattatataagaacttgattataaccaaaattcttttcatacacttccttctgaaaactagtttgctcttaaataaccatcttatggtttcaaggcccagaccataatatttagatgtaaggattcttaactctccccataataagttcctgtggtcccaggggcttaggtcttctatcacttctatcattcgtttgatttaaacctcaccaaaatctgttgcaacaacacccaattttctgcaagtctctagttcattgctaggtcagcagacttttatggggaaggagctgaaggggtagagggattggtacaggtaataggcaactttctgtgtccaggtgaggaggttccttgcttctagacctaagtaattaggtgggtaagagtcctccaataattcagccactaaaggtgtttaatgatagaatgagcagttagaggtgatgattaattagcctgggcactttgggctggccagtgtgcgtgcagcagtacatagtggccatcagctggtaggcatgcagtcttgtaaagggctttctgcactgacactggtcatatatcattgcagctgtgccctttgattactgggagggcttgcagagtgattaatagccaggatcaatgtttctgcccagcacatgacatttggtcacagagcaaccatatacttattcccctttggcacaacgcttaggaggaatgaaggatgagacctgccaatttatagctgaagagcttccagtttataaaatgagtcaactttgactgtacaaaattattccccattgaaataattagtgcagcattaaacacaattagaactaaaactacaggagcatgctcgctgaattcaagccagttgacagatggttaaggtctgatatttggccgcctgtgatgaccaagagttattattttgctgagaaaataaaaaagctagaaagtacatagtggctacttaaagtaatatgataccaagtacatacttaaaatacattagaatgttcagtgtcacaactctgtatctataacaaagagatattactatattatgcttattaatatactatgcagccattaaaacagacaatatttaaaaaagagggctactttaatatgataaggtcttgatctagtgacaaatattgggccccaacttagttattgcaacacttataaaaccttctagaatgatagagttggggatagccgatcaagaccttaactacataagaaaaatacttaggtcaaaatattttagacctacaaccttttcatctttacatatgtaaattatttgcctatgttatttatgatagcatatgccactataattgaagaaagacagtttgtaactttcaaaattaaaagcctgtatattctaataggtaatatatatactaatattgtgatatataatatattatattaacctataaacaatatacaatatagaaatattacatatgtcatatataaatattaaataatatacaacatatcatatcataattatatatgaacatatagttattgtgctctttggaattaataattggtaacaatgtctgacttgacttggctcatgttgcatatgaagtgctagcagtctttctgtggcacttagttaacagggatgttttactgtgtccccactggtgctggatcagcctcgtagtgctgagtcattttacattctcagcctaattactctaaaaaggctaactgttaagaaaaaaactcgcaaggtttgttgagtgtattgtagcccttcaaaattgtttctaatacatgtgcctataagtatgttttgtgtgtgtctgagtgtatgtgtggtatatgtgtgtgtcacattaagcatgtactctgagagatgtgagaatttaagaattagaagaaactgtaaaaaaattatatgaatagaattctacttttaaatttacccatgaataaaattagatctaagctgggctgtggtgcctagtgcagacatctttaatcccagcactcaagaggcagaggcaggcggatctctgtgagttcaagaccagcctgatttacagagctcatttcaggataaccagggctacagagagagaccctatttcaaaaaataactacatcaaaaaacaaaaaaacaaaaaaacaaagtaaatctatatttctgttgtagtttacaataagtcagctttttcctgcatttttttccccctgcggaattgttaaaaagaggtccagactaatgtgctgcttggtagctatctgcagttagcagtaggttaatcacttatttttgatatgtttccatttcttaatctgcaatgtaggaaaacatgctaatactacctgggttcacatattgcccctgttcttactaattctgtgtgctttccaaggtctcctgtcaagtcctttcctcttcctaagaacactgataagaccaggcaaggaaaggatggatgctctgtttagcagtctggcttacaattgtttgtgatgttctggtcctagcagctgtggggagattgttttcatttttagtatcccttcttgtcaagagcataaatggctagttggcaagtttccagaggttaaaagtcattgggagctgtgagttaagagcacagttctgaggtttgcccgaggaaggaacttgctttcatccttacccatgccgatgagatagctggacattgtgtgcatgaaagctaacgctgagctcaatcgatgactccaggctgtgcatgcttcctcttacttcatttcctgtcccaagtgaatatataaatgttcaagtgattaaaatttaattagtgacaaggaagggatgctgtgtattgagttaatcacttattagataattgctctcaaaaatagaatattcaagagagcgcttttccttaaaaaaaaaaaaagtcctagaaactgtctagttggacaagtcaaagacttgtgtctgcacagagactcaagacactttaaaacagtcacttcatggacgaaatgtctgtagctacagatttacttaaataccagcagctacgaccatgctgaagtaagggcacatcgttgtacactgaagaaccttttggcctaatactgagtgcccctcccagcaccttccagctctccacctcttgacctgactcactcttccttagttcagccccctgacatcacagaccacccacccattctacggtagttctctgttgtcgttctacagctttagatgattacgttctccattattgcaaagtactttgcattatttttaaaatttgtttctcttctctaggatgtggtttctgttagtttttttttttctttttcttacactcaatactatatccattcttctagaatgttgggcctttaataacttggttgaatggaggatttaacttttctttattaaatttttatcttggttgaaagggtgtctgcctactctgtgtcttgtttactgccgatattgctaatttgtatatagtatggccactatgactcttagacccaagtgagagaggcccctgtattggtcaggtttacagagtttgactgaccatgtctcttgtgctcttccacacatgatctagtccgtggagctgacttacatatgtggttcagtttacctcagtggccctcacagcgcctgacctgacctcactggccctcactatgcctgactttactgtactggacctcactacacctgaccttaccttactgaacctcactgtgcctgacctgacctcactggaccgcaccttatcgccagactgtgttctcagatctgagagttctaagatggctggaaggtttttttccacagctgtatggaccttttgtatgcatttcttctctgggggaagatccatgtaactgacctataaattcataagtagaggctgtaagttatgactaggtagttggctgaggatatggacaaggctccttgggggtctggtttagagccagaggtagggagaaaagagatacagatatcttaggtgtctaaggtcctaaagttgagtttagtattctgcattgttatgatggtgtgtatttgccaaatctgcagggtgaaccatgttttagttaacagtcttgttagcttgatgactaacttcataatatttagttagatacttgttatatggatctccatttgtttcagagacacagatgccagagggagctttgagtcaatattgtgtttaaaacatagcctcttaaaacaaaaagggcccaggccttgtttttgaacttggccatactgaaagaggttagcagattgttactgaaagtgactgtcagcacacctcatgtgcaaaagaacgctaatttagctctgttccaacatcttatgaaaaatttcaagcatacaggagaattttactgtgaatatttacatatgcagcattcaggtttgtttggttgtttgtttggtttgagttttatttgtttgatttttgttttttgagacagggtttctctgtgtagccctggctgccctagaacttcccctgtagaccaggctggtccctatttgccttcctctgcctcctgagtgctgggattaaaggtgagcaccaccgcacccaactagtgtttattctcctctcctggcttttatcacagaccagaatccactcattaattcaacttatttatttatgcttatcagattaaatttctgattctagtatatttcccttaaacatataggtgtgagaactcactgttaataagaaaggagaagcctctgttcaaatgcctaatgttgtaaaaacaaatttccccataattattacgatcagtgttcagcagagaacttacacactcttattcaagggatgcctgtgatgataattatgtattgtgacttgatgtagtacatggtgcttcatatccagttttgctcaggtaaataggatgttgtgactataacaatgaatataaatgattgctttagttcagaggcagattctggattggaaccacaagtcacacatggagaattagaatgctggggggtaagcagtggcctgctgctcgatcttccctctttgccccttgtgatggggaaactctgccttgcagcatttgctgatttccattggcatacactcctgagaattttgcaatagttttctgctattctgctggtgaatgttccctgctcaccccaagtcctctcccactcacgttcctggcctatcctcctggcctggaacatttaataattcttccttagatgcagaatcttaaactccttagagttccctatctcttttcttcccacccttggctgtgtcccaatctgcagcagcagaaaaaccctttccttactactttagttgatgtaaatcagtaatagaagcctgtgagatcttgcagtagtctgtaacagccaggaatatcttaaaagggtggtggtcaaggcttcaagggatggaggctctgatgcatcttgtttatacatttacttttagactgtgttcctggagtgcgttggggctggagtcctggcagctgactctagtcagataagagtaattcagataagatttttttttctgtctttgcagttggactttgtttgtttaagcagtcaacatggtatcactgtggagctggaaagagatgctaacacttggtttgtgatctagctcctagtggcttcagcataccactggaagtgttataatagagtcgggtctgtagaaggaagacatcctaacagatacagtacttacgctaatgtttgaaagatcagtccgagttaaaatctaagggtaagggggtaggctatttaaatatgcaggttgttgcaggtttgctcagatcttcatggaccttataatataccttgctaaaacgttcagagataatcagagaaaaagtggtatggaagtataagtatttctctccaaacatcaattcagtagtggtatggattgagagaccaaaagaaaggcaggtaagaagatattcatgatagataaccaccaaactcgtgtccaccaggtggataactggggtaacgggagaaagaggaataatctgagggttatttaaaatatttatttagtatggaagagttaggcgaaggattggaggcccttaaggagaaggaagaccacaggaagaccaccagtgtcaacaacctggactcctgggagctcccagagaccgagccaccaaccacagtgcatacacgggctgctctgtgcctctgacacatatgtagcagagggatgcatgtctggcctcagtgggagagggtgtacctagtcgtgcagagatgtgctgcaccaaggatgggggcgctgccttttcagaggcgaaggggcagagggatagaggaaagaattctttgagggggggtgggggcagcatttgggatataaataaataatttaaaaaatattaacttagaactgcaggggggacatgtaaatggcaaggttgacagttaggtatgggcctggaactaagaatgatttgggaactaaggaaaatattacacacttgaagaaaagtaggagtttttacacattctggtataatttagatgtatttttatgcatctgttttagtttgtttgggttcctacagcaaaatatgttagactgcataagttagaaatgagaaaatattctgcttgcagtttggaagctggtaagtccaggatcaaggtcttagtaggcttactgtttgtgagagcctgttcctcatagatggagctgttcaataacaaaaagacaatgcaacttaaagagcgcagaggctgtaaggttgtaagtagtcatttgtccaaagaaagcatgcagggttcatgtgactatgttcaggatcattagtcattaggacatgccagtgagagatagacctagtaagatctctttaaaaatacatttatggaagagtgttcctctttctccacatcctcaccagcatctgctgtcacctgaatttttgatcctagccattctgactgttgtgaggtggaatctcagggttgttttgatttgcatttccctgatgattaaggatgttgaacattttttcaagtgcttcttagccctttggtattcctcagttgagaattctttgtttagctctctatcccattttttaatggggttatttgaatttctggagtcagaatgactaggataaaaattcaggtgatagcagatgctggcgaggatgtggagaaagaggaacactcctccattgttggtgggaatgcaagctggtacaaccactctggaaatcagtctggcggttcctcagaaaactagacatagtactaccactagatccagcaatacctctcctgggcatatacccagaagatgttccaactggtaataagaacacatgctccactatgttcatagcagccttatttataatagccagaagctggaaagaacccagatgtccctcaacagaggaatggatacagaaaatgtggtacatttacataatggagtactattcaactattaaaaacaatgaatttatgaaattcttgggcaaatggatggatctggaggatatcatcctgagttagataacccaatcacaaaagaagtcacttgatatgtactcactgataagtggatattagtccagaaacctagaatacctaagatacaacttccaaaacacaagaaaatcaagaaggaagaccaacacatggatacttcattcctccctagaatatagaataaaatatacatggaaggagttacagagacaaagtttggagctaagacaaaaggatggaccatccagagactgccccacccaggggtccatcccataatcagccaccaaacccagacactattgcatacgtcagcaagattttgctgaagggaccctgatatagctgtctcctgtgaggctttgccagtacctggcaaatacagaagtggatgctcacagtcatctatgggatggaacacagggcctccaatataggagctggagaaagtactcaaggagctgaaggggtctgcaaccctataggtggaacaacaatttgaactaatcagtacccccatagctcttgactctagctgcatatgtagcagaagatggcctagtcggccatcattgggaagagaggccctttggtctagcaaactttatatgccccagtacaggggaacgccagggccaaaaagtgagagtgagtggagcagggcagggggagggtataggggacttttggcatagcatttgaaatgtaaatgaagaaaatatctaataataaaatgtaggaaaaaatacatttataattaaaatataattatactcctccgcagtccctttcttccctctagtctccttccatccctcccatccctttccccaaattgacacaaaagcgcaaacttttactatttttagaaagtatttttattaattctttgagaatcttaatatattttatcatgttcatcttactcagatcacccagacccatgaccacatccccagccaccagacttcgtggtttctctctcatcccttccttccctctcttttttttaggagttaagtatggtcaaaactcaataaacaaagggaaaagatgaggttcatggtcaacgtgaatgattcctgcaagcctatcaaggtggctctgaaatagcagagaccccatcccagcacacggggagcttattgttctggagcacctctgacattttttccttttattgaaaatattttttttctcacataatatattctaattatggtttcccctccctctgctcctccaagctccttgcctcctcccctcccatctgggtctactccctctctacctcttattagagagcagacttctaagagatagtaacaaaataaaatatagtaagataaaacaaaaactaacacatcagagtagtcaagacaagcaagcaaacagaaggaaaagagcccagagaaggcccaacaatcagagactcactcatctgcacactcagggatcccataaaaccactaaactggaaatatatatatatatatgcgcctgcagactggtatagaccctgggcatgctgcttcagtctctgtgagcccatatgaactttgattgtgttaattagaggaccttgttttcttggtctcctccattccctctgctcttattctctttctgcttcctccttgaaccctgccccctctttctttttctttaattttttaaaattaaaaataatttttcatgtaatactttctgatctcgcttcccttcatctcctctcagtgccctctcacccatctaattccatgcctccccccacttctaacaggcaaataaacaaaccaaaacaaactgaaacaaacaacaaaaaagaaaatcatgagaaacacacatatatgtgcacacacatacacacaaatgtatataccacacaaaaatacaaaattggacatcatcatatataagcaaaagacctgtgaggtttaaaaaaaacccagataaaacattatgagacagtaaataaataaataaataaataatcaatctccaaagtatcattgagttcattttgagttgaccatctactgctgggatggggcctgaccttaagtgtggcttgtgtacccaatgagactccattggagaaaactaaattttcttttgttgacaagtagagatagctacttggtttgggatggacgtttgtgtctacatcccctctcagtgctggggccccatatggcttggatctgtgtgggccctgcgcatgctgtcatagtccctgtgagttcatatgtgcatcagtcctgtgtgtctggaaggtactgcttccttggtgtcttccattcccacggctcttataaccttcttgcctcttcttctgcatagttccctgaactctgagaggaggggattgttaaagacctcatttagaaatgagtgcttcagggtctctcactctcagcacattgtccacttatgggcctttgtacttgttcccatctgctacaggaagaagcctctctggtaatggctgagccaggcccgatctctgagttattttatcaatacattcttttagcagaataatagtatttaattttcccttaggtccatggctgatctagtctgaggttcttggtcacctgatcattaaatccaatcagatagaggttggttacttccacaacttttgtgccatgattgtaccagcatattatataggtagatcaccattatagattgaggtgtttgtagctgggctgacatttacctttctcctctggcagtgtaagtagtactttctaataccatgaatattagccactaggagtgaaggctctaggtagtcaccagcacaacttctctgtgttcaatgagatatgtaggtattgtctgcagtaatagggccttactgtcagtttgtggagagcaaccaatagccttggcaatcatctatttgggagtttccatggagcccctttggccaacagctcaattatatataacccatttctggtgcaagaggtttcactcagtggcaagatatatcttgttggggctttgtctctcttgttggtgagtccatttagatttctttcatgtatctatatatttttagaagcttctactgtagtaggattctatatggcccctcaaattgttctaggtgttagcaatccctccctgtattctcgcccttacccctctctctgttcccttctccatcttatcttcccatttgtgccccccatcacactctcctaaattaataggaaaggacaatctttaaaaaaatatctttagaggatttggaagatagtatttatttattataatttgaagtgacctatttctgagtttgttacaataaagaaggtttatgtgtaattgaggctggtcactatcataattaccaggtgattcttcagtgttgagaaaataattcttcagcgtgcacataaatgatatgtcagtgtgtttttataacatgtatagaagtcagtgatgtcatcagactcctgcagtgtgccaggattgtgtgaggtattggaacttgccatcctgagagttggagtctagaatggacaagagacattagtcacataacatggaaacaaataatatcagagttatttacaagtctgtgtaagcagacaccatgaagtgacacacatgatactgagaggaggagtggtctggtggtcagggccacttccctgaggaggtgagctggagtgggtgcccagtgagtgagaaggatcagagtccaggctgcagagaggttgttttacagagctggggaccagacgacagtagcgtggtctggagcagaggtggaggaactggcaaaggagcaagggaaagttgttattgttgttgttgttgttcttcttcttctttattttattttattttattttatttttgagaccgggtttctctgtgtagctctggttgtcctggaactaattctgtagaccagtctaaccttgagcttagaaatctgcctgcctctgcctcccaagtgctgggattaaaggcatgcaccaccactgcccagccaagttcttaagcaactaaactgaaggcctttaagaatgtgttagctattctaaggaggaatgaagtatccacactttggtctttgttcttcttgattttcttgtgttttgcaaattgtattttgggtattctaagtttctgggctaatatccacttatcagtgagtgcatatcaagtgacttcttttgtgattgagttacctcactaaggatacactccagatacatccatttgtccaagaatttcataaattcattgtttttaatagctgagtagtactccattgtgtaaatgtaccacattttctgtatccattcctctgctgagggacatttgggttctttccagcttctggctattataaataaggctgctatgaacatagtgaagcatgtgtccttattaccagttggaacatcttctgggtatatgcccatggaagaagttacagagacaaagtttggagctaagactaaaggatggaccatctaaaggatggagactgccccacctgagggtccatcccataatcagctaccaaacgcagacactattgcatacgccagcaagattttgctgaagggaccctgatatagctatctccagtgaggctatgccagtgcctggcaaatacagaagtggatgctcacagtcatctataggatggaacacagggcccccaatggaggagctagagaaagtacccaaggagctgaaggggtctgcaaccctataggtggaacaacaatttgaactaatcagtacccccatagctcgtgtctctagctgcagaagatggcctagtcggccatcattgggaagagaggccctttggtctagcaaactttatatgccccagtacaggggaacgccagggccaagaagtgggagtgagtgggtaagggagcagggtggggggagggtatagggaactttcaggatagcatttgaaatgtaaataaagaaaatagataataaaaaaaacctagtgaatgtgttagcaggagtgctcctctttctccacattctctccaacatgtgttgtcacctgaggttttgattttagccattatgattggtggaatctcagggtcattttgatttgcatttctctgatcactaaggactttgaacttttctttaggtgcttctcagccattcaagattcctcagttgtgaattcctggtttagtatataccccagtttttgattgggttgtttgtttttttggtgattaacttcttgagttctttatatattttggatgttagccttttataggatgtggggttagtgaagattttttcccaatctctaggttgctgatttgtctttatcaactatgtcctttgccctacagaaactttccagtttcatgagggctcatttatcaattgttgatcttagagcatgagccattggagttctgtttaggaaatttcaccctgtgccaaatgagttcaaggctctttcctacttctcttctattagattcaatgtatctgattttatattgaggtccttgttctacttggacttgagctttgtacaaagtgacaaatatgggtctattttcattcttctacatacagaccgccagttagaccagcactatttattgaagatgctttctttttccattgtatatttttggcatctttgtcaaagatcaagtgaccgaaagtgtgtgtaaaaaattaattaaaaataaaattaagttaaaaaagaaactgatgtaacttaaaaaaaaaaaaaaagaatgtgttagaaggaggttaactaagtgaccataaattgatttctacctttcagcttcatttcacctgccttattcaggagttatccaaggttcaatatttaaaggaaatataaacaccagctttacaaagcctatggataatacttgtctttctcttaagagttccccatcagcttcttttggaactaaaatttattgccaagttagtctattgtctctctagtagtggttaaatatgcagatatctttacaagggcaccacaatgccatctcctttcggcagagtttggtggctataaaatgggaagtcttacaaagtaagcaaatataaatacttattttttaagaaagttttttaactaaggaaaacccccacatgtgttatttttaacactgagttttacatgcaccatgcttttgttcaaaggctaaatatgccctgttttatatagcctgaaagaattacttttgttagtgattgtaccctgctgagggacaggcttatgtcttggtcttctgtcttttgtggtcctaaagacaaatgggcagtagctctaattatcttgtaaaataagcaataaaactgacatagcaatagaacttttaccattataatggtctctgtgagcacattcttgtactccaacctcagagagcaggactttgctatgtcttagctgctactttgtgcaattgtgttaggctaggacaagctgggagaaaaacccagtccatgttgtttctcaagtgaaaataaattttaaccatatgaccattcagaagttaggaaagttgttatatttactttgattttactgatggtaaaattactaatgaaaggcttcatatttgtgtgtagatctgcaaactctggttggctacctgtttttgttagccggtaagcaaaaggtagtttccacagtttaaaatgattaaaaaagaatatgtttcccagcatgtgagcacaatttgacattgaagtctcattggccatgagtaaggtcttattgggatatagttgagcccattcatttctgtattgtctatgctgctttcaagtgaaaggtagtagtgaacagtgtgacacagtctgtctggatggtggaaaaccaaggttgtttactctgcatactgtctagatagctcctctgcaagaatgggacccgttatacatgcagaagctggctggcggaggggtggtgggattttaagagaggagtggtacatgcatggattgagttgagcagaataaatgtctggcatggtaagagcactgagtgtttgctccagccacacatttgcttcagaggattctcttagtaccgactcagacaggctgttttacaggaaccagtatagagaggttaagtaacttgtctaaagttaggactgaaaacaaaagttggttttccagtttagcccagtgactttctcaaaagtcatactttgtaaatgtcttccattgaacgtgttctattctctagtaagagtcaaggatacaggaggaaatcctaatttgaaaatctgaagttgaaaatgacacgccactacaaatggaaaattccacaccatgaaacttgcacaaaattattaaaatattatgtaaaattactatttaaatatatatatcaaatgtatttgaaacataaatgactttcatgtttaaacctgtattctgtctcccaaataatctcgtcttgtttatgtagatatttccatatcagaactgaattaattctgttccttcctatgcattttagataaggctgctcagtgtgtcttcttctttagggggaaaccctcactgcttctctagcgtataatattactgtgcttgaaagagcttaatttgaaattgaattattttagtttattagagattataaacaggttctccacttataaagcataaactacttgttctttttttaaattataaacattttaaaatctgtatttgagtgtttaatttgcatgcgtgtatgtatgtgcatcatgtgcatacagtgcctgaggtggtcagaagagggcatcagttctgaaactggagtcacagacagttgtgagctgctgtgtgggggctaagaactgaacccagagcctctgcaagagcagccagtgctcttagtcactgaccatctctttattcctattttaaaatttggaaacagggtctctatgtgtagccctaatggacctggagctcattccatgtgcagaccaggctggcctttaagtcacaggcagtgacgtaatcctcttgtttctggttcctaaattctggattacagtgtttatcaccaagtgcagcaagtatttggtactgtaaaagcagacctcaaatgtgatttttgttgtttatttttagcttctgacctattcaataatttttccttgtagttgttttcaactacttttgccacttgtaagtcaatatcctcaagtaacttcttatacccttaacttcaaatcctaattcttaggaggctgactgaaaggcttacctgatccagtggtgcttgggtccctccctgacgcagtgccctcgcccctacagtctcacccttgctgtgtgtccttccctcctgccccagtgccctcgcccctacagtctcacctgtactgtgtatcctttccctcctacagtcccacccatgttttgtgttctttccctcctatagtctcacccttgctgtgtgtccttccctcctagtctcacccttgctgtgtgtccttccctcctacagtctcacccatgttgtgtgtcctttccctcctacagtctcactcttgctgtgtgtccttccctcctacagtctcacccttgctgtgtgtccttccctcctacagtcttacccttgctgtgtgtccttcactcttacagtctcacccatgttgtgtgtccttccctcctacagtctcacccatgttgtgtgtccttccctcctacagtctgacccatgttgtgtgtcctttccctcctgacccagtgccctcactcaccttgttttagggtttgtagtgaaacaagatttctccacttttaactgtattgttgtttgtgccgaaaaccactccttgtgtttctatgttggtttcagcttctgtcgtcaccccacagacctccttcctgagttgagaccccacatggcttttctgcccctcgtggctctgcatcctttttattttctgttactcgcttaccacaatttgtaagttcatgaggttttgtgtaccttttctgcctatcttcctgactatattattgtaagttccaccactaaggggccatgagacttgtttacttttgtgatcttcatgcatggcacagtgcccaccatgtaacaggccctcagtaaatctctgtgtaatgaatgaataaaagcaatctactctcagtgctactgtttggtatgagacctcatcacagtgaaatactgtagctgcctcctaaactaaaagccctctcaaattccttttatgtttctaattctaccctgccagattgattttatgaaatagtacattgatagaatcatttgcttcctcagatcctccaggagtggcagattgcccactgaatcaagtccaggctcctctgcttgtttttaaagctcttctaatcataatcttttacttctctttcacataactctttacttttataggctagcccctttcataagtcatcaatatttattctaaatgcttactatcttccaacattcataagaaggcctgcagctctcctgcctccttaaataaattcagcccttcattgcttgatttcccatgcagctactgcttgatatacattagaacttagattttgaccatgttcttgaacagattcttcagtgtaagtcttgtttttacaacagtatagagtagccaatgtgaaagttttgcctccaaataccactaagaagcagagttcaattgaaacactgttttatagaattgtatgacgtgctctgtcataggattatctaattgagtgttatagaaaaatggaaatttttttgtcttggatattaattggaacatttgataacagtggaaatagtcacattttatctttattaaatttcattgataattataaggcttcagatttttgtgacatgtgacgcagaactacttataaaattaaaggtgctcatttattatttcaaagtatatggtaatactataaggtcaaaggctgtgttctttctggggaaaatgatcatagaaacattcttacaattcttaaagacatttaatattcagttgatggtaattcttaatattttagaaattgaccatctgttagatagacatctttttcctgagttctagagatggcctttaggcctgggtaggcaaacactctaccaccagcttcacccacagttcttggaatcagttataccaaattcatgttttgattcataatctaacaaagaacattcactgcctctgttatgtagactattttaaaacaattgaatattagcatccattaaaatttatgactcactactttatttcaattaataagtgaatttaacttcttaagtcctttgaaactgtagacaagtttagaatgccttagttaccatgacagacattatacagtctcaaaagaaatgacttttaaaactacttttgatgttgacagtgcacaccactgaaattcattaatttgttttgattctttattgtatcaaatatttgaggggcagtaaattaattttgctttaaatttgttacagattatatggacatagagtatatactatatataatttattttatagattttataattttgttatctttaaccacaaaatgaattcttttagatgtattagatacattttttaatataatgaaatttcctgaagttacctgctagtgagtggcaggacaggaactggaaagccagacctgactcttgagaccatggtgaccattgtgctctcctcttacaggtacagtgtagaataaggaatgagtgcaatgataaacaatctgttcgtgaatgagtatagagttctttgttgtttttgatacagctgaacatgcatttctggctgatagtagaattctagagcagggaccttgaggtacccagaagactgccaaatattgatccaaactttacttaaatcatctcaattaatcttcaaagcaaccacataaagaaggtattcaaactgaggctccatagaggttaactctcttactttccccagggagcctaggctaacctcacccatcttctttcgaatgttaaagccatctccctaggatgttttctcctagttttaaaaagaagggaggtcttatttgcctgtgatgattttctcatagacaaaactttagacttgccattataggtctcacagtgtggctgtgttctgattcctgtcttagtgctcaaacattggctcagggttatcatgaggattcggtatccctttctgtagtagaccttgacactgatggatcactgtgctgacacatgcttgtcttagagttatacactccacagtctgtttaaacagttcatttataactgttgagttataaaatagtatacatgacaacttaggctatttctcatttttttcttcataatcccttttatgcctcatgttactcttctgtactcttctcttttctgcaggtaccttgtttgtctttataggacagtttggatgttggtgacattctgttaacctaccgtatttagtatatttaggttccagtatttatcagattgaatggctgcttcttgcaagcactttagatactcagttgtatattattaaaagattgtatttatttatttgtgcgtgtgtgtatatttgttcacctgttgggagatcaaaggacaacttgtcaaagttagttttcccattcctgtgtgggacccagggatggaacgttttcaggccaaatggaaaacacccttcctcacggagtgatcttgctggcttggctatacgcttaccttaatggccttactttgacaaacactaccaccctgcgagccagcagaagagtctgtgcctgtgcatgtggtttggtccttctgttatcagcctttaaagcgtagcaagagtaaggaagacagatttaagaaccttgggaatcttgcctacttgaggaaatcatagtcaatttctaaagaactattaatacctattatttatacttagcaaattttatttccttttctctgtcattatttagtgctttcagagaggaaatatcttacagtatctttgacaattcataatttagactttattcacttgtctggaaagattatattaaccacctcatttctgtttctcatctgtatttgagtttcacacttgtggagtgaaagaatcagagggctgttcttgctagaaaaggtagacttatgttaaatctttaaagtatttgttttgaaacatttattactttcctcctctatatatcaaagagtaatgtaaactattttgacctcctgaaaatctcacatactatattggttccctcagagaggtctctagactctgcatttggagacctgtgtcactggcttaggggacagggcaatcaggaatgacatgtagcctgggaaaatgtgtgtatagaatgtggctgtgtaaagagtgtgagaagaagtgagcaaagcacagatcttaaagggtcttatgtatgtatgctaaacaatgagacattgtctatatggacagtggagttactgtaggatcttagttcacatatatcagatttgtggctaggtaaaagcatcctgaagaaattaagatcatggtaagaccaggtagatggataaactgttttgatgacccaagaatgaaaagacgaaaccttaaagtagtggtgaggaggtaggaagaaggggtgctcaggagatactttagagacagccttgaccagatctagtggctgaactgatgtagccagtaaagaaaggtagagaggagtctggtgttctgaaatgaccacagagccttgctactgttcacagggttgcataggatgaaaggaggtgtttggaagtcactcagttaaagtgaagagagaggagggaagagttaagtgttagaaaacatttagttttgtgaaaatgtgtattttgggtttgggaggattcttggctgaactcttcagcatagagcaagaatagaaggtataattgagaaagtacaccgggaggggagaatattagggttgcagcgggaggttagtagacacaggtgcttcagaaatagcagaaaaagataaatactagaaattgttcattgaatgtggtatttatagttgtgctgattttatgtggtaattttatgagtaattttatgcatgggcaaggtcaaatttcagtagattggggaatgagtagtaagaagcagactagtctttataaatgtggcagcaatcttcagagtaattctcagcagaagcacaagtgaactgttagtgcacatgatgcactgactggatgattctctaggtagttattcttgtgaaaaaaattccaaactcttacggtcttgtcttatgccaaactcttttttgttttgttttgttttgtttttgtttttgttttttcaagacagggtttctctgtatagccctggctgtcctggaactcactctgtagaccaggctggcctcgaactcagaaatctgcctgtctctgcttcccaagtgctaggattaaaggcgtgcgccaccaccacccggacttgtgccaaattcttactgtttcttactgtcttattccacgtatattcttggaatggaaaaaaaataggaatggaggacagagagtggttgccaaggtatagagaaaggagagagaggcaggagagatgtgagtggcattataaaagtgggacaggaaggatctttgtacctaattcagtgttctcactgtgatatacacattagcctatgcaggtggcagaattctaaagacacacagagagagagagagagagagagggagagagagagagggagagagagagagagagaatataaaatggggggaaatctgaggtgaattgcatcagtgtcagaatataccctggttgtggtattatactgtagctttataaaaggttatcagtgggcaaagtgtgcaagtgatcttgtgtgatttcctttccatccctttccttccttccttcttcttattttttttaatgtttatgggtattctttttgcatgtctgtctgtctgtgcaccatgtgtgtgtgcctgatgcccatggagaccacaggagggtgtcagataccccaggactggagctacagacaattgtgagctgctatatagggactgggagtttaacttggatccactggagaaacagccagtgttcttaacttctgaacatctctccagtcacaagtttcctatttcagttaggaatttggtgtgattttcttttttaagaactcactgtcacataaagttgtcccataacacagcccctccaccctatcccaattcccgcagccctgcctgccaacttggattctgtactatttcttacaactgaataaatctataattatctaaataaaaatttcaagctgggtgtggtggagcacgcctttaatccccagcactggggagtcaaaggcaggcggatttctgagttcgaggccagcctggtctacaaagtgagttccaggacagctagggctatgcagaaaaaccctgtctcaaaaaacaaaacaaaaacaaacaaacaaacaaaaaagcaaaaaaattttttcatggtccagcaaggttcttgacagattctaactttagagtaaatgtgcgtggaagaatgagtcatgccttgtttacatggactagactaaaaaaagttccagtttattttgaaaacaagttctgaggaattgagttagtaagtttaggtaccaattgtggaattacttcattaaagcagcatttgttgccactcttcttgagatgtaccggctaaaagctgctgaccattataattgagaaaggctgccgtgcaccaggtcatacctacagctaatgctaactttccacaataccatgcatcccaagaagggccatcagtctcaagtcagatgacccagaatggaaaacgaggaaggggaagggaaagcaggaagctggcattttttccccttctggagtatcctgtctgtggcagctgtaataagtgcagaggcggcactgggactcttaccgaggacctacagaatacatggccagttgcttcacttgaggaatttaatgtatcagaactgtcagttatccagaatgcttaatttggagatgtcgtatttgtctcatgtgggatgtattgactagatcatcaagacctccacggtgaatacaccatgctaacactgcatccagcaataatgtaatatgaaattctcagaattattgaaagtttattgattaaatattttagactgcacagcttcatgcctgtgaagtttaactgtatgatgctatatctgccaccaggtatggttacaagccataaaaatactcagcttccagaaaacaagcacatgtgggttaagttgcacttggaatgtcccctgccagctgtttaaatgcttgccaagttctttgtaaagtactgcagtaactttgggttgttgggttttgggttttgtttttgggtttgtttttgttttttgtttttcttttgtttttttttccgacattttcctattgtttattgactttcattaaagttttgtttccttttgaggcatcgtttactttgtgacccaccctggtaaatataatttcatataaggtaaaactaggactgccaagatgtctcaacagataaaagcacttgctgctaagcctagctcagccccatcatccctgtggtaggaggagagaaacaactgaacgtcctcttacctccgcaagtgtaccccagcacaggtgcctatacacgtacacacccagataaataaatgtagacagatgattaataaaagtaaatctaagcttttggtgtaaagaaggatccttttatatctttatctaatggccttcatttttaaaatatgcacttactgaataattaaggcataattatactcatccttttctttaatgattttaatcttttctataaaatgctgatttgttttgcttaatacctagttatcattattttcaaaatctgatttgtggtacttttgtcaatttgtaacttactgaccaaccgcttgtaaatttctattttattgatgaagacagtaaatattaagtagcgagcatgaggatggttatataaatgtattcaattttggtacatgtgtggatgttttatggtaatttacacccttttctgctcagacacacaagcatgtgtattcctctgtgctttatacaaatgtacatacacttagctgactgcttaaggtttaggcctgtgcattggtgttacacaagcctatgttttgtatcagttacatcatctccttagcattagatgtcagagaggtatgttttgttcttaaattctgccacttccttttcttccacccattaaaccccaaggctgaatttgggctcagacttgttttctcgttggagtccagaagagtttcctaagccaggcactgactggagaggactgatgtgccttttgctttcagtcttctgggcccggagtgatggttgtttaaaattcctgtgaccactggctgtgctagagcaagcttgtgtgttatctcctctgacacttgcctcacagaaacaatactgcttttgcttttgttggacaaaattgataccttctaatataaagagcagaataaaatggctgctatattataaaccataaccagacttttttttagaggaattatgattttattttccctgaagtattattggcaaactgtacccaaacaattattatacttgccttaggggatgcagaaaatgtatgcagtaaaaataagacttaaacagtctttgcataaatcagcaccattttaataaatttagagtgtagaatgctacttagaagcttataagctgccttatctttgcctttcattttgtaactagatctagaaatagtgaaccattttggcacctggatgaaggttaggggctgaagggaggcaccttcttatttttgagctgtcttttctgtaaatggtaactatactgttgctagtttcattgcatatttattttaaatatgtatgtggtaaagtactctacctggttgcttcctagttataaacattagcacactgtttttatattctcccaaggcaaaaactaattttactctttctgacttactgatttccaaattgtaggcttttgtctagatctcagctttgtcaagtaaagagtatctgacatgttcatttttttttttaagtctgaaaacatcactgtttgtgatcatgatggtcaccagtgggaaggagccagggagttgtgagaatagtgagtgttgacattggtgcacgcaagtttgaggtgaaacagggtgtttctgttgtctcaaaggatccaccatagcatgcatgcctgttaactacgaagtgagaagctagtgtgacaatagagaaatgagtccaggactgccccaaatgggtcatggaatgacagtgctgggacagtgagcatcgtgtgcctctgtgatggctagagccaggacaaggggatgagttctgaaagaatggttttttgatccctgtaatttggaaataattttgaataagcagttagactgtatctttttatgttacagtctacaatgaaattaaaataatttttgaattatttgtgtgtgtgttagtatgtctgccattgcaaacatggaggtctaagaataaaggattctctctttttacagtgttgacattgagggatcaagcttaggtgacaaatgtgtctacctactgagctatctctgcagcattcacaaagatttctttaatattatttggtcacttttatttaatatgatgacaactctttcctttcctattactccttttttttttaaaaaagattttcctatacaaaaagcctcaccagtattgcttttttattttatttttaaatttgataatattgatttattcaaataattaaaaacacaaaagtcctgtaatgacagtccagtaagaagatgcttactactaaagtatcagtgtaatccctgtaaccctgaagtctgagacttaagatgacacactcttagaacatataaaacttcagttgatcagacttattataaatgaagatgagctaaggcccaagtcacagagagttaactcagttaaacacactagtaagaccagtgtcacttgttctctgggcattagcatgggcaaattgtgttgcaagtttatgagttacttgggtttctgaacatgaaagctttgtgtatatgtgtacacacatgtgtgtgtgcctgtgtggctgtgatgtgtgtgtgtggctgggggggggggttctatgcgctgcttgtgtccaggcatgtatgcctgcgagcatgtgagcagatgacagaggagtgcatctttgtcctcctctgtcacctcatttctttgaggcagagtctgtccttcaaccaaaagctcaagtttttcagctaggccatagcctgaaagccaccctggggtactgcaggcaggcaggtgctgagagtctgaactcaggttcccatgatgtgcagtgagcactcttagctactgagccatctctccatccccacataagggcttttgaaagagtgtataggttgctttacttggaaaaatttacttaccttcattttaaaaaatttttactgtttgaaattattttaattgtatctaaaacataaactatttatagacatcattattgctttaaataggcctttatcttccataggatcttttagatctgtctgtgtataatatatttatattttatacatctgtgtttaagaggaaatatctgtagtctaggtttttaggagattcaaaagagagctaaaatatttcagtgtatataaatatatagtttatatgataggtgtgttctttaaaagttttacataatttgaacttggcaatatcatttggttttgtttttttgtttttgggttttgttgttttgtcattttttggtttgttttttgagatgaatacttgctcaggctggccttgagctcatggtcctcctgtcttagaccagaattgcaggcacattccaacctcacaatattataattgtaccagggactacaggcatttcaagagaatatcaaattgcattgttggctattgcctgtaagtggtttttaatggttcaaagagttttaagatttattcttcttagctgctagcagatttcactgcttagctaattttcttcatatttttgacacggacataccacctataatattgaactagtaatattgctgtctttttgctcaacttccttcagcaaggctaattagagccactgtcgtgtaggatttagtgatgtctataattttttttatagcgtattcaactaagtagcaaattattttgcctaatatctaaaaaagctattagattttagtattgcactcttaaaatactcaatataaccatctaggacacttatgtatagcatcagagatatcacctaagtctcacacacacttttatcctattcataatttaatattacatatgaatcttttactactaaataaggttaaactcatgtcctcctgtcttagactgagcatccaggatttcaggtacattctaatctcacaatattataattgtaccagggactgtaatttagatttctaaattacagtgttggtatttattttataagctgattgttgaactaaagcataatttgctcagaaatggtgaatcttgcctcagacggtgagttagaaagtacactgaaagtggttcccttcccctttccaagtcactgctagctctctcttttggggaacccagcacctttgcacactaggccagccctctaccattgaactctatctcctgccctgcgtcttcattttagttaaaggtgtcatttcctggctgttcctcctcccacttcatccttatctacagcttcgcccatgctccatcttccctggcttgaacaaagtgccacagcctccttctttccatgtcttgaaataactcgtggtgttattctctttctttctgaagtaaatggtccactgactattgtcttggcgtctctcctaagattctctgtgcttttggcttttagttgcacacttccctccttcctggggtgtctgcagtctgtcaggagttcagatgtaagactttattaatagcttggtgctatcccacctaaattggatatgacaagccagtttatataaaggagctgtttatgttgtctttaaaaaatttatttcatcccatatcttggactgggaaataatatttctctaagtctagactatactcttaatttaacatgaatttgcatttggtttgaagtagctccaattaaggttgcatggaatatctcagttgaaataactattacagaaatttatattgggactttaaatataatttaatattttccttcagagtgatcagatttctagtgatgagtacatttttattttatgaatttataggtatttctgttcccacagaatgttgtgtaatatcggtaatcatttctcactgtgacaatgtctatttttctatcaaaaggtttgaattaaccattaaagtcctctttttggtgagattttctgccaggattgtacttgaaagtgcagagatcagtcactaccttcacaaataagaactctcctagtagctctgtacatgtgagtgagagtatgtccttagccaaagaactcctgatcaccagtgtgtacaggctgtaacagcgcaggctttgtgaatgaaccagtttattctagagccagagagaagactccaacagcaaaagctggcctggggccgcagagaggcaagcgctggagttgggagggagtggtaagcctatttgtaaactttgtgtttctgaatgttaatttcaggtttcctctctgaaaggccagtgtttgctgagcttatcctgtcagcactacctggtgtcaattgtcagggcatgcttagcatgtggacatgtattaatctgctttagccagcacagtaagaggctgggatgaatagaaggctcaagcagatgaagagggattaactgtgtgttttgaacaaactcttcaatcacagaagcagtgattttacaaaggattagcttctgcttttataaatattgattactgatttgctactcagaatagagatgacataacttgtgcagttgtgtgctgtgtgaagtggacatcattcatattaatggatttgtcacaggcataatagaagcagacagatttattaccacagccgttgctagaactgttatggttaagattgtgtcagcatatctattaaaacttcagggttttagaagtttacagcctagctataaaattcatttcccagatggaatttggaataccagttaaagcctggcacaaattttaatgcatacttttacatgagtttgaagacatttaagttgagacagagcaaaaaatatagatcattttcttatttgtgtaaaatgagttgaatgatacattttatccaaattgcttggaactaagaaatgtttccattttctttaatttccttttagattttgcaatatctgtactaaataatgagatatttagggacttggacttgatcatttaagttttatatttgcttatacacatagcctgagggtaactttatatagtattttttctccacctatgttttgaggtcaagtgtggagttttccacatgtagtattttagcactcaaaagtcaacaaatttaaattcaattttttgggggaaaattttagaaagcactaaaaagtatggatatttgtatggaaatgctagaatgaagtccattgattacatgtccctccaaaagattaatacaaataaagtgaaaattttgagatagataaaataattctaccaatcattaagaatcatctttcagaaaaatacattctttagtctttttaagggatcaggtgtttgttttctcagatcattttattattacagtcagaaaacattttaattgagatttgtttctgggggtgagtgagctggagggtttctagtaattgtggtggggaagagtatgcccctagaggaatggtaaagaagttgttccttgtgggcagaatcaagacttgtgtggattaactaaagacagctggctctgtgtacttctcatgaagtgcctttacatgattgttttcatgttgtatcatggtactttaatccttcatttgtattgtaaagtctcatgcgtttattgattcagttatctggctcttgttttaatacttgaaattacttaagatcctgatgttattttctatttaaaattttattatgcagtaatatgtaattcatgatcctaataaagaaaatgtttttctcttccaaacaccctacttcctacaagtaagaactactaacagttctgggtgtggttttcctgcattgtttgaatacataaaatacagacctttatttcaaattgaaaaatatgtattagtttatatattcttctgctttgtttatcactcagacattagggatctctctatacagtgtagctctttctatatttttatctgtctagtttggccttacttaaaaaaatttataaaatttttaagtaaattatgcactccttctatataggcattttcattttttttccgccacagtggtgtttctgttgtgctgtgatttattttgtaggctaggatggttgagttcttagagtttttatccacagacatcactaaggaggtctcttacaccctctccactgttgacagttcttgctagcctcataagttagatggtagaatcctacgttaatgtttagttggagatgcttgctgtccattgagtattattagcaagcactgtgtcccaggcaaagccaatggcatctgagcttctggagtaaactcggtagcggaggtgaggagcactgggcaggatagcaaatgactgcactggtgtctgtattcagtcccaattgctttgcttcccaattcttgacctgcttttctgctgatctatttatttattattaagtatctgcagttcatgtggtatccatacaaatattttcccccaaaatattatctgaaaaagtcatcatttgataaactaatgttttcaccagttattcctgtgtggattattaagaatcctacctagtttcttagattggtaacagataattggaccaaatattgaattgccatagcagcatcctctgaagaatttgtgcttgtttttaaaaaatttgatgtggttttacattttcgatgttcattagaacttgattgtgtaaaatttaaacctgtttatatggagacttaatttagttgattaatttaattaatacttaatattaagaatatggaaagtatatttatataaatttacataacttctacttttattgtgactatgtatcatgatccattcagacatgatctaattatagtcaaaatattggaaaaatatataatagaatatcatatcttccattgttctttgttgttttggaataaaccatggttcatgtatactcatgggtttgagtaggtgtgtattctttggatttttaggagacttgtgagtgggttggactgtgctggttcctccagtgtttcctgaggagtctcagagctacctcagcatgaggttcaagcgaggctgcacagcactgctgacatgaagccacactcttgtcacctagcatgctgttggcaaatactgcgtcttgtggaagttttatctcattttaactgaaatgttaaaccaaagtggtgaaattattctggtaacgacgattcttaaccagaaaagctcataggtaatggggtcatgtcatctctgggcgccccaaaggaagatacttgacacagtagacataacactcatggtttctcatgatctccttgggatacataccagtgtctgtatttggagtttggtatgtaattagttttaagaagtatgccaaaattaattcaccaaaaatgggcacttttaaggctgtatcttctgcttaaatttctttttcttgtatcttttgcttcatgttggtagctagaaagtttaaaacagattggagctgggtgtggtggtcacatctataatcccagcgctgaggaggctgaggcaggaggatttggagtttgagcatcagccttggacttgggctagaaagtgaatttaaggtcacatggagcacatcctaagctgagacggctgatgctgatccacagctgcagcgcagggtctccgactttaatggcaaggctgaggaggcagagaagtgtgagcttggcccttggctttcccatcctgactagccgttccagccgctccagtctttttccttctgaactttatggctcttcatcagttcagtagcacctaatcatgaccacagaaaggactgtaactgcgtccctggtcccatcatagtgtctggtatattttgggtgtttcaaagtgtttgaatagtgaataagcagatgtgtgcaactggatgcttaatgcttgttttgtgtgtatgtgtctgtctgtctgtctcaggtgtaataaaaacttataaaattattctttttacttaaaggtaaaactcaccactcataccattatttgtatgcctctaattctcctgtgtttttaagaatgtatggctacagaactgtatttatcattttcttatcaattttctttcaaatttgtgttgaatgttttagaacattttctacaaatcccataaacaagagtttagaagatgtgttttttattattttcaattatgtgacgatggcagtgtatgggtgtacatgtgggtggggatgctcttagaggctaaaggtgtcacatgccctggagctagagttgcagacaaatatgagctgcctgtgcagaccctctgcaagaccagtacatgtcataactgctgaaccatctctagccctactattaaaaggacctttaaattagtttcttcaaaaattatttatctcaaaaatctatattaaatttttatttattatgattatttgtgtgtgtgtgtgtgtgtgtgtgtgtgtgtgtgtgtgtgtgtgtgtgtgaagaaacagaaagacatggagatggacagatgttgcaacgcatgcatggaggctctagagagtaacattgtccagttggttctctcctgctgtgacttttggggatcaaagttagcttgtcagatttttgcagcaaactcctttattcactgagcctgttctccagcccccgaaattcatttcttaagcatgctattcagtataatacagtttatataaaattgaacccatgtgtcttaaagaagtacatctgaggcactgtctggctaagtctagtgagaaagtcagacttcagcctactgttgtaaagtaccacataaactctgcatatagtactgcatcgagctagtcttacacatggctgctaacaggcatcccttttaaaggcaaggttagaataggaagtacacttatgctaggttttgatttctaggtcctaggaaaacactcctgaacagcatctgttctaatcctgaaggtttagtcagtattctctattgaattactgttcaatggctacgttcaggtgtatagctaaactgaaaagatttgacattagatgaaactcaggaaagtgctattatctgttcgtatgaaacagacatatgcttccaagttttacaggctagccaaggacggttatccatgcttgttattctagtgttaaggaggctaagatggaggaactctcagaatctcaaggacagtcagtgattctaggccacaaaaataagatcctgtttcaaaaaacaaaacaggttgttggtggcatatgcctttaattccagcactcataaggcagaggcaacggcagagacaggcctggtctacaggtctaccaagttccaggttagccagggctatgtagtggcaacttgattcaaagcaaaacaaaaaccacccacaaattttatgatctaagattgacctggttcgtaaagctttgttgactaattgctgatctgtcttgtattaaggtcagctccatccagccttatgtccctatgaggacactaaagatagattataaatgtagtgtaaatgcgaattgacaagtaagaatgcattcgctgtaccactgcatcagctgatttttagaggacatgcccttcgacttacacagcaatgttacaagatgtcagaaccccctggggactggaattactgagggctatgagcacttctgaggctgcttcttaagaagagttagacaagtaaactcagatggatgagtaggagagtgttctcaacgcggactgaggcaggggtctcagacacatgaagtagtcttatatgatggccatcaaatatgaaacaaaggttaagagggtaccttttcttttttatttattttataaattaatttattttgtacactccatattccattccctatccccccatccaccctccaactgttccacatcccatacctcctctgtctccatgtgggtgtccccactcctccaccccaccttacctctaaacttcctgggacctccagtctcttgagggttaggcgcatcacctctgaatgaacacaaacagggaagtcctctattgtatgtgtgttgtgggggaggggggctcatatcagctggtgtatgctgtctgtttggtggccaagtgtttgagagatctcgggggtccagattaattgagactgctggtcctcctacaggatcacccttttcctcagcgtccttcagccttccctagttcaaccacaggggtcagcagtttctgttcattgattggatcccactctgggcgtgtcactgaccttcttttcttcaggctcttctccatttccatccctgaaattctttcagacaggaacaattatgcatcagaggtgtgactgtggggtggcaaccccctttcttgcttgattccctgtctcttcctgctggaggtgggctctgtaagttccctcttcctactgtcaggcattttatcaaaggtccctccctttgagtcctgagagtctcttacctgagagtctctggagagtgtcccccctccccactcctatttccattctttctgcaggccctcagggcttcagtcttttcccttacccaataccagatcaggttcatccctccccatccactttccctccccagtccctccctccctccccacttgtgatagttttcttctctctccctagtgggactgaggcgtcctcacttgggcacttcagcttgttgacctgaggtacttttcttaaaatgaatgtatttaccaaacgactaagcctcttttcagactcagcatgtgagttgagaagaggtaaaaggaaatactatctccctcaatttggggactcacacaactaacggtgaaagcaaagaatttaaagatttagataagtttttattatacaagttgtttacttccttagatttgtttgtttgttttgtttccaggactgctttcttggtatgcttgttgttggtatatagggagcttactgatttttgtgtgtacattttgtgtcctgctactttgctataatttatcgtatatagtattttatgtatataagcaatcttctgcctaccaggacactttgacttcttccttagtagaaatgctttgaggtttttctctgtttagcaagatgctggttgtgagattactgtgtattggccttattatgttgagatatatcccctgtatccatatcctctgggacttatattataaagagatgttggattttgtcagaatcctttcctgaatttaaatgagatgatcatgtggtttctgtccttgactctatttatgtggtggattacatttattgatttacatatattgaaccatccctgcatctcttggataaagctgacttgatcatggtggataatctttgccatgggtgcttgaattaggtttaaatctttatttgagaatttttcatcagagagattggcctataatttctgttccctctctgtccctcccttctcccttttgtttactacaacaaaatggtgttttccagacttgacagggaagtggcatatatgaactcaacagttgtgactttatgtcaagaccagcatgggttcaagccagacaaaatcctaccatgaggattgggtagggtcagtgaacacagaaatcccacccctagctgaggtgctattgacaagagaaagttggtcttctttatgggtgtggctcctgattggtctggcatgctctaggacaggtcccacaaccaggagttatgtaggcagcatgaattggacttgatggtttaaataaacaaaacaaaaagagaggtatggatgggcttgggaggaaatgggagggagactgattagttgttgaggagtttattcctcactattttcattttaaggatatgtcccatcatgtggtgacagggtatttgtctagaccaaggcatgactaggagtgaaagatcacatgagcaaagagcagtctctaaaacaaactctctccccttcctttccagtataaatgggaaggagcgttcagtggaatgaaagtggcaaaaaggctatgctagctcaaaggcgtagtgttcctgtagaaggcagtctaaatggcaagtaacaaactgaaaactgtagtcggcaaagatgaggcccagaaacttagcaggaattctgcctgaagtcaagactgaataactaaaacagatttgttaatgctaaaatagtaaaaaaggttttagattcctcacaagtctagtatttaaattggccaccaaccttctcataagaaataagaaggaaatgaataagattctattgtcaaaatgtctttgaatcactctgatcccttgcacctgttcattcaagaaaagaaatgaaatgaaaagctaattgtaaaactaacaagttagaacttccattgatttttaattcatatctaaagctttttaaaacttgctgtgttcctctgagttggaggccagcctggtctacagagtgagttccaggacagccagggctatacagagaaaccctgtctcgaaaaacaaactaactaacaaacttgctgtggtccagggtagttttttgttcttgttgaggttaagctgtgtggaaggaagcaaagtgaccgtttgttctacagcatatttggttcagccttcttaccgtcagatgaccctagctttgcaatttaaaaattcacatcacattagaatttgtgtaaaggagcccaaatccagatgctgtctgaatgcttctgacctacccctgcctgacctgtcccagggactttacatcaagactgcaagttgcagggtagaagacccaggccttgcttatcaccttgctgggtaataattagtgtgtttttatactggactgtactggagcatgccaccgtgtcccacaacaggatgttagttacaatgtctgatattttgatttgctttagaaaagtgagattgtctaaataaataaataaataaataaataaataaatactcattaaaaaatagttcaatatcttaagaataccaaaagcttgtggccttttaactaaccccctgtggttagagtggcctagaatacaagttaattttttctttgtgcccttagttaagatgtaatttctttgtttattgtttttacattaagaaaaggaaattgttttaactagtttaaaaaaatcacagtaacctgtaacctgtacggttgcccaatcagtgtctcatggggagatggtattccggagtaaggcagatgccctctgttgctcctgctctatggagctgtgtagctgtatcttccctctcttgaaggctattgtttctgcatctggcaagcctctgccctttggtctcatctgaatgttactgatggcatactactgataattgtgaggaggtccaagtggtgagatgattcaagtttttaggggaaaattactgctttacatatcacaaattacattcagagagtttaactctacctatcgtgttaaacaaatcattaagtccttctgaggatttaaagatatattttaaggatcattactggtatggttttgcttataaaaagtatacatggctactaaattctagatattggttaaatagctatcacagtttaaaaaagtggaatttcagttaagaaattgctttcccctcccttaaataaaatactttaagagatatgaggtaatgagaactagaatattacttaggactttatattttactaggatttatgaggttaatcaacattttttttttttttggagtactcaggttaagtgatacattcatcctgtcaagctggtttctctcttccttactttctcttctctacctgtttctggtctgtaaaatgaaagtattagtacctcaagagttagagagatgactcggcagttaagagcacttgctgttcttgcagcgagcctatgattggttcccaggacctacatggtggctcatatcatttgtgacttcagttccagggcatcccacactgtcttccgtcctttgatgttacagcataacacatggtgcatagacatacatggaggcaggatacttaaacacataaaatttaaaaattaaaaagtactttgcttcagaataacttgttttccttttgaaatttgaagaacatttaaattattacattgtgtgtctgtctgtctgtctgcctacatgtctacatacctatgcggaggccagagaacaatccacaagtgttattccttcccttcgcctctacgcgcgctctgggacgtgacctcagggcgtcacgctgggtaacaagtacctttacctgctgagccatctcagcagccccagagaacatttgttttgcccagtgccagtaaaacgattgtggtacgacaacttggtgagacccaattattccatcatatcctggctaatttaatggttgggccaacttgttttccacttagattctgtttccgtttttgcttttgcttttttttttttttttttttttttttgtgctacctatctacatatctatgtatctatctatccttctacctatgtcctacctacctatcatttctcctttcagttatccatcttatgaacaccagggaagttactgagtgacttgtcacatgtgaccatgagtttctaagtttaagcttaatttacagcttaatctttaaggttttagggatttgttttgccttgttttattttgtttttgtagaaatctgctgtttatgctacttctattcaatgatctagtcttagactcttaaatgccttataaaatcctaaacataaaacagattcactctcatgattcagggtttctctgtgaattcaggtagggggagagaatatttgatgtggactcaggaacaaatactgtatttgatttgggggaaaatcactttgtttgacttggtggaagtaagaacacacaggtaagagttgatgtgcattggtccagcagacacagagaagtgtctgtggttcatctcaaattcctaaccgctgtatctgggatttgttgggtttctttgttatagttctgtttattgcatatatattgaaagtatcacccatctgagacaatcagctacagcataagctacatttgtaattaggagcacgaaaaattttttcactactcaaggtttacaagaagggagaagggagtttatgggatggatttgaagtaaggttgctatatctgatttgagtaattgcagtaattaaaggtacattgaatgtaatggcttctacagagtgaattacccactgatttttctttctctcactttccacaggaaaccagtttcctcccattgcagcccaggaccttccttttgtcataaaggctggctacctggaaaaacgcagaaaaggtgagctaaagggctatgagaaggctaaagctggctggttggttggttttccatcctaggataaagcatggttgtggcatagtcatggaagcagtactctctttaggcagtgttataagaagatgtcgaaaaccttatccaaacatgaaatgccagctttacatagtttttactagcaaagcattagtctggctgtcagtgcagcctgggatttgtaaacagttctggagcagtgccatacatcttgtgggaaagcttcaggctatgactgtgtcctcaaggtcggtgtttctcacagtaaccagtatacagagcgtgctatggctcggagcagcctggcatctcatgtggtatctgttacctgtttcagtgtccctctccacttgataactgggacttggccaggtggtctcctttcatcaccagcataaaattaaacccggtggtgggcagtcatgattgggaatgaaagcatctttatgaccacacagcttcacttagcttgtcgctgcagaccttctgatcatgttccacatgtactgcttatttttaaaaaacctttttaagctgaaacttcaagctgaaagaggtagtagaaataaatgacccaagtcaacccttccttcccctttcccttttatgacaaatttgagaatgagaccccatggatcaattatatcaagaatgtgcagtctgatacctttttgagactgtatagagaaggtttgctgaccagacaggtaacaccattgtaaaggggtgggaaatacaggttaatgccggagctaagaggaagctcaggagttgtcttagcggactttcccttatgtggtgaggaaatgctttatgcaaatcacctatagtatctaacctgctcatttctcccgcttttttggcagatcacagctttctggggtttgaatggcagaaacggtggtgtgcgctcagcaaaacagtgttctattattacgggagcgataaaggtagtgttggcatttctttatatcagtttccattgaaggagtttgtgatcattttcctacagagtgaacagaagacaatatggagaaaaagctgagaatttttgagaattgtagcttaagaataatttatattatctttcattatttgataaatgttatcaattgcagactgccctaaaatttaacacacttatgtttttatgaattataaaagaaagtaagatagttttcactcatggcttttcactctagtaaatatttatctacagttgtagaactggagacaaatgagggccatgatgatatgagataaacgtttttgaagacaggcaaagtagtacatctattttagataaaatttaataaatacagaattttctagcccgactttacagatgccaacagcaaaagcagatgtgtattgagtttgctatattctggaccctgtctaagcagtttatctctctgcccacttaggtagacagataacataacttgtttacctcacagcatgtcagtgaagtaggtccattattagcctatttgattacttataatgttttatactagcatctattaattatataaaactgccacaatccatgtgtgtgggtagtggttttgcagtttgccatgggtccgaggtcttgatccttggtgaggctaggtcgttgctcccttccttcctcaccgctcctcttcttccttcacatctctccttccttccatcctccctccctcccttttttctccttctcctttttgacccagtgagtttcattcaggttacagcagcgtgttggatccctccttccccatcactgcacgtgagtcctcaggaagcagagcggctgagctcctctgactgcatgtgcatagccacatgcccagggtttgtgcagttatctgactcatttatcttaatgttaggaaaacagaggactgagaggctaagtttgtacaacatccattctcagagtggtaaaaggcaggcctgtatttatcgctcaggtttcactactgaccccgtcttaactctcatactttacaactttattaactagtgtacattttagtaatagttcacataattttagctcatttgaataagtgaatctgcaaaataatgaaatttaaaatctaagtatttctaattttgcctttttccaagggaaagcagatcagaaggtaaatatgtaaaatagacatcactgctcatagagatgaaatagccaacatagtatacttggttaaaattgtattatgaaactattgttttatacaatgaatatgcagtaataaaatcttttttccatttgaggagctcttatttttttaattaatttatttttcatactccatattccattcccacccacccccatctaccctttgactccacagcccacacctcctccccacccctccccctgtctccacgtggatgctcccgccctctcaccccacctgacctctaaactccctgggtcctcgattctctttatgaatagtatacacacacatatatacagtttgtatatattttacataaaacaaaaaaaattagtgaaaaatgtctcaaatacattctctgtccttagagaacacaagaagaaatgaaacaggtaatagtcacgtaaaggaaaagggataaactcccagtgccactgagtattgcttttcccatggaattgttattgataaatgtgggttggaaatttgttttatttatcatttatacttagagaatttattagaacaatatgcagatgaaattattgtatctcagacaaatttgaagttttacacaatgctagaagtcagtcttccattttggttggtgggactaatgactttagaatctagcggccattttggatcctgtcactactctgttccatgtgtaaaggcgcctgtgaggtggtcacagcccatgcacttcccctctgctgtgagcgagtcaatgatggtgttaggaaactcaaggccaaattctgttacaatcacagtcacagagggagctgccattatagtggcgttttctacactcttatgactttcgatcagaatcttaccatttctcaaaaaacaaaaaaacaaaaaaccaaagggcctttcccaccaaacccagaaaaggaagtttcagatgctcgtgactttggttcagccatgcttctcatttctatgccccaaggctctgtgattactgctgtcaggttagttcagagccatcaagtcttcctcaaacccaaaggagtatttatatttttctccagaggccaacatatataaagaaattctgactcacatttttgagatagtaagtttccattcctgtttgaattggtagaccttatgttgttgtcgtccttagcattttgctttttttgtgctctgggattcacttagttacctcggctacttgtatttcaaaagttagtgttgccatgtccatcactgtattgatgcttaaagacctgacctggttgtgcactgcccactgctgtgccttcccacgtgtcccaggcctgtctgcagggtgctgcccactgctgccactttatcttttttcaggaaatcatatcaaataacattttaattttcttttgtatagtcaagtaactgggttgtgtagctttattgtgcgtgtgaaccattacctaacccttggaaagagctacttagatatatgaaaactgtaagcctccaagtaagtaggattgagataaatggttcatagaggcacaaggcaggcttgataccactcaggaggttaaaccatacttcattactgttatgacatgtacatagctcaccttttctaccttattgtgcgtgccagaaaccatattgacctatcaaagtagtaatggcttagaagtactgtcatcctccagggtatgtaatgcacttacctctgtacccataaatattgtctgtatttattattcatagccattcaggtccttaagtaacaactgcatgtagtagatgttttatcactttgtgaagtcccatccatcctctcatctcctctctttgcctatgattgtcatgggtctcatttgtcaagcattctacatcctagatattcagattcccattgaggcatccattcatccacttactcatttatttacatttttatttggtaaacagttttagatagttgatataataaatagtgagaatccaaagatccttagaggtgctcactgcttgagttgtatcaatgagaaaaagatatgaggctatgagaatggatgtaggagctaggcagatagacataaattcagtgaggtataataagtaatttaagtacctttggatcacataggaaaggaaaactaactgctacttttagcagccttaggggaaacttcattgtgataagggcattttattgggccataaggaatgaatagaagtttatgggtaaaggccataattttaattatgtgtctgtccaaaatttgtatctggagccacctccaagaaaatagtgttaggatgttgggcatttagcagtgattggaccatgagggcttttatcctcatgaatgacccagtaaaaatgttcaagtgagctctgaaatccctcctttgtacttctgccttgcaaggccacagtgtctctgcactggagaatgcagcacaaagtgttcacttgcaaaacagggaagactcctgcaagacctgctggcatcttggtcttggtttctaatccactaagactttgagaagtaaactcctggtgttcataaattactcagtaatgggtgtgtaaggcagtgcagttggactaagaaagaacacagggtaaaatgaatatttcaggtgagagaaaagcagaaattcagcacagtgaaagcctgtggataagatcaatatagggagccaagctgagacacagaggatggaaggagctgcattagattaaagacatagaacaggttggtaagccttctgggattctgacaataaggcttctaaggattttatttttagtgtggactttaggcagaaatctatatgatcagacttggctttaaggatggattgagatggagagagatggtcaatagaaccattttggaggacattgaactagcctaagcaagagaaattaacacagggctactgagtgagagcaaagagtgactgtagctctctaactccacagctctgtgtcccccacaatttgtggtcattacccagcattccagggtgtctgtaaatgatggcttagttaggagtttgttccagaccctgggttttgttttttttcccttttctattacttttcacatggtcctgaatcagcatgtgaaatgaactttgtgctgctcctcttttgcggaggattgtgatgggcagatcattgtacctatgtgttttcagggcttcaccgccttccttcttcccagttagcggatgtgccagtcctctgtagtgagtgagcactacaggaggttggccataccaagtcatcctaaatacacaccaaagtttctttaactaaaaaaaaaaaaaaaaaaaaaaaaaagttttactttgggtgtgttttgtccacaggtacttcttgcactccatgagtacctgttgcccaggcaggccgtgagggttcagagcccctggagctgctggagttacagatagttgcaagccactgtgtgaaggctggaaacaaactctgatcctctggaagagcaaccactgagccatctctccagctcctaaagactctttgttatatcatgatgttgtcattttcctttacagaaaattaaaatatagggctggagagatagctcagccattaagagcactgactgctcttccaggagttctgaatttccagccaccatctgtaatgggctccagtgccttcttctgatgtgtctgaagacagcaagacagacagatagatggatggatggatggatggatggatggatggatggatggatggatggatggataggtaggtaggtaggtaggtaggtagatagatagatagatagatagatagataaatagatagatagatagatagatagatagataagtagataaataggtaaataggtaaataggtaaataaatgtaaatttttaaaaatatagaacaaaagtcagcagaaatttaaaataacaacaacaacaaaataacataaaagaagaatttcattaaattaacctttccactttcatatctctcacaactttaccattgataggggaaaaaaataagagaacatatcccttttattcaaaaattatttctgtgtgaggacatcaatattgtatcatgacatgtgacatgtgtgagtgaatccttgtatttataagattgatattacaatcttgttttatttgatgtgtgaaggatacctttatcctagcctagcactaataattctacttttttttaaaccaggaagtattgttgttaatagacttttgagtctttgatgtgcaaatattgacctttaagtttatataataaacctgtgtccttttcctctgcttttatggatgagagccctgtagcaggatagagaagctaagtatatgccagttgtttagtaggacttctttactgtgcacaaattgtcaagtatagactaagctttgctaaacatccaatagctatgaatattattggcatataataaaatgggaccagtgtgaatccctagatactaaatgtatatttagattgaaaatagatacatttaaaataataccacattgcacttcctaactccctccccatcccttcctcctcccccctttctctctgtatatatatatatatatatatatatatatatatatatatatatacacatgtattgatattgttgtcatgtggtatacattagatatatagctatagtaactatacattgaaaactatttataactatagtatatgtaataactatctagagaacacccatacttttggatgttctttgagcatacatatatcagatgccattattgcaaagcattgtactacattagcttaggataatggtcacaagtgcttacatagcagtatgatttgtgaattgattgagtcactggcatggtttattgagtgagaactgctgagccagaggacatggcacaagacagtaaaggttttcacaccacagttaggagtttgggctttcctgtcacaggaacgcctcatgttcctaagcactggggataagctgggctggtgccatgacagctctgcttggatgttagaatgatcacgttgttagctgttagggaaaggggtgaagggaatgagatggggcaagatggattcagaatttggggataataataaatgaagactcatggtgtttctttgtaagcccactgcagctgctgttaatcttagatgtgctgctttcaccttgcagtgagtcacagtcacaccttttattgttgtagaaaacttcgaaaaagctaacatacatataggctattaaggaaatctttatgtggtgattgtcttaacaatggctagttatttgttcttacagtccagtgatccatagtgtgtgtgtgtgtgtgtgtgtgtgtgtgtgtgtgtgtgtgtgtggcaggctctcatgtgtctgaagctggctttgaactcactatatagctgaggatcatcttgagattttgatcttactggctccacttcatgcatgttgggattgaataaagcctaggccttcatgcatgctacacaagtattctaccaacggactacatttccgggaccccatagcgtggttattagaatgtcaattttagatgaaaatactagatagagggatgaacgtagaagcaatttcagaaaaaaagcctataacttatttctattcacagctactttatattgtttttaaatatagagtttacacttgtgcttgagaatgtgttgtgtctatcttgaaatatcacatactaccccatagatatttgtatgtttctttctatcagttaaagataaataaaaaaaaaacttttttaagtattttagaaaaagatacgtgtattactgaaatgaagtgcctgggaaaaacacctgtgttttgactgacaggctaggagcttcttcaatcatagtcacttatcccttgcttttaggcttgtgataggagcaggagcttttgtggtgagaacttctggtggagcaggagtgctcatttcctcgagatggagagatgaaggaggaacttagcagcatcctactgcttccctaaaaggagcacattcagtgacctaatgttagcttctgctgggtcacttcctaaggtcctaccacctctcagtagccctgcaggctggggtctcagccagtcacacacaagccttcagatgggagattccacattcaaactgtaaccatgctgcattagaaactacctcattgttatgcttatagcttactgttattcgaaaatgagaagtcaaaaaaaggggtgggggaagataggtagaaatttctgtttgccagcctatgttagccaaacttctaattttaatgaaaatactttcctttggctccataaatgtattcatacattcataggcctgggcctttatgtaacaaatatatgtagctgataatattttccagatcaaatagtactctatatgtctttatgtataacccagaacaccaaaaagtgtatttaaagcaccatcacctttgtttctgtgagctaaataaacaaaaagagagtgttcgtttatctttaactgaagtcctagaataacttgctaaggaattttgaagaatttagtgaaggggtttaatattgagggatatcttttctactccctcctatcaggcattagaacttacagaaacaatataacttgttcacagaggaaaaagaccctaagtataactgacagatagcatcaaatattgacaaacacatgtttatatgtgctaggcatttgtaccaggtttacatttttacaagcagtagaagcagcttcccaccaaaaagaaaaccagcagaaggccaggtctgacatgtgataccaccactatgcattgcttgacatatggtactaccactgtgcactgcctgacatgtgatgccaccactgtgcactgcctgacatgtgatgccaccactgtgcactgcctgacatgtgatgtcaccactgtgcactgcctgacatgtgatgtcaccactgtgcattgcctgacatgtgatgccaccactgtgcactgcctgacatgtgatgtcaccactgtgcactgccactgtttttgccaagagaatggattctgaactctcctgatttttttgtttcttcttctgtttgagatttcagactgcagcatttgcttgcctctctccagcttctgtggtgggaagctatggtacccgtcctcagtaatctcaggacaaaatcagaaaagatgcttaggtgctacaaagactcatttgataaatgccctcgcttacaagggtcctaaatgatttagaattattcagtttcatggttttgccatatttaaaatgacaggagagaaaattgtggttttctttactgtgcgtgcgtgcacgtgtgtgtgtgtgtctcctgtgtgtgtctcctgtgtgtgtctcctgtgtgtgtgtgtgtgtgtgtgtgtgtgtgtaaacatgttcatgtgaatacatgtgccaccatggtcatcttagtaattgctattttaagcatgtttttgagagacagtgcagaagaaaatagtatagttgcagaaaaaagtagatgagccaattggatgctggtggatggcagtagatatacaggagaacatggaggaagttgatggagagaaaaggagaaatcaaaaatggtacccagttgtctcatttagagacgggcactaatagaggtgctatttgttgagatgggaccgtgagtgtacagtcttgtgagtggttctgttcactgtgtctgtggacataaaagcctccggagccgtttacttgtctctttttataggggaggggtctgtacaggtgagtacatgggtgggtgcacattcagaggccagagcaggccttggagagttttcttctatcactgctctcactgcttttagatgggtgcctaactgaaccagaaactcactgttttgtctaggctggctggcttgtcagtgagctctaaggatccacctgtcttaacccatcaatgatggggttgcaggcacacctggcttgtagtactgatgttgggaattcaaacatatattctcatatttacagagcaactagtgatgctactcagtaagtcatctcgtcagcttcctcctccaccttagttttagagaggttctctcactggctggtgtctccttgactagactaagttgcttgaccattgagacccacgtatcttcctgttttcccctcccagtgtggagaccaccattatgtacagcaatgcctgactttctcttaggttctgggattcagctaaggttctgatacgtgcaggactgagcaacttcccaggctccatgatcttgctctggcacctacgtttacctgtttgagtttcctcttctgttcgtcctacagcagtgtgtctgtataatctggaatgtttactgtgaattccaatcatggcttctctggttctcctctttgtaaacagaagataaatatgtggcctggcatgttttggggaggggctgtataaagtggctttgctggtatgagttgaggtcacatgattttggtaccttattcttgagtatgctagtatgggaagcacacttgctctgccccagctcttctctgtgctactgactttatatccctagtaggactccctccttatgcatgtcagcatctctcatgttacaaggatgagagttttagagtcaaattagagttaagctagaggtagagtcaagtttgtaactggagtgagtagagattgaaccatccagatctagcctttaaaatcttgtttctctggagtgagttgaaagaaaatccttcaaattttctttggaccactttagtgttttgccttctattattttctttcctttttttttttttttttgtagtggaagttaattttctcttacagtgcaagtggattgttgactggtgtttgtagaatacctacatttgtaatgcatatatttttatatcagtgagaaagatctgataatgtgtgctattaataacttttgtcttaacatacttataatactaccaggcatactgaaagtgtttaatataaatttgttgaataattggtttagttttttttgagaatggagaaagaatcaaatctatttaccacttactgtttttcactctcccttcaggatttttccagttaggtattttacaatatgtctggagagcaccagacataaaggaatgtctctctggataaaagagttcatagatgagtcatgtttgcgcatgctgcatgggttacattttcccttagaaattcagacagtatgtaagtacactatgcctcaagaaaggcatgtctacataatctcatgagactgctagctttggggtttgttagtactgagggtgttttgtaaggtgatgctttgccactgaactacatccccaaatgcactaactgtgttcagttcagcaaaaagaatcttaaacctagatggtcgtggaatctcctggtatccgaaggaccacatattggaaagtgttgtggtaccctttctttgtcctttctgttttgaggcaggagctcccactgtagtgtaagcctgtctcgagctccggatcttcttgccttgggtttcttgctgatgtacaggcacacacttggtctgtaattttcaaggtatagttttataaaccttatagttaagtatagatttcttttcaaccaaatgaagcacaaaaatattaactggaattttttactcacccagatttaaattatgagcaaatagattgctcaggcttaggttatatttgtctaactcttttttttttttttctcatttgatattttgggtaaaatagcatctccatggcctttaaaaagtgatgttattccaggtgctaaattattgtatttaagaaaaaaagatctatattttattgttggctagctctgcattatggaagcatttctgtccttactctgagatcagtaaaagagacagtttgtcccacttctaatttcagcattgtgtgctaatgtgggaaattttctatcaaaattgcccaacctagctgaatgaagaaagctaatcatcctagtttttgagtattaaatcttttgtttctgttccattttatctatctctaaaataatatctgtctaaactaaaaacacctttccttttgaatgtaccagatgggattccagtctgctttctctagctccctgtcccctgactggctatacaaagttctttttagtaatgtttctttatttgcctgatcactcttctccatcctcatggctttgcttcacatttgcttccttttcttcttttaagatgaaaaaaaaaaatacagtttgctttaaaggcctgcttaggccgtggcagtgctgagggaggactgagagcagtgggtagggacgtccagcagatttcaagtagacttcaggtgaagctgaaattgctagcacatttaagatgcttagatttttcccccgtgtatttccacacttccttctgaatagcaccacagacctcttcctccatttccctaatagttctacatttagagttgttaaagtagctgactaaaatttctcctgtgtcaacaaataaaaaccttgagtgaatgaaactctaactttgtttttctcttctatagacaagcaacagaaaggtgaatttgcaatagatggctatgatgtcagaatgaacaacacccttaggaaggatggaaagaaagattgctgttttgaaatctgtgctcccgacaaacgtatctatcaggttggaattttaacgttgccttgaaattaacttgataagacgtcctgatttcatttatgaagacattaacgttttattaaaacagctttccccaacatgttaataataaaaaccctgttttgtacattgaacattcatataaagaggaaatacattaaaatttttctgatcggttcaagtgttatatccttggaaaagatcaaatgaatctataatttatcagttaacatcacatgtaacattttatatctactttaatagaactgtgtgatttcctaaaagaattacatagcagtaagaataaaattatcaaagggaaaatattagaatattaatgcatattgtattgcttggggtgtgggaggaaatgaagataaagatgcattatcagctctacaacgcaagagccatcagccaggcatcaatatggaatgtatgtttaataagttttaaatatctgagattgcagttgaaagccagttaattaagttgtcaggtagtgtgttggaatctgacaagaacatttttaagaaaactgtacccagcagtctaaagaaattcatgggtgtcttctaattgtcaagggcaaattttgttcatcagttctgcctttgacattgatgaagagaagcagcatttttccctgtgcagctgccagctgctgatcagagtttcaaatccatcatcctctgcttcaattacataaatttgtcaaaattaactgtacattataagaagcatccttgcaagaacagtacccttatacatgaaaagaatcctaatgcttttaagaaatgttaagaatgcagcacaccttccagattgcggttaccactccagtccttattgtttgaattttttcattagtttacagcagcctctcccaaagatgctgaggaatgggtccagcagctgaaatttatactacaaggtaagaacatcagttgaatgttttcacatccctcacgtattaatttaataacgggttgacctgggttttcacatataaagccttccttaactctgtgagagcgatcaagagaatggctgatatggtccattcgcttgagtttatgagagtatcttcccttgaatacagttggtaattttcagtgtcatacacttgtaagaccatttaaaatgcttttaaattaagagtaaagtgctacaatggtagcacgtagatgacagttttcagagttgtgttcatttaagaaacacagaattaaatctcttctgcattattttttaatgtgcttttcaaaacgtcctctgaagacctgggatccgacgttattcctgaggatgatgaggaaagaggagaattatatgatgacgttgaccatcctgctgccgtcagcagcccgcagaggagccagccaatcgatgatgagatttatgaggagctcccaggtacgtgtgctgtggcgatgctctccttccggccacatgtgtgctgtgtgggggatttgttgtcagactgacaccttgagtaggaaatggtgagctgttacaaggacaaagaaaactcgtttatgaaaggacttctgcttgacacatttcaagtgtggctgcacacgtacgaacgtgaaagggacctaaaagtgaagcagagacaatcctcatctctggggacctttgcctcattagcattgtttatgctacataattttttaattaaaaaattgacttgccttacagtttttttccacaaacacacacatcatttttttttttttttaacgtcttggaacttccatttaccagaagttctgtgcacatcccatatgtcaccagccttctgctccctagtcctctctgctggattacattgcactgtcttagaggaatggcattgaactgtaaacaagggtctctgaggcttgaggaatgttttataattggtattttatcataaatgggaaatcaggtttccttactttaaaagttcaggcctgataaagtgttgttatacttcagtagttggtttacagcagaattaattacttactggctctgtgactgtatggtgtctaaaacagaaaactaataatctgaaatttagaattcttggagtgtagcaacactgagaacagtgtgactaacactctaggctgagattgccctttccctgcctattaagagcgataaagaaaatatccaatgagagagagagaactcagtagagaagaaaggagattagaaacaatgtagatttctctgattaggcaatgcagtactataatatacatctttaaaattgattttaaagtatttaacatattccaaattaatgttcaaaagtcatttttatcacagtcggtaaaacataagaaccatagcatagacttaaattctaactgtattagttcaatgatattgtgatctcttcatctataaaatggggataatattgctgggagaatcaactgagataattcagcacaactctttccttgtccaagtccacaataaaacataacattattatcttttaaatgtacttatttttatttcatgtgcattgatattttgcctgcatatatgttgtatgagggtatgggatcctctggaactggagtgacagacagttgtgagctgctatgtgggtgctgagaactgaaccctggtcctctggaagaatagccagtgttcttaactgctgagccatctctccagaccctaacatcattatttttcattgttatgcttggtaaatttgtacaaatgtttatgtgatgttctgggcatgtaatagtaatgatggctattattaaaaagtacttgctcatctatgcattaaatcttaccaccctacaggaggatacttagcacaaaagtatcatttgatgagaacagtaacatgagggtttctgttgttttgtagttgtttgtttatagccccacttcctggttcatcctggggacatggcatcagccacagcatcatttaacctcaggtagaaaatctctttggctgcttggttttagtcaccacatcattaatacagttactttaggctttaaaaggacttgtgacaggactgaggatgtaaaactgaagcatgaagccttaaacatggttttactgccacacacatttcaaccctttaagactttacagtcaatgtactgtgttacagttgctgagttaactgttaagttctgtgattcttcaacttggatcttctctccccaccacccaaagaaagaacttcactgagaacaaagatcaagtattcagttgtttctctaggagaggttcgagggagatctcctgtgagtagcttgaaacttaagaacatcctctgactgcagatgttcttcctcactgcgccacctcccccacatacatagaggtttttggccaaatgccatgtaatgttggaaaaaagtggttattctttaagtagtgttacttcttgcggtagtgctagtagaaatttcagctgctgtgaggcttcttggcctctgcctgggatcccccgatgctgtacaaagtgattgagcttgatagagcctgcaactgtgcccctgggaaaggagctgctgtaagcagctgtggaatgtctcctgctcccttctcccctgtgtaactgagagccatttcaacatctgcacagttcagcaggtttgtcaaactgaagcctgcagctacagaagggattttttcataggaggccctaaagttatctcagagttatagttttgttcatttaaatattgaaactgggaaggtaactttaattttgaaaagcatctctctttcagggttaaggctcaaacttgttgcattcactgcttctttgaaatgtaaaagtcttttgaggtttccgggcatatctgcagactgttggtgtgtccagctctgtacagggaatgttggtctccaaagtccaattggttatgctctcagagttaaataataattctattttaacacaatttcctgtcaattatatactgttgaaaatgaatcccctgagttgagagatggagcacacagatgcatttgaagaagcctaagccttgacaagctgctcttaatgcaaaaccctcttctgaataaggcgagttcttgctctaggaagtatatttttaatacgaaagaaacctaaagtcgcaacagtgagaagaaaacattgcttaaaattatgttgtaaaatgtttcttgaaaaatgtttataattctgtgggactgtaaatagttccagaggaatttttttttggttagaatattccaactttattgcagggctttctctttaatttcttattcattaatttttaactaacttcagaaaagaacagaataaatttctagatctctttgtgtttagggatttttaggggaatgtattgtgggcaggctgaaagtttttggcttttcttcaagtaccccaatgttttgccgtctttttgtctgttttattactacttattagcataagctagttgcatttacatacattgtgatgttactataatgtacatttgcttccacaactaatatattggctaaagtatgttgaactgattaatgacataataatgagctcacaatttcagaatgtagggtcagtttattattagaactacagaaaagcacttctgtctcactgtgaatcttgaaaggcaaaacaatacttgggaaatagtcttagaaaccaacctagcttcccctcctcagcttagtgagttgcctgaccttttccctttggtagcaggaaatggtatattaataacaacacagtttctccaggcacagattgaatagaatcagctggctaacaagaacggtaacacccattagtctattaactgtaccactttctggggaattgaacttgaaatgtctcctgtcaagtggactagaggagagagggcaatgcaaagcaggaagacaaatttctattccattaacctgtttctctctttctctctctctctttctctctctctctctctctctctctctctctctctctctctgtgtgtgtgtgtgtgtgtgtgtgtgtgtgctcatttttttttttaactttaatgacagattggactatttggagccagcagagggtgtctttattctttggtcactcaattacacttcattcaattcattcagtccaactatctgcatctaaactggaatgtaaagtaaaatgctgctataaattgttcaatgaaactattatgtatacataaaaagaccactgttcgagtacttaagtttgaagtagtttccaacaagtgagcacaaatgcaaatttgatcaataaatagttgcaacctcccccagtccagtttagctctattttgcttccatcactcataacacccagttaatacaagggccacgggccctggctgtctccagcactaacactgtcataagtgacactcggttaagtggcacacttcagtttttttcattcattctttggaatgcaatggaagggcgttagttaactttcatagaaccatggtgtatttagcatctcagtgctgttatccaagaagcctattggctttcttgtttttaaaacaaagttactgaacttagtaaatgtggtgatactgtctccacatttagatatgttctcctaagtagatgactagagttaagtttttagatggtttccatctcacactctgctgagaggattatctgaaattataaaaaagaaaaaatttataaattatgagcaccatatatacatagtacttatttatgtacctatccacctatgcatatatatctatactcatatacaaacacacaatgcatttttgttgaacccagagttttgtgcaagagttctacctatttgtttatttttggtgactgtggatgtatttttaatcttctttatattattttataataatgatatgaatttttagaatacaacttgtttgccatgtgttgctgatggcattgcaaacaaatttcctgattatgaaaaaatatacattaacccaaatacttatgataatatataagaacctaaatatttatgagcatgcaaaaacatgtagatttttgttggtagagacaaataactcatctttgtgagttagaaaatatcacctgttgctctgtgtgtgtgcgtgtgtgtgtatgcatgtgtccaaaaatgatgtcgctaaacctaaacatctatagtaggcaaaacaagctccattaaaaactaattatgtggctcaaatggcaatagcactgaggctgtgaagccttggctgcagggatgtgtttgctctatctccactagcatttatatcttgagctatgaagagttgtacctcatttccacattagagttttattcatgtttatatgtacaacataaatctttttaaatatataaaataaaaagttacataggatgttcctaagtcttcatagatcagctcaatttttctgtcaccattttgttcctggacagtattaaaaatctgtttgggaaaatgagaaagacaaagaggaataatgtcaaagacagaggaaacattttcttttcctctgaaactgctgttaaggaagagacattttgaggtggagtcttgttctgttttgatagggttgttgtcctgattttaaaggagagactagactctggattgggaattgcccttctccaaaggggccaggcatcctagagatgggagactgagcagacccagggctgcctggggtgtacacatgtctggagaggaggagagctcttcggactattttccaagaaggcatctagcagacaaagctgctctctataactggaaatggacagggaactgtggaacagcctccacagatggttagcaaaaggtgtcttacgtagtgtgctccacaagctccactggccctgaccctgcctgttcagcccctgttgttactgctaagtcttcattttcaaactttattatatctagaagaaactaaataatgccgatgtatataacagagtagacgctgtgcctaccctagtacttaatcaatagtgtgatatgaatttttatccccttatgcccattgaaaaccatgcagttacatagtttaaacagaaatgtgattcatttgtttgcttgtttgtttgttacattcatttccttccgtggctttttctttacttcctcttgcttgcttctctcattccttcttgtcctcagtctcttcccctctttccattcctgttttacttgtttgctttcattgcctttagttcagacatacccctgtgtacatattacaggccaagcattgctcttaccctgtcatatgcatgtaggccttgaaggatgcagctaccttgcctctttgggtccaatcatttacttacaacctttaatttcctaggttttaacttacatgtatataatatactcatgtattatgagttagctgtttgtgcttttctggcatagaaatactgttaaaaatagcttgtataattctaatatgacacttcttttcaagccacctttctgtcactctcctgctccatccactccctcctcttatctctgtgtccctgcctcatatatgcagaatgccttccactctgtgaacagcagattgttaagtctagaagaggaactttgagggaaagacacatcacatggagtcccagcttggcccctagctgtgaacatataggaaagactgagactgcaagggcagctgtaaacacaaaggctggggaaccagcgtgtcattactcattgcttctttttaaataaaccttatttttcaatttccagaagaggtgaactaacagagtaaaaagttaagttactgggttaagttggggctctgtatactgaatcatgcagtagaggctacagagtgactatgaagaagagtggggccaaaagtaagacaagagatgaaaagggagaagcaaagaggtaatgtggtaaaaataactacagaggtaacttaattgatctcttagaggagacatcacattagatttttttaaatcaagtagaatgattagaaggatggaccatctagtgactgccatacccggggatccatcccataatcagcctccaaacactgacaccattgcatacactagcaagattttgctgaaaggaccctgatatagctgtctcttgtgaggctatgtcggggcctagcaaacacagaagtggatgctcacagtcagctattggatggatcacagggcccccaatggaggagctagagaaagtacccaaggagctaaagggatttgcaaccctataggtggaacaacaatatgaactaaccagtaacccccagagctcgtgtctctagctgcatatatatcagaagatggcctagtcggccatcagtggaaagaggcccattggtcatgcaaactttatatgcctcagtacaggggaatgccagggccaagaagtgggagtgggtgggtaggggagtcggggggggggagggtatgggggggactttgggatagcattgcaaatgtaaatgaagaaaataccttattaaaaaaaaaaaaagaatgcaaagcagatcttcattggcatggaaatagtcacttccagaagagttcgtgggatcaatttccttgccactttcagtaaagcttgcaacaaaatattgtacaaaactatatgacaaaaatatggggaaaagaaacttagagtataaaatatatagatctggaaatagtatatactgaaactcatattttcaggctctgtatgtttttcttttatatattcaattaaaatatattactttgttattacatttcctccttgtaaaaaaaaaaaaaaaaaagaaaaaaaaaagaaaaaaaagaagatatatacctgaaacaaaggtacatgtaggttccaaagtaaggaagtggaaatgaatactccagacagcccttcccagggaacgctactgtggtggtattgatatcaggcaatgtagactttaagatgtaaactgagaaaactacactagaataatgattaatgacaatcacagacaaaactttatctgactacatacactttaaatcagtaatataagacttaaaaaaaaattcctcaatttagcatttctttagccacagaggaatgtttttaacacaccactttcagaaactggctgactaaggaggcagaaatttagttaagatagggaagatttggacaacaaaattagtcagctaaatctaatatattttaaaagatatgagtaagcccagaaaataataatgaatctctattccttgaacacacagaaaacagtcatggatactaattaccacctataaattcaaattttattctcaacaaattccaatgcattttacatagactatattctttacaggggccagggggtgtggcttgggggttgagcacttgcctagtaaggccctgggttctgtctccatactccaagtaacaataatgattataatgagcaatgtaatcttattctccaatatttatattaagttagttaaaaacaccctggtattcctgtatttagagactgtgtaaaatgaatttctgaatagtttgtgagttgagaaatcttaatgggaatatgtggttcttagagagaatgaaatggtccagattgaagctttgggtatcatgttttaaaccacagtagtggggtttggtaaggaatgagcaaacagaagtattcatcacctacaagctgggaatgagagagcatccagagaaagactacagtccaatgtgtcaggtgtgccatgggtgactgaaagacacaaaagaaggaccttacaaaaagatccaatttttaaagatcctagtagatctctagagattattgattgtttagtttacttagtcactgaattataaattttcagacacatatttatgttgctaaagaagccagtagtgtgcatattaaaaattctgaactagaaagcaagcaaatatcagcctcaccaatcaaacaaaaatgctgacatctagaaagcaaaaagaaaaattgcactaatggggctgacccattaagattattcctgtgaaccttagatgaagaatccgaacactgtgccagagggttaggtagtcacgctgcagggctgtgttgtacacaaaccagctccttatcgcttatcaccaagaaacctcaccagctaaaggcattaacttctaattaccttcattccaagcctttaaactggagacttcatatttcagataagattttcttcccatggagaatataaacagacatgggcagcttttgcttttgcttctccatgttttcagaagatagagtttgataaagtttctagttgctacacagaaaccacttgcttcttttaggactcagaagcatacacatgcacacacgtgtgcacacagctacacatgcatctgtggagacgtttgcagcaggagagtatcagccttcactgtttgtgcagatgggtcagctgggaatatcagcttcctaagagtatctcagctgcttactttaaagctgtgattaataagaacggacaagctcaacaaagtgtcagtgataaatataagcactcttcatttctggcctcagcaaggactgtagttgaatagtgcaaagctttcatcagagtgggaaaaaatccaagctaacttaattaagcttaagtgaggctttaccttgattttgtttcaaagaaagcattcatttatagatgtgtttcttgttagtagaacttcattagagtcttacaagagacaacttcataccagttcatatccactgccccccttgttcctccttacagaaactgagatgggtcagaaagttttctcacagaacgaggagactcagtggctgaggcgaagggcattttcgaggtcttcggagatggatccctcctgctttctagtctggccccctttccacatccctgcttccagttcatgggcctagttcctctcttctgcttggtgtgcacacactcgtgggagctcactttagtccctgtcttcatacctttttcccctcttcacccttagctcctgaaatttggttctgtgtccttacccatcataaaaatggtttctttgaagtcattcgtcttctccaaatcaccagaagcagatatcaccgtcagcatccccatctgaagcatacccagtcccaaaacccattttcactagctaggtcccatgtttgaaagataccacagtcccccaacccagcaccgctggctggagaccagtctttcaaacaagggagcctatagagacctctcagaccccgtgtataagtgacaacttcagcactccagtgagtgctcaggggctgattgtttcagatcagttgttttctagtcaaacttttatttctttaatagtgatactttctgtgtattaccttcatgtattctcttgttatgtggctcactttattcttcaaatacttattgaaagcccaccaaatgccagattctcatgagagtgcagggaatttagacatagaaatgataagcttactttctattaggataagtatagagctagacgtgtagtgcttacaatcttcgtactccagaagttgaggcaggaggatagtgagttcaaggccaacctaggctaataaataaataaataaacaaataaataaataaataaataatgccctgtgtcaaagcttattacagattattgtaagaatgccaagaccaaaggtaagaggatgacttgagaaggagtagctacttccatttcaaaggataagatggcatttaaatggaaaactccttggtataattggaaagtagaaaaaaacccaaagttcttcctagagatctgggtctgaggtactgtgcatttgagagaaccagagaccctaggatccatgcagggagactggaggcaagaaccagctcagccaggccctttgtaaggcagaatcagttcctatgcctaagtgacatttgaaagacatttgctgagtttctaaagtgagacttatatgacagtataaggtcacccagaccatcagactctcactatgatgcagctaatgaggagaaatctggggatttgaaaagttctttctctctacattctgtctgagcaactcccatcccttacccccactgctatttctgttaacagaaccaatggtcactcaagtaaagaatgtaaaataccccaaactcattcttgaatccttcctcaatcatcattttcccccatcagattaactgccagttcctacaaattcttcccagaagcatcatctatcctgactctccgtacactcaggctttcatggtttctcccctggatcatcatgagagctaccatcaccctgatagtccattctagatactgacaatagactgactctaaatatatcatggtcttggtgatatgctggttggcaacctttcttggttcccaatgccaagtatttaccaagttggaactcactggccaggccctgagccctttccatagtccagcttatatctatcatccagcctcacttgtgctacctagaccctcagacatcagacagacagacagactctccaccatcctcatgtgctctgtgcttgatcttgttgccttgaactaaaccattgtgctgagttggtgaactaattcatggatgagattccactgaaatggtaaatagatataatgattcggcttttttatttttctatccccacagcccatgatctctattttctaatatgtgttttattagatatggaatcgatgctaagtttgcagattaataacctagattctcaaatacaccttaacttgatcacaggtacaaatatatgaaatctaatgaccacgaagtaaaaattcagcattcattctttccatttccaaagtctaatgtagaacatattttctctttccacacttgtctcaagtcttcacagtcactgctcaaaaacaataaaaacttgcctttggggtctgtatatttacaggccattctattttaatagtataaaaatagcattttctgtaacccacttggatagagctttgaggttattccattataaataagtaagatgatgatataattctgtacatttcctgggcacaatgcagtgtttttgtaagtataggatggcatagctccacatactgacatatataatgacaaataccatattatcattcccagtgctgttctggatgaatccagaacatctgatctcagtgtggagacaatgtgtataagcttcaaaactcctccagagatcacttaacaagggaggcacttgcaagacaagggagtgcagacacttcttacatgatatatttctgctcctctaaaatgtgttgaatggccgtctgtcaactgtaggttagtgcactcagaggtcctctgcagcctgactgaagtctcacatctgaccagtctgttgggctgcagagcctctctagttacaacaggctgacttagcttcccgaggtcctttcccaacttggggtttttgttcaccctgccatctgcatggcaaggcagtcgctttctcttttctgagttcacttttgcacttggccctcctcactttatgtagtcccaggtcaaaccgcatttacccagagaaacctcttctgcctgtcccagcttgcactggcttctgcttctccagacttccatagcactgttgtgactttgactatgactatgactttggaatgaatcacatagccctggtggctttttttttttcctaatcagtatctggtgtgatataaaccttgtcatttcacttttcatacagctatttggcagacataaaaacggttgttttaagtggctcaggacgtgaaacaacccttgtgttacttggcatatccttcagttagtaccttcttccttagaattcaagaaactataccttcagcagcacagagcctttagttagtggactctagttaaataaagaaaaaccaagaaggtatctttaagatcattcttgtcctaatagcaccagtcaccacagaaactgaaaagaatgattgccacattgtatgctgtcaatattgaagcatgcctgattgcccaaaacttccctggattttaacattaccatccagggagcatagtctcagaagaatttatgtaacagaatccaatgagtgatgaaaagctctcatttcaccagtcctttgtaccattaaagatggatcatctatccttagcaacaggacctacttgggttaccagtccctttggtgtgctagtcatctcaaatgaggcattccccaggaaatgacattctgctctgtgcccactcactcattaaaggcaataggaagagaacatgtgaagagcacaggactgtaactgagttttgaaggctaccatctgggaatctgttgtaaccagtatgcaaatgatacatttcctgtttaaaaataagccgagatatgagagtcgcacaagcagctcaagtagtgaccagagagatgcttaggcactacttctctcaggcattctgggaggactgtgaggaggaaggcctaggaacagccatggtctgcttgagtttttgtttcccgtctccttcccatacttcccttccattagctaccatatttcagagcctgaatcaattctgaacttgaatccacattgcccattacattctctctccaccactgacctgatgccttctcccatcgttcttttctatctcaaatcgtcaaacatctcactcagaactgcctggaaacatcccgattagctgggtcagggcgattaacatccgcaaagccaggtgtggcagcccacacctttaatcttatagggagagacatggagatctctgagtccaggccagcctggtccacactttgagttccaggacaaccagggctacacagagaaaccctgtcttgaaaaaaaaaatccataaataaaatactacctattcctatatcacataagacttaggtgtaaatgacagtgatcccaaagcatgtagagatacgtaagacttgaaccccgtagtttatttactctctcatggcagcttagtgttcatttaaaggcatttggaaaaagtcatctgttctaatcagtgagcaaagaggagctgcaaatatgaaatgagaaaagtagagaaaaaaacatgggtttttcatcactccattaaattagtcgtggagcacacacacacagcaatttttagtcaagcaggcactgtgctaggcactcactgtgtagtgttgatggcattagtcagagtgtgttaaccaagggtgaatataacaaaagaccaagagataccgatgaggagtaaagttccagcccaagcgtgtggccatagatgaggtacccgaaaggacctgtatctggaaatgatttgtggttgtaaacaccacttttagagcattctgaaggtgcaagtaaaaccaagatgccttgagcacaccgagatgtaggcaactggtgttctgtctggaagaggccagatgattgcatggtccctataacagccaaagtggggatgtctactcgtagaagctttcaagaaagggttcataaataggaacatttgaaacataactatcaaatcacattaacatttatgcctacttttggttttgcccaacttacacacacaaaaaagagactttccaaaggaagtggtggaagaaactccattgcttgagatattaaaaagcagatgccccagagccccaggagataacccatgggatgcatccttctaggggaaagcaaaggggccaagctactactgttaagtgtggtttgcatctctagcttggcaaaggtatgaaaatgaagatttacattcattggccttcttcctagtttcttacgtgtgaattgcctgttttctcactgttcttctagctctatgtacggtaagcatgtgaggtttccaccgacctctgaggagctgtgtgtgccctggttctggaggcttcgctccatgatgattctgcttttgctactgctaaagtctcaagggtttcacaactgtgtcaggttgcttggcttggggacactgtacttgaggttataggtgtttgtacaaacgtgaggctttgatttctcactgaaacctcaacactctccagagacctggaaggcaaaaaagcttcctggtggctttcctggagtagtgtaggtctcactcgcagctctctgttcctctcaggtgcaaagttttgtctcagacaaaactttaaattgcagcctctggcccaccctgcacagtcaatctgtaattttgggaaagtagaaaaagacaggtttgtttcagtttggccattgaccagattgctgctaaaggttccattcttcaccatgaataattgattgattactacagaaactctgcagtagagattttattataattgtaatttataaactttaacttaagttagataagcagaattttacatgtttactataggcaagactccatgctctgtctgtctgtcctttcggagcactgatgatctttatttcttaattatttcttgacaaaaagaaatacttgttagatttatgatgaaaggtcttaataagtctgttagatttatgaaaaaattaccctaagtggcttcttgatacagattagggtacaaatgatgtttgtgttgtacaaaggtttgctgaaaaaaattatagtaatgtggagacacatcttgatgtgcatgcaggttttagttttatgcactcggaataatgagtatctgcatttgaagtcttgttatgtcagattaatgtggtgatttgggatatgctgtaaagatggagttgtcagtccaatcacctgaagtcctaatttaaataacttatttatttcttgtgccaatctttttcttccagaaaatcaaacccattgttttaaactatttatttgtagaactcacatgacataaacattatgtgacagaagttgtttggtattaagggagaaaatatcatctcagagaaatgtgtcatctgggactagggggaaaaactcacaaaaaagtaattttatttgtatcatgactctttactgttggctacatctgtgtcagtcaattttatattaaataatagcaatatttgtttatgattgaatgtatactatagtaaatacagatttttactcagcatatgcttgtttggaaagacagttgaattcatgatacatttaatggccagttataaagaaacattgacatttcatgtcttagaacattcatctgccacttgctggcaaaattcagtgtcagaattttcattttaccctcaaatcttgaaaaagtgcaatttttggaggtcaaagatagccaaatacaatttcatttaattcgaactagtagaagcagtgttagcatcaggctcaggctatagggagtcatagatatatgatagtattgtaacaagtgagctatggagacaattatctgtttgctgcagttatttcagggttacagtctcattttctttattttatgtgcattggtgttttgcctgcgtgtatattgtgtgagagcgtcagatcttagagtcacagacaattgtgagcttccacgtggctgctaggatttaaactccagtcctctagaaaagcaatcagtacccttaaccactgagctatctgtccagcccctacagcctcattttcaaggactaatacaaaacaaatattgagatgctttgtcgtgtcgaagtgatacaccttatgtagatcttaacttgctggcatctactgtaggaaagctattgcacatgttgactcttttgatcgatgaaaagtgaagtgtatgtctatgattttttgtttcagtatatggaaatgctcatgagacaggctcctgctgagttttggtccctgtgtcatcagtgctatgagttcccactgtcagttgtttaaccgttgttgaacctgctgtgggttagcaaaaagcatctgggagccagactctccctgtgagcgcgtgccaagccctgtattgtagttcctcactgcacggactatattgagatcatttttctttctgactttttaatccagaaattgttttccaatgctaagtaaagggccatgtaatagaaccatttttaacaaagctacctgaattctataaccactggctgataactacttttctttaggcagaatgggagaaactaagttctataattagacagcatttgaacagtcagcattactctcctaggtggactaagatcaaaagagtttatattgtcattttattattgtctttaaattgatgatttactctaagcaaggacaataaacattgaatggttctataaatatggtagttggacaggccattaaatttacatatttgattacattatttaattagatggaaataaagccctaaattgtaccttaatatagtgtacataattatagcataacattttatcaactaaaagtaccaggattggtttattaaatgtcatacttacattaacaagtagtctataaacagttatgatctgagaatgagaaaccaagagtgttttctcatactggaaagcaagcacagacttagttttgcagccatggcactgtctagcctttggtccctaaaatggcagatatttgtccttgcaggacgggaagttgaaatttactcaatttccttctctgaaatgctgtgtgtgaccttgagaaaagaaaaatcagctacagcttgcctgtcatgtacattaaaaatgccttggctcttttacataaagcgttttgtttatgttggatttatttctggaatccaaggacggggaactttcaaatgagagttcagcctgtccctttagggagccaagcctgaacaagggttttattttttaagctcagatttatgctatatgcttggaagaatatcaaatgctgttgtgccagacggagccctctgtcaggtgagcttcgtgtgtctcacctcctttccctcgatggttcttccttgcttctttggggagccccattctacagaaatactgtggtttcattataaaaactgtataacaatatcatccctttgccaagaaaacacctcttaccttaaaattggaagctccttaagttgccactctgaacacctatgcacatcccctcctagatccatgcaagtctgtatttgggaagtagtgttatttttttctttttgtctcactgcagtcaagtgtagtaaggagctagagctatcctcttcagggccgctgagtctccctgagctcctggctgagatggaagctgctcttggctctgcctgctttggggccccttcctctgtctttcatcatattcagtctctgggagggagatgatggacgcgatttttccatttgcaagctgctttccaacagaaagaaaaatgtaaggggcaaatgccaagcgttccattttctgtggccattacaaaattgactcttctgtttttcagaagtggacactatcttcaggaaggatattttattccagactgtcagtaagccatgttattttgtcactgaagagtgttaaaaccaagaatagggcattgtgagattatctttctcataggttccatgggatgtcaggaggttagagtgctggttagttaactaacacatgtatgaacaggtgatacgcgcagagctttactgacttacactggcgggaagagttcaggttccggaagcaggcgacccaggttcaatctggccctcctccttgcagctgtatttactgcacaggtcactgacagccttccatgcctctatttatccggaaatgggaataatagtgcatctgcctcagaggggttcgaggactgagtgagatgtaagtgtgacgtgcctagtagtcttcacacagtcagccctcagattatcatcatactgccactgctgtgagtctgctgggcactttacctcattttgtcctcagagtagttcccgagggtacactctcatttttgttttccaggtgagaacattgaagttgatcaagtttgatttggctagtgaaagggcatgacctctggagcaggaccttcatttgcattttgtatagttccattggctttcttgagaggataagtgagataaactcctcctttaataattttactataattgattttactttgctgctgtttggtaaggcataccatgttttcaaatttaaaaggtaaaaaatatttaaagatacaaagttatgaccaacttacattcacttgataacagaacactgaactttagggtttgttttgttttgttctgaggtagggtcatagacaagaatgatcttgaacttgtcatcctcctgctgtcacctcccgagagctgagattaggggaacgcaccaacatgtccactttattaagtatttgacctgaatgtaaggcttcatgcatgctaggccagcactcctccagctatgctgggctgtcagtgatggaacactcagtcttgtaaagtcattcgtaaggagacgtggcagcagataacaggctcttaaatgtgcctggaccagcagcatgggctggcgacttgcatgttcagagattccccaaatctagtgagatagaatctttatgtgtgggctatagcctctgaattagacccataggtatttctgatacctgttgaagtattaagagccagcgccctgggtgaacaacacatctaggtgataagcaggtatgttaatatggctcataaatatgaagttatgtattacagtgaaaatgtacagaaaatgtacaatagtaatggaaaaatgtaagtggtactgtttgttgagaattgttttataaatattaaatattcactgctgtgtactgtccttcctattccttggaataaagttttctaggcacctggaagcttttatagttggatatagccaactaagcccaaagaactgaggggctgagagtaactctggccctgatgaggatggctaattttttttttttatatcaacaacttggaaccttcaaccaaggaggagagatacaaagaatacataggagtaacagtggctagggagattgactttagttagataaagcatttgacatgtacattgacaaagttggggtcccaagaatccatgtggtatcatgtatccacagtcccaatacccctttcgcaaggtggagacaggagaattcctgggagattgcatgatttaaacagcaactaacaagagactctctcaaacaagttcgaaagaaccaacacccgaagttatcctttgacctccacacaccaattcctacttacatgtactatcacacatacacacacaaacacacacacacaggcacactcacaagcatgcacacccacacaaataaaaattaatgcagaggggaagataaggcaataaatacttatactgtcacccttccttcgtcggctaaaggctacaagtgaaagtaacattggaaatgagtgggcctggaaggtacagggaattaacagggacactgttcaactttatccacaactttacttgtggagagggaaacggacaagagtaactgtcatcataatctgtgataaccagcaggaaggtgagtgttggttggatatattgttagacttcagaaggcagatttcaaaacgtcaaagaaagaataggcaaaaaaaaaaaaaaaaaaaatgtatgctattaaagcctgtattttaaactaccattcagattttaattgcaaaccatctcaatgaggtttcagggggatgaaaatccaccagtttccttgtggtagaatacatttaatgagtgcagcttttgaagagacctatgaaaatagctgaaattcacagactatgatcagtatgataaaaattatgtaatagcatatgctttgtgtatgcacttaggacaatagctcagagaagtcagctcagcttgtgttatttactcctttcctgtcagaatttgtctctgactgctaatattagcaagcagttacagaagctcaagtggaatccctagctagcaaatccatttaactctgattctacaaacattcttagaaaccatttcattcccaccccctgtgctggtctgtggtaatacaaggaagctctcaggaggtcatgcctgcaggaaagtcgactaggaaacaaagttttcaacaagcaggatacaaatgtaggtcttaatgcatcctggagcacacagggaacctggctagttgcctgctgggtgtggggaaagtttcttggttgtgggatcaattgagccaggccttctaaatcagtaggacttatgtttggcttctggcccaggtaaaactgcatcacaagaggacttgaaacgaagctgctgagctgcctattaggagttaactatgaagaatgagggagaaggtagaagtagatggggtctcgtgagaaacctttgaacgtctttagagattaggagcttgggtgtctgccattgggctgagatagactttgagaagctcatataacagtttgttgctgagtgagcttgggggtcagcagcctacagtggtgcttacaagtttctaagattctagtgtttgctcgaaagcttaaactctagccctggaaataaatgctgccattcattttcccccaaacactcactttatttctaagacagcatctgccagattcttgttcaggtttcttacttggtgtctgtgaagcagagcaaacagccaggctgttgcatgtgagccctgcattcaagagtctactttttatagaaattattgtaggcacttgaagatcaaatgagacctgtactatagttaagtgatctattcattaacttaattattgattagatgattttctttttttacctaatgaattttttttaagatttatttatttctatttatatgagtacactgtagctgtcttcagacacaccagaagagggcatcagatcccattacagatggttgtgagccaccatgtggttgctgggaattgaactcagaaccctggaagagcagtaagtgctcttaaccactgagccatctctacagcccttacctaaagaaatttaaacaatctacattgacaagttatttcctaaaaagagtttaaaataatttataaataacatatacatttaggagaagaaatatgtgggcatagtaaaatacagatgcatttaagatatttttgataaaaagccattttaaagcaaaagccatactaaaggaaatatggtctacaaggtatcagtagtggttaaatcagtataattttttaaattattttttctttttttctattttttagcaatgtgtagataatgctttttatacttagaataataaaaaaagttagtctatattaaaaaggaactgtaattgtgttataaatgcagaaccaaaacattttataacagaaatcacttaatttgactttcttaggttaataaaaattttagcacgaaatttttaacaaatttgtaaggcaacaaagagtctttttataacacagggtccatgttttgtaagctctcatccagagtcctggaggggaggccacacttgacccagtttccaggagagctcattgtgactgccgtttctgtcaccttaactgcctgttcatttggaactttgtaagactaaatatatgtaaaattgtgagttttattctcttattatttttgtgtggcttgtggagaattttacatgagtattatgtttatatcatttcctccctctcctccctcaccctctcctatgctcccctctactcctcagagtccaatttattctgtaattactactggtacgcatactcacacacatgagtttataagtacaacctgctgagttcatttagggttgatcatttgtatatagttagggctgactgcttgggactggatcccctatgagggtctcattgctggagaagactggctctccctttctcggcagccattgtttgcctggagctcttggagtttcatgtggagcgagtgctgtgagattcctctgtccattttagcaaaaacatatgttattgctttaatatatgttgtccagctaactagaaaaatctctctgaagtatcatatttatattatcaatgtttgggtctataagcctttctgcaccccactctccctcgttgtaagcctttgtatctctgtatgcgtccttttgactagctttttttttttttttaacaacctttcctccggccttcatagctttccaaggagttggagagagaatacagggtgaggtgtcatgtgtatagcccctccccactattgcttccattttttacatcataacctagggctagcattttatgtcttcagttcattattcagatgaatgccatacattcatctattcgaggatgggcacttttcttatagtgcccctaaactcttgatgttcaggttagcttatggcaccaacatgggcgtgagcttctttcagatactgtatatagaaagactcatttttaccttttccttgtaaacacatttcccttactgaatgtaaagaagaaaggaagcttgctgtcttgggaacaactctgttttcagttatgacttctatgacttaaacacggtaccaaattttggatttatgttagggatgtttgagggcatgaaaagcttggctgaagacagagctaggaaaacagaaaagacaaagtggttagcattacaaattgttattctgtttccaggaccactttaatcccagtactcgggaggcagaggcaggcggatttctgagttcgaggccagcctggtctacagagagagttccaggacagccagggctacacagagaaaccctgtctctaaaaaccaaaaaaagaaaagagaaaaagggttttactgtagtgcctgccgatgtagagtctggccatctgttttaaaatgtcttccatgtccttaagcagcagatacttaaaagaatagtccacccataaagtgaagggtgtgtgtgcaggcgtgcatgtttgaatgttcaaatccacagccttgtacttgcagttactgaacaataccctcagcaaattcaaatgttagtgaaagtcaaagaagagacaccaaggcccactagcatatgcctgaagtgtgaccctctcccaaatatgacctagctggatgtcacctgagtaagttattctggctccacaaacttcattgtttgcatttgcagagtaatgaggatataagtgcctactattgcctcaaagttattggaatatttagctacataatggatttaaacatgggtggtatggatagtgtggttgtttaagcaaaaactactattcttgaggaaaatacatgattacataatcaaatgaagccaggaactctatttcagagcatatttttgccttttaaaaaaaatacattatgagaattttctaccctttcaactgagtttaaaatacattgtaatgaggaacgaagacactgttttctgcaggctgtccatgagaaacacatgtgtgaatcaaagaagttccctgtgctctgccgctcccgggaagagactggagagtcggccattgactcctgaactcactcaccctgcctgggtgctaaccagtggccgtggcctttctcaagcatggtgttttaagcagttttcacttcgattgtttatcctacaagtaggaacattaggagctagagacagcagtattgcatattctacatagctgcacagatctgtggtccttatatgatactaatccgtctgttaggaaactagatcaaagttcaaattaaataggttaatataaaggagaggggaagtctcaactttctcaccctaagcatttctcagtttctccatgtggattttcctgaaaagacttggaaagacttagctatcttgtccttgctcaatacaggaaggtggccaagcagccattgaaaagaagtggctgcagctaggctcagggttgtatagatcagatggcttctggaaggttcatatttctgacagggtttaaggttgaaacctttcccgaccaccagccattgctagaagacgctgattagcaggtgttgcctgtgtctgattcccctcggcccttagcttgctttattttcatcttgtctgatcacaaaacaatctctggatgattctcctaacaccgtgtgattggaataataacttcgcgtgtcagagagttttgtgctgcagctgagaggcatgtaaatacaagctgcttatttgcaagaagcttccagatttgcaatatgattgctatggaaaccacataatgaaaaccctataaccatctgtgtggtttgatggattttactgcagagctgagctgtttttgtttactgttattaaaatgttgaatggaatatattaacccacaaacattgactatttgaggtattaattagtattatataatgacattatgtctcagtacgaaaataaaatatgtttaataataaatctaagtaaaataacatgcgaatatgtgtatttctaatatggagtaaaggtaattattgcctagaattttggttatttgttcttctgcagcttttagttagtggtacgcagtcttgcactgttaattaatgaacggtaggactcgcgtggttacggatccagtcttttcacagtagttagtcagcaccttcctttgtgctgggctctagtcaaggctcagtgtgaatattagcctctaaaattaaaaacaaacacaacttgggtttgtctcttctgcggacgctgtttgtattgttaggccgagaagaatgaactgttacttggacacttgacggatgggttgcgtaaggttttcacctaaaatgtcagtatagttttgaaatgcagacagacagcgccgcagaggcagccacgctccacactgttacgaggccacctcacaaaggctttggtttgcatgctttgccgtgaagattggtgctccaacattttgtcatttttctgatgatctaataatacatttcatagaggcaaagttttcccacaccagtacaatccttagcatataccatagacacattttaatgaactaaaaataaacctgtggtaataaattcttcaaaatttattgttaactttgccaagaacattttccatttagttattacaattattttttataaaattttggtgctaacattagatggtgactctaaatcccaatttttttcttaaaagccaaaactagcacttagtacctagatgtggctttcctatggtaaggacaagcaccccatggttttcaccccctaatactggatttagtatctgaacaggctggagagagtgggtgcagagaaagagagagcaaggcaaggcaagctctgtcttctccttaaagagtaaatgctgtgtctgtgaaaacagcgtaggtgggattaactataaattctcctttagagtttatgggagaattccccataaacaacccgcttgtgataagtagtccttgagatttggccaaagtgagatgacggttgttaaaaactatcccgtattaaattactgaggttaactcggcaatgtgcatgaggacaaattgttccagctgctccttattttgaagcttttattattttgtcggagttgaattatataaactcaaaccacttacatttgacttctaagcacaggaaccctgaagcttacttcaaatcctggtgttgattaattgccggttaaaacatacaggacacttttctaatatgttacagttgcccttttctctgatattaaccctgtccacttgcaaaaacaagtctgtgttcccccaacaacacagattatctgggccagcctctcagtgatgatatgtccatttgtccactagtctcaaaacctgagtcttaaaacgtctaggaaggcaggcacatgcttatcgactctggttcctgcacctctcacgccatctccttcctgtttcctttgcccctgcagttcaggacttccttcctctttatctagactctccacgccccttatccaggccggctgagacaatgggatctaatgaccatttctaaagcaatttcagtcctgccctgtctgctcagaaaccttgtaaggctcttactgcccaccagactggagtctgcagctataacacgatgtttatgggacttaaactggcctccatttctcacattgctagaatggcgtgctactttgtccagtgaacgtggctgtgcctgtactttaagctgggatctggaaagcgctgctttgcgtcctacaggtcttccatgggatcccaggttctccctctgcactacttgagtgctttgccccacccatcagaggtgtcccttgttaactccttgccctcaggtctccgccccagcaggctgccagcttcctcagggcagaacctccctgttccctttgcctccttggcaagtcctccccctcacacgtgggtgatcctcaatggagactggttgactggttgattgatttcttagccatactagctacctatgtgtatcttacatacacattggagattattcttgagctagtatattttttcttttagtttttctttggtatgccatttgtttttatatcctacattaaatatttttcagttttgtataaatccttaagtagggaaagtgatagtgtaatacatctgcttttagtagaaaagaatgacatagtttaaaacaatttcttgctattttattccctatcctgggaaggggatgtgcttagagtgtgtgggagcaaagtctgagcaaagcactgactgcggagaggataaagaacatgggttcatacccacagcctcaactttaaatcgcatgctttggaagtttgccacctatgcatctcaatttacttatctatagaatgaggatttataatcattcatctataaagcctttccttctgcgatatgtgacacataggagatccacagtagaatttggggaaatgacctttaagtgttaggactatctagcagcctcttgtgagaggactaagtgaggaaaccagcgagcatggctggggtttgatgacttacaggtcatctgcattttatgtcagacgctgttttctgtgctgtcttgatgttttaggaaccatgtattgtagtactcctgctattcagtataatatagcatatctgtataaagttggctgttactttactaggtctaagggctgtcctggatttaagattgctccagacaagtttctctgtacatttaaaacaaatgtgcaacacagtagggtatatcttatattgtatcaggtcaacgtaagccttggtgaggatgttgtttggttattaacaaaggaatatgaatcttgggtgttttgtgctcttaaagataattattaagtgctgtagactttgtcttgctctttaagcagggtgggtgctgtgattgacatggggcctgttaatgtgccactgactctgtttatttgcagaggaggaagaggacactgcttcagtgaagatggacgagcaagggaagggaagtcgggacagtgtgcatcacacctcaggtagcactggcaaagtctattttggttttgttagagtcactttctaaccctctgaggatgtttgcacagctccctgaagaagttgacttgtttggtctgtatgtcttatgcttgataagctgcttagtcccatttaggatgcatgaaaaccacttgagaaggatttataaagtaagccaatttatacaaggtattccttcctgaattactttgtaatgactcaattagctttcatttctgcacaaaggagatttagttgcataaattagcttatcatcattgaggaagtgtcactgctaaaggacagtttatagatacaacatgcagttgctgtcaaacctataagaatgtaatatagacatctgtgtatactttgtgcttgagcagaacagacttctgccattcagagactaacaggggacaacaagttgcccaagggactggcaatgtagacatctctgaaaaggtcaacttgacacaggctctgacaatcgacccacagctctgtcttctttgataaaaatcagataaacttaagaccgctaattgatctgcagcctgtttaaatgttggccatgcatatcttcattgcatatgattaacacagaaagcaaatgaattgggtaagaaatgccagagtccagtgacagcagcttaaaaatgaggaaaggacactggttgcctagcagactggggaagatattctgcactatccatttccacctggcactgggccccaagtactaattatgtgcacaccatgtacacacacacaatacggacaactcttcttgcttgttgctatttccaagtagcacaagataaactatctgtagcacaaacatgaagttaactttgataaaccagcatttattttacagggaaagaagagatgggcagccttcttatcagaactttacacctcttcacagccatatgtcagctggggtgaggtctgccctgtcacccccaggtcctgtaaagagctggagctagggtcaccttcctctctctgatatgtccatacatcactcttttgagttgtcagaagcagggtggacaagcagtgcgtgttcaggaagtagctttcctggggccttcctactgtgacatatgggaaggaagcgggcctgactctagacctggacaggaaggcaggagcaggttgctgtagaaggtttgggtttgccttttttttttttccttgacagaaaggaaacaagacaaagtcattagttgttagccctcttgccctataaaatagagttgtaaaacatggcagcaagcaaagcccaggcactctatgcttgatagtaaattaggtatctgtttttaaagttctgaatcatgatgcttctgccaagagcatgcatgtttctttgtaaaatgtctatgcaggtagagagggtagaaacagatagtagatagaccttccacaggcacaagtgagcatgcctcaaatgtttgcctttgagggtagggggaaaagagtttttctcaaaggaatccagtaagttgatgagcttttcatgccatagccacaagatactgcaatgtctgtctcttgtgccacagagctctttcaagccatcattcaatgccttcgcaaagcaagccgtcagggactctgtgcttgccactaggagcactgagctgacaagagtgttgctttctgcctagcatctcatcttgtgaacttctaacctcgctcaagaatttgatgtatattttttacattgactaattttgcaggaagagactcagtgttgcaatgtaaaatctaaaggtaaagctgagttcatcttgtctcctacaagtcgcttcacattcactcatcttacaaaggtcatgtatatttataggtatatagatgggcccgcttgatgtttttaacaatataaaaatctgctgtcctttctaaaacacttttcaggcttgcagtacttagggaaagggtctctggtgtcggcatcatgcttcattcattgtcaacatgccttttataatcttgtgtttgtggactatctggcggttacttgcttaatttgtactttggtaacaatcctgttagctttgccaaatatgtatttttataaaaatttaaaagctcattgtgtacatttttcaaaggctagctaactttcctttttaaaccttctttcaaaagtaattcatgcccctcaggacagcacacatagcaaggtgacattttgtgtgtaattttcaaaatattgactgtggtatagatagaatggtgttaacatgccgagtaaagacagcgaaaccacattatctgtgcttgtgagtgttccatagtctacagaatgcctgcctttcttggggccagggatggttctcagcaggaaggcattctgactagcctactcgaggctctgcatctgctatccctgtgccacaaagcaaagcaaagtcatgtcctgtgggttatctccccgagcacaggcaaagactgctagtgtttgtgagccttctgtgctttcaaagctgtttttgtacatgagttttgtctatgtgtgtttagagccactccattttagagataagctataggagcttcctgctttccacaaataagatcactcctgattctttttgtctggcatgctttccggggaggcagctagcacacacactgctggccttcccctcactgtagatgcccgctcttcacttagaacgccagtcatagacgcacagatggcacacagagtgctcctcagcggtgctcactgtccatgggaccgaccgtccgtcattttttggactccatcatcatcaagattacaggaggcacagttgaaaatgtgtctttccccggctctgctgaatccctggctcttccctgacttccttgcagcagtgaggtttaatggaatgcccctgatgcacatctagggagagatgcatcttgtacaccgtgggggtctctccccttgctgctcctgtaactcccattagtgttaatgggagtctctccaagtgtatccagggaaagagaaaccaaagtggtaagaatgtgtatttaaaatcactggatacttggggttttttgtcctttctttcctccccctacttaaaaaaaaaaaaaacaaaaaacaaaacaaaaaacaaacaaaaaacatgttaattgaaaagtactgtgagaaggtctgaaccagaggagggcccggacagctgggacctgggatcccacagctccaccaaaaactttgacctcagtttttcagccaaagtttgtttcttccacgtcttcggaccaagcctaaggcctgagcagcgtggggaacaagttggggggtgggggaagggctactggggaaactagctatttagaccttctttgacttggctagaactgtgtggcaggcctcacgtgtgagatgatgtcatcctgtctgctctaactccttgactttcaagctgacactgagagaccacatggggtgcaacatttgacccaattagcagttgatttaatctgacaggaatgtttcaattctaaatctctatttgtctaaataagtggtttttaaaggaaatcagtcactttattattaagtgatttttaaaaaaaaaaaaaaagaaagaaagaaatggtcaatgcttggaggtatctggccagctggagtgccctctagtgtctgtttacagaatgtatttaatatatgcctgggggctgggggaggatgtgataggggtggccacaagcactattagctcctggttggattctggggcttgcacatgcccctgctggttttagtgctctgagcccaagtgctactacagtggagaggccaatacagggtcggtctctctctctctctctctctccctctccctccctcctnnnnnnnnnnnnnnnnnnnnaataagtaaagagattttgtgaggacgggaaataatcgtttctggagccgggacatggtactgcgtcgtcctcccctcccccaatcctatcatgccgctcctattgtccctctctttccatcctaaaaaataaaaattaacagaggattctgttaggttgtattttctagtccttgtttattttctcacaaatttaagtgaaacggtgcatcccacaaatacttagattccatgttattcagattctcctttttaaaaaatgttaaagacattaaggagaatttaaatctcctaataaattaatactttgtggagatcaacactatgctgactgtactaatgtggccgtttgtattgaggttgccaagacgcctcttgtttaaaagtgagatgacaagcctgatccagcatccatgtccacgttatcccgtggattcaaagctgacattgcagcgatggaagctgtcagcacatctgtgttccgcctggctagtgaatacacgggcattttgtgtcttattgatataacttgcagtcttttttccttaactcatcagaactcaattatcacgaaattaaaaacaggaaacagttctcttgtgtaacaaaagcatccagcgtatttaactgtgtgctgtgttttaggagccacattgtgtgagtgacaaagcatacattatccagttactgtggtattacggagcgacgagcactaaataatcaatcagttaatggtgtgtatggcagtttgagcacttcacatccattgtgcttatgccaggagaaggatgaactgataacgccactgtgggagcctaatgtcctagacctgacgaacaaaagtctgcattagcaatttcacagctgcaaaagtattttagagacaactttgagagactttggatacaaatgctttatatttgagtattaaagtatgctattattattatgctcttatcaagtgttctaaactccatgaaattgttacttcagatatgtccaatctgtcccttagatattctgatggtacagtaagaccagttgctctttaaacacatagcgagtgagcttaggactttccattaaaaatgagcagaagcaccttgctatttgagaatgtaattgctacaggttatagattacagatagaagtggagggggccatgaaaaaccaaaccttctgaaacaatcttcatgagcatgctcaggagtagttgcaggttcactaagatgtaccatgatccaggccagggcttctttcttggcaatctaaaatggttctttaatttcttttgattcaagccttaaccccaagtctctctctctttttcctaggagataaaagcactgattacgctaatttttaccagggtctgtgggactgcactggagctctgtctgatgagttgtcctttaagcgtggtgatgtgatttacattcttagcaaggtaagaaagttaccccccaccccaccccacaaatgacagctgtcaacgggaaatacacagctcagttctcctgcatttaaatttacaacacaagggaaaaatgccagttggaattcttctaggtcctagttaacaattggaagttcacaataattaattattttgtcaagtgaactataatcagaatttaaacacaatcagataacaggattcaacttagccgtgtgtttacctgtcactctagcccttggcaggcatccacctactgccttatccagaaacaatatacttatgtgaaagttaacattgtaaggtattaggttattaattatgtttttcttgcttcttcctccttattcttctgtgtgcttattctgagtttgcctgccattctccagtagaaacattgtgtttataaaaaaaggttttcatctttgtgtaaacacattgggtgttccaacaatttaaaggctctatattcagacaagttgaggtaattttttaaagtttaacacactatatttgtaattgcagtaccaaagtatattgccacaaactcatctttatgtacatgagaatcgtgtctttgctttttaagacactgcactgtagaacctgtctgctccagacatcagtttctgatgcagtgttggaactctcttaattttcactctgaagtttttcctactgtactatagggatttttaaaaatgtttttaagcttatcttagcaccaaatcatgaatgaaaatgacttaaatataagcagggaaatgttatataggtcataagtctaacactttataaccctaaaattattgagctgagaaatattttggatatttcagaaagatgatatgtgttattagatacaaagagaatttgaaaataatgtcacattttggattttaatgttggttggctggcactgaaaatcttgacccagctggtcacagaatcttagagtgggcatcttaatgaagattgtctattcttggtgcagatagagtacatgagctagctatattatcttgactcctagagtagttcatttctgtcccttctgcttaatcccatcccatcccatcccatcccatcccatataaagcatgtacaataccaggacacattctagacatcaggaatcctaaagaataatacataagcacttggagattagtaggagaagtgcgagaaggaatatttactaataatacagattacgacttattgagaagcccaaagccaaggctggttgtgaactccagtcagcctcccaatggtgggatccatgggttgctatgttatcttactgtcatatccacatgacagcttttggctaagtctgttatcaaacatttaattgtcccaagttaaaatagcagcttttaaagttaattacttaacagaaataacactgtttggcccagttcttatcaggaaactttcctgaaattcctcccaaatttaccaagctcactgtttatttaactaatgtagctgtgagtatataaaattcaaaggttgattaacttgtatttgaaatttcagagtgtagggatatgtggtacagcactgtattcctttgcacacgtggagcttgtaaagcccacatgggctgcttctttttttttaatttattttttattagatattttctttatatacatttcaaatgctatcccggatgttctctataccctccctccgccctgctcccctacccgcccactcccgcttcttggccctggcaagagaggccccttggtattggggcatataaagtttgcaataccaaggggcctctcttcctagtgatggctgaccaggccatcttctgctacatacgcatctagagatacgagctctgggggtagtggttagttcatgttgttgttctacctatagggttgcagacccccctcagctccttgggtgctttctctagcttctcctttggggcccctgtgttccatcctatagatgactgtgagcatcctcttctgtatttgccaggcactggcatagcctcatatgagacagctataacagggtccatatgggcctcttcttaaggccctctctatggtaccttgggctgctggaaactcaggcagacaacccacccccaccccctcccccaggcaaagtggcacggacttgtctcacttccgccatttcctgttcctgtgaaattaaaggtgtagtcctagtgtgcactgtccttcctggatgctgagggagggtagaagttgagttctctgaaacctgtttaagacctggggttagaggtagcccagctcacacgtagccttcacttccgtctgaccatcgtaaatgctgttatctgggagagaactggcctcctctttcagacctttgcaaggctcgatgttccaacaacattgggttccttccagagacagcattttagttgggactaattttggtttttgaaagaagagccaagaaagatgaacgtgttagtcactgtatctccccatagctaaatgattgatactcacagtcagcagctgtaagcctcagagagcggtgcatggtaccatagagagaacagcctcccggctctgccccaacgctgctgctgactttgctgggctctctgctggctttggaggtgagtgtgtgtgtgaagattccttcccaccttgtactgtgcaggtgcagaaagaaacacgggatgatctctcacaggtgctgtaacctacggttttgtccaaacctgggtagacacagaccttaagttaataccataactgtgtttaatttctgaatgcctaaaataataaattgagaactcaagatttttcagaagaaagcagtggatttctagatcaaggtgggaccagtgctgtatatttttagaaggataagcagttggctcagcaggtaaaaatgcctgttttactctgagaacttgaattcaacccctgaggcccatgcagtataaggagagaacacataagcaaacgtctaatttgattcttaaaaacagaagtagtataaaaataactactattttgtatgactagaaatgtgtttaatcttagagtattatctagatctctgtggtgatggcatgaagttttcaccattctaatttatttttttacaccatctagtggctcagaatgagtggtgcaggtaattgcagctaatgtgcacaatcaaactggtgtcattaatttagctttacatctagctatgggtgattactctcccatctcatgtcaataaagtattagcattaatcatgaaaaattgtgttcatcattttgaatttagtgtggaaattgtataaaaaggaagaatatattttaagaaatctagcataatatttgtgaagatatagaaaatgaatactttgtaagaaatcgatgccatgccttttttaataaataaaactatttaaaaagttttttaaaaatacaatttaatcttagaaatatactgacttttaatttgaagtattatctatgatttgacttactgcccacaagtttctcagttttgaatatgtccattttaaaaaggtaacacaaaatagtttaaggaaagatttttttaatatacatatctagacaaatttaaaaatcaaatggtatgctttataataaaagacatttccattttgtaaatgtagtggtagaaaacatttcactgatttgatggttaggcgattttcattatacatctctatggaaatataccttatttttacatttttcccaccctccttctgtcctccctcctcctcctcctcctcctccttccctccctccccttctcttccatgaacatcttgctggcaagttgctgtgctcagttagccgcaggatggtttatttatgttaagcctcttttgagttacacagatcttaaccaccatcaccctttttttcttcagtgaaaatcaaatgcaacatacaataaagaagagctggcagacactctgcccttcccccttccctctttaacattttccaattagcagctgccatgtgaccctctggctgagttacctcctccttcaaatatccccacattttttttttttttagtttcaacctttgaacctcactaatgtaaatctaaatactgtttgctttaaatggagacagtacctttttgctttattgttctcttgatgttgttttcttaatgaattaaaataattcagtattttaatgtagatttagaagtcgttttttttttttttctcctccaaaaaaaaaaatacaatggagcatattttcagggacaaatgaaggtataatttgagtttttttttttttttttttttttttttggtttttcgagacagggtttctctgtatagccttagctgtcctggaactcactctgtagaccaggctggcctcgaactcactaatccgcctgcctctgcctcccgagtgctgggataaaggcatgcgccaccacgcccggcataatttgagattttcgtgataactgttttgttggtgaattaactctgaaaatagacaatgtgatctccggcttttttgttttaagagagaaaaattcattatcagaagtagaaaatcttttagtttttaatttcagttgtttgctgaaatccagttgtttagaaaatcatgctaaatattttactatttgcatctcaattttattttcctaaaccatgggcattatctggtaggctagtggtattttcctagaagcatgtttgtgcaacatttgtatttcatcagtaggttccaagtcacacagcagcaggctaactctctgttcgtgttccccttctgtcctgctgctctgccttgccgctctggactcacaaactcttgcagtcatctttcagtctgtacttgttggtacattgctagccacctcctcgtcctaacttttccagcaacaaaatgtttttagagagctatccttcagcaggaaagagggatgctgcttaaagctctggaatatattcttttttcagaagtatgcatgactttagctttgctgcctttaaaaaaatattttcttaagaccagaatgggaactgtagataagagagtggtcatgcctgtgcaataaaatgtatctgaggttgtgttggctgaaggtttaagcagtgctttgtttgcgtttggttaatacgtgccagtgattggtgaattgtggctgtattgaacatttacttctgttagagtacaaagatttactctgtataccttttggggcttcaaacctgtaaaataaatgaatcaaagttcttactggcaaagacaaaggcattgggggttttgtttgtttgtttgtttgttgttttaatatgtagttctcctagtttcatcatttgtgctcaaatggtccagggtagcacaaatagaatggccaactactaaaaactgaccagggcagctcagggggacaaccatggctgacactgaatccccgagaataatccaatcctgtggccttttggaaggaggggtggttttttcttggaattctgtttgtttgaaccggacagcattttatttatttgtttatttgcttgcttgcttgcttgcttgcttgcttgcttgcttgttgtccctttgggtaccgggggccccatgcagcctgcctctccagcagtgagagcaactccagccccacttttccaaacaacattctcaagtatttccctgtctcctctcccataagattaccttccgggacaaggctgacagtgaaggggaatggggctttagagacccactggtggcccaggccttatagtgacttgaaagagagtgagcaggaagacagcatcagtgtcagaggttcctatgaccatgggaggggcagtcgtgggaagtagccacgtgccagggtctacaggactctaattctgtgttgaataaccaaaagtttcccagaagcaaaccagagccataaagcatcacattgtgtgtgtgtgtgtgtgtgtgtgtgtgtgtgtgtgttttaaattgaacaatctgtggtctcttgtaccctttttacccaacccctgcctcagaaatcaagctctggcccagtgcatgccattgtaaactttgcctttgctctttgtgatgtctcctctatctctgtagaccgcgcagctagccgttcttgggaggttcttagacaggagagagtagagacaagagtcagaccgctgaactgaaaatcttggggctagagagaaaggttagccattaagagattaagagcacttactgttcttgcaggacctgagtcattcccagttccagggggctcacagtagcctgtaactccagctggggggtgatcctgcacctctgatttctgtagaaacctgcatacatgcgtatatacccccacacacatacacataattaagctttataaaatagatgtttaataaattaacaagtaacacgtgttcatagttgaatggttagcttttttttttttttaagtagaagaggttcaggggaaagcttctatcttctatttcttgttctttgcaagatcagatcccttttgtttcctttgcttttttgttgttgttgttgttgttgttactttgtttacacactctgaaggaaaaagaatcttgcattgaaaaggctttctttcagtgtacacatccaggtccatcatttaggaaagctggggcagaaactgaagcagaaaccacagaagaaagcttactgccaaggacggtacctctcgaagtggcctgggtccctttacataatgagcaatccacgtaatgccccacagacatgctcccaggccaggtgatgggggcagcccttccccgaggtttcttcttcccagctaactctaagctgtgtccagttggaggcgcaaggcaggggctttggaagtgttctgcttcgttgttgttgtgcttctatttggcttccataattattggaaagggaaaagaaattgttcaaaagcaaacacaaacattgtggtgttatgagcacttgttgtgtgcctattttgcatggtacttcatggaacatatatgtgtgattcagccttacaggaagtctatgcccaacagtgtttctgtagagactacccacagacacagctaatcagtgccttctctagaaatcaatgctgaacccaccctaagtcctttccagtcctggcactgtgtggacctcagttaaaaggttacctttttgactttttgtatcagaacattaaagtatctcagcccagttataagtaacacagatggttggttgatttttttaattagttaattttaattatttatttttgatcagcagctatttgttaaaccctttctgtgcagagaactagttggagctggacccagagaagctttgagtggcttcccttccaggatcctgagctggtggcagagacaaggagcctaagaaacagtgctaataaacagtcctctaggctgcccctgcagagcggaggaggaaaggcagagagatgagcgtgcagtatcttagaaaggattccaccaagttggaactaaagtagacctttacttttttcagccaagaagtatttaagtgtttgcttggtcttttgtctgttagccataagctcttgtgccccgattggcagacagagggacacaaggaagccaaccaactgtccttttctacccagtttgcccactgcttccctcctgtgccttgggtgtgagccacacctgctgtccctgaaaacagacatttttccttttaatctcttcacacaggccctgcattactctcttcattctgtctggaggctccacctacctgttggctttttctacataaaactacaaagccccaccatagactcatatgcttgcccgtgtgtgcctcagtggtcagggttaagatcagctcttccccctcctccatgtcactcctcctttccctgcccagtgcctctcctccctcacctttcctgctttactccttcttgctactttcattctgaacttcctgtcttaaagtatttttgtatttagctaatacctcatagaatgacaagtatttaaaacacatttactaaattatagttaaaattaggaaagaattctggcttcataaggcaatgatggaatcacgaaattaggagaattttagtgcatgcccttactttacaagtgaagaaattaaggctcaacataatcagagaaaaccaaataaagacgaaggatggaagagctacaccagtggagactttccaagatgatggggtttctgtagccaaacttgtacctccagcctgagttccctggcaaccaaactcaaaacagaagagctagggagctgaaattccttccagtcaaaaaaggagagccctggctttgcccagcactggctgctttgaaaagctacattctcataggaacctctagaacatgcgtggatgattgaacctcggcaactttttctaataaaaaagggggcggggagcagggcaggtaatagcctcaataacaacagcaacaacaacaaatatgtgtgtgtatgtaactaagggcttctacaaagacccaagtgtataataattcaacttactgatttatattaaatatgaagttgaattattatagtctcagtgaggaatagaagcattacaggcgagaaggagcttgcccaagttacccacttcatctacaaccaagacaggcaagaagacagaaagctcaagaagatgagaagagctgaagaccccacaggcgcctccctgagatgtcacccaccccacccccagcggggctgtcagtgcttagtcctagttggcttatttctccagagaaacggaatcaggtaggtcctggttcctaaggagacagatatcttcccttctgaagataagatggaagctctttagacatggcatcttgttgggtgtggtggaaaacactagccagcaacctgccagaggcaggagccctgtgctttggcttgcctaagttcactgtgtgcatagatcagagcaagtgtttggtaaatgattcttagataagtatctatgaagaacgatgtattcctactagaaattaaatttattttcaaagttggacacttgatgcaccatccaatgatctgggatagtttccagtgtctaccttactgaacatgattatatatgcagtatcgtggggcatggagaagagaacaaggccttaccctgagctcacgatgtttgttctttgctattgaaggaataaaactgtggtgtgtgaaatccactgaggatgaaaagctcagcttgaagtgagatgtgttagtgtgggtcaggtaattcagtgtacaagtcatgccagttgactgactgagtgtgtcttgggcattgaacaggatcttgctgtgggaggggtcttcctgggaagggcactccatagacacagacaggagcaagtaggaccaggcagaccacagaaatgacaggcaaatgttgctacagagagaagctaagcagaggatcttgtagttacatgtgaggagagagttcttcagcagcagcgtacactgatgcagacaggtcttggaagatcagaggacagagggaacagtgcagccattcccagtgaggtggtaaagacctacattgaagcattgacagctggacacagtggcatgggtgaacccaggagccgtcacggagatgtggattggcaggtgacaaaccctgacactccagccttctctactgagcttcactgtgagtccctccttgcccaacatgtcaatgaaggatcaggcaggacagccatgtttagtccacagcattgtaagtatttactgtaaaaatttgaattcagtatgccagatctctgaaatgtaaaataagtttgttaggagaattaaattcttacttgcccatgtttctccagctattaagatagagtggatgatgcaaaacaaaaaagaattctacgaactggaggaactcagtcacactgagttctaaatgataaaccagggatctggatcccatagctgttgtgaacccagtgcagccatggaaccatggggctcacacccatctccttcagtgctcagggaaccagcagggaggttagatcatcatgggtgtcaagccttgtgttgctaagggaaccattaacatgatgagaaagggaagaattcatacaagttctacacacacagacacatacacatagagacaaacagacagacagacacatgcacacacacaatgagataaccttgaagaacgtctttatatgcttaaaacattaacttggtttttatctattaggcataattaccatatatggaaaataaaggttaaatccactgattcttaaattcaccatgcttaatagtctgtggatgaaattgctttcatctcacaaaggactagcatgtgtcggagcacggatgtatgttcagacaaaggacatagagactgcccagcgcttgaagcacctgttgccttcagacatagcagtaagggaccgagaccctagaccctgctagggctttaggtttctgtgaagcagatttgtccatccagtttgcagaaagtggattaacatactcaggagaggagagactctggcacagaaaaggacttacgtgaattgggaaccttattcaagtgtaaaataacacaccagcagagaggaaggctgagttaataagcaaatgtgaacatgtgtttactgctgtgttacacaaagtctgtttctctttatcaaaactagtccttttccccagccttattgcacaatctctttattgcccagtaaatattagctataaacaaataagatgacttcagtggtttgacagctgtgacatggagtcagactgcgaggtttgttaccatcttactgttatttcctgaattattagaggaatttgactttgggtttttgcctctttgactgccacgttacatttgcttggaagccatccatttctcagatagcgaattccttctgagtgctatttttatacactaagcatcactacacctctggatcttgatagcattactgcgggaggagaaagcagctttgtgttagtaattacctaacattgtcagaagctgactgcaggcctcttcccagtgataacagaataaccgcataatgtagctttatagcacatgattaatagaaaataattacacgtcctacaaagggatgcaatatttcttataaattgactaaaatggtttcctgtagattaaaggactcttcattattttatcagtcctcccgaggtacaatcagttgcctatgttagcatttcagttgatggtaagagccgaatagggtgaaggataccagatggcagacctcatacctgagatcttgagagcagtcagatgatgcgatgcttcccgacctgtcaagatttacatggcagtctggtatgggcctctcctctttccctcccctaccccttccccatcttttctttattaataaggtttgaggggtgatttttaaatgatccatctgtggctttctagaacgatgctataattactgtgtagattttaagacaacatgttagttactgatggcattatttccaaccattaagcaatctatcatttgtgatcacatatgtttggggcaaagaagctagctttctgttttggaaggaaaccttgcatgatgttgaatcttgaggctgaagttgagaaaactgttctagtccaaggagcgttttcatcccgatttatgggctgcagatggtttaattgggattcatgttgctcaggaggctcgtccagaggacggtggagatgcaagggacgctcctgtgtgcagtcttgttgactactctgacggctgcagtgcacagctgtaaatctgccttctagagtttttgtctcgctatattttatcttatgtcttcatttcacacaggagtattacatggaattatttataaatagaaagtaagaaatattctgatttttattcttaccattttctgaatatgatctgatattttagagcattttcatgaggtgtgtatttcatacatgggggtgtattttaaattaaatgaagcatttatgattacgtattgtaacagttttctttctctctgtaatgttctgtgtaaggggtctgtttccagctgagaaagctcctctctgttgcctgcaactgaccattctagttaattacccttactgctctaccacacagagcatcagactttctcaagtaaaatctcttgtcttaatttgaggatttatgctctttgggggaataataataggtccttagttgacagtacagattatagccaaagcagaatattgtaaagtcccataaagctccatgacctgactgttgtctccaggctgagcatcactccttggctgcagcttcaggtcagtggtctgccctcccactgggtgctttctgggtctcctattggcaggctagaccctttgctcttctgatgtaatcggttgggggggaaatctaaggctggtattgggtgaaagctttcactcccagacttaccccattgatccattttgatatcttacaatacacacctttgatctgtaaagtatttttgtttggctaagcagttgggctccagttgtattcatttccttaaaaactgaaaaggacagttttattgggtgccttctaggatacagtgattgctagtctagttttcagtaagttgatatttccttttgataaatatgccttatgtagattacatgcatcattgctgagttctggaccgagtgttcattgcttggacagttttgtccactaaagttgcactatcagtgaacttttaaacttaatacctttattccaccacctcaagaatcaaagctgtacccttattagaacaagaaatatgaggtaagcctttttgccccctctccttcccgctttgttctttgaataagcctaattctgctactgcccaccactttaaaagcactcatagattttatcccttaatttataggtagactgtctgtcgatacatacatgctaatgttgctacatttgtattgaaggatagcataattttccctgcgatggtcaatagcatacaaatcaatatgaatgttaagcctgcatgtctatcaaccctcccttccctgcacataactcagtgtgcatatgcacatttatctatgactcagacgttggaaaatcataacctattgaattactttggggattgattttaaaaatttatcttatatgaaaaattaaatttgggtcttaatgcttgtgcagagtattgcttttggaagatattattcttgaaacttgtaattcattttacttgtttgtatctcactaaacataaataaatttgagataaaaatacattagtcaatctggcagacagaggccggttaaggagggttcacagtgcctaaagcaatgttgtgtctgtcagtggggaatggaggagagaagagagggccaggtttgtttatctcacattgtaacgtgcagagcacctcatcagtcactctgttcacagattaatattctgcctttcaaactagaggactttcctttcctcttgatcttccacactgcaagcaaacctaacagaaccttgactttaacatgcctccaagtttaggcagtccaggatcagtagagaaacaggaaaagctttgggatattattttcaaagactccacttgtgaattattttgtattggtattagtgaatttttaattttagtattttcttattctccactttaatcatctttaaatgtactagattttctgaagaaggggtgcaccctgagttctaagccacttaagtttaatcaggacttactagtttgttgttgtgccctcccatccccaagaatgactttggtccttgctagatagataataagcttcctgaaggcacgtgcaacccctctggcttcatggctttagcctacggcgcacgaggctgcactgtggagagaatgagagcccccgaaactagctccggctgtgctcattctccacattcttctgcgagtgactgcttctgcactctgcccagtaatgaaaacgttttgtgttgtacagtaatttaaatacttgccaacagcagtgggttttgtttgtttgttttttttgttgttgtttctgtctgtctgtctgttgttttgtttgtttgggggtttgttatttttgtttctttttgtttggtttggtctggtttggtttattcaaaaacaaaaaggatggaaatgttccatttgcagctccagcacttgtagctttctttataaggaatcatttctaagaagttgcgtacagacagcactgtgcttgccccaacctcgtggctaatcctgcgtattgttttcaattaggaatacaatagatatggctggtgggtaggagagatgaagggagccattggcttggtgcctaaagcctacctaatggagatgtatgatatttgagagtctgggtaagtacattttaatccaatattctgtaatagctcttatgttctcttgctctcttccttgtgtctttgcctttttaagtctttgtagttttctgataacataagtatggtgccccaaatctgtttttatttttgttttattttgttttgcttcagctttaatttttaaaaataactctagagaatttactttggaagtgaacagattacttaaagttcctttgataataaccagctgtgttcgtaaacctcctcctagctagtaaaatgccacttttatggccttcctgaggaaattaattgaaaaccgttgagcaaattttcacttttgtttgagtaaaaatgttttttctttctaagcaggataaataaagagcatttctactgaagaagaaaacttaaatgtagctttctctttttgcctgcagagaagtcttgtgtctgtctgcaagtgccttggaacatggaatgcctgagtgcctgctcggagccaccttcctttgggtgaacattcctgcctcagctgccattcgatgtagtcacgcactaaagcactctgatgtcagattgagcaggcagtgatgggttacattagatacaagcagtagagataagacctgttgctgttttgcaaataataattagttttaatttacccgtttggtttgtatggtagaattcactgtgattgtacgtgaatcttagtcattgaagcgccggtgagggttgctgtttctcttagtcgctgggtgtaagttatttttagagtgccacaaataatttcctagactttgtacattttgagtcaataataaagacttctttaaagctgtagagatgacttagcctggtattttattcttcatagagtaataacatgttttcattaaagaagttgtatagactcacgggtttacctgctgtaggtaagaaagaataaaccggtgcttgaattacagatagagggaaagtggcagcctgctgtccgctggcgcacagatcaaaccagagccgggttgctgaaagcccttcagtatcctaatttgatgatgggcttgccagtgttttctaatataattttatttaaatttaatgaaatcaaagattcataagaaagcccatttaccattaatacaatggtataaacaacttgggcatgttttcagagtccgaggcaggcaggtattcgctgacctctctgactctatcactgcactatcacaatcccaccgctaagtagcagtcctggccgaaactcctgtgcgctgctctggaccaaacggaagagacagactcttgcgggatggcagcagttggcagccagcagtgagtgaagggaaggctgacttgctctctgatactgctgttgatgcatgggtaagggttgcagaatcctgactctttcatatatagttaaaattggggtgtttttaatcatctctagagacggcaggagagccttactctgtctcagatgcaccagtgactagatattttggagtaaatgggatctactattgaatcattctagtgcaggttctagcttttgcctaattttgcaggtcggaatgcaaatgggctgataatattttttaaatctccactatttatgtaaaactatatttacaggcaatagtagagtgtttattttactgttatactatgtatgttgtgatcactcattttccaaagtcaaagaaaaaaatcctgtttacctatgtagacatagttcaagttttcagaaattacatttgtacagttactcatttcctactaaagtgtcatctaaataggttgaaatcatcttggcaaaagttagacaggcagaaattaattcagtggttcatctttcagagccagcatggttgaaaagccaagcctagcctatggttacggggttgtgcctttaacctaagtggccagcagatggcagcagcttgtcgtttgcacgtggacccacttgggaacccctcccccaccacagccgactgagaggccgtgtgatttccgtcttcttttccagttaatccaggagagggagtcctttgccaacggatggcccccgtttccagcacagaggccgctcttcccagagccgtgtgtggcctttgttcttttctaaacgtgaatatacatgggagatagaagactggaaccaaaggcctttaaaattgggaaagatgagaaaacctgccactccctgtgctttaagtgcgctttctgttgagttgataaactcatctttgtgctatgaagaagtttctctctacccttgacagtacatcacattctcttcaagatcataataacatcattaatgtgaatttaaacaacagggcttgttagaaaatatgctaattgttatgttctcattatgtttgcctagcttttatttgtttttctatgaacagttagagagctaatttttctgaaaggtgattgtaagtcatattttatatagcattttgcttgatggtttgctctgtactgaatttgtactctgttgccattagatcttacaataatgttccactctgcaaatttttaaggttcaaataaagtttaattgtttgcaaactgttatgatgctaataattcaacagcctgctgtgttactaatgaaattactttgttatgattaatttggagaatagtgtgttgattgtagtaattaagcacaacaaggtgaagtaaatgatgctaatgccatctggcctccaaaccgaatgaagaaatgaaatagggctgtcatttgaatttattcaaagaagtaagcatcgtgcacatggctcccatgtctgtggggtttgcacttaaccaccgctcaccccaccccattttgaccacttttcggcatatgacaggtttgttttttgttttttgtttttttaatgaaaaatggtgttggttgtccagtagttgatgtgaatacttggttttaaactgattattttaactgtaattcaattacagataattacatacagtacataggagcgtagcgaggagaatcactttgcagccatctgtaggtaaagtcggtacatgtgggcctttttattttctgtcagtggagaaacactttggccctagcccttcacaagtagcccggctccctttgcttgttttaaagtgtttgtctttactggtggagtctactcttgttgcttaggtacagccatgagatgtggtacagcctggagcagggcaaatggtctccagtaaacacctgtgaactgccttgataccctacagtaggtcaagacttaagatttaagaagaggggaaaaaaagaacttgatctttgtacccagacaaacaaaaaccaaacagccacaatccttcgcaaccggtcctctttcctgaggccttagcagctgggcaccgggtttgtcggttaccgagtgtagcaaaagtgtaggtgactgcaacatcaagctatagcactgtgcttagccacgtgttcaaggttatgtaactttttcaagtgagaggcacaggtggctcaaggagcttggagcaagcatgtagctcctctttccgagcaccctaagctaccactgccttcattaccctcaggcaatgtcagaggagccagctcccaccctgtaccttagaaaaaagccctgtagaatttcaccttgggtggatctgataagaatttcagagtcaagtgtggtggcatgtggctgtgatagaggcaagaatatcaaaagtcccaggccagtctgggctacatagtatcatcctgtattaaagggaatcaataaaggaaaaatcctaagaggaaaagtttcacgggtccaattataatataattattgtgctttaaaaaaaaaaccacaaaaacaaaaccaaacaaacaaaagaccccctctaccctctgacttctcaaaagtcctgtgatgatcatagtaacttggatgtgtacagcccccagatgagaggagacactgctgtagataactccagtcaaacccttggttagcatcaacccgtaacatttgcaatggggatgagcacaggaaacacttgtgcttgtggcaaagctgcagagtcaggcctcctcccccagcagagacaggcatacacacacacacacacacacacacacgcacacacgcacacacgcacgcacgcacgcacacacacgcacacacaagtcctcaagtgttcctaacatcttgactttagattctgtttccccaggaatcttaaaggaaccttattttaagagtcttcctttttggggaggcagaggcaggcagttctcttgagttcgaggccagcctggtctacaaagtgagttccgggacagccagggctacacagagaaaccctgtctcgaaaaaaacaacaacaacaacaaaaaaaagttttcctttttattatccattactcaaatggtaagatagtactgcacttgtctgtttcctgtttatcggcctcaacttttaatataaaaacatcactcctgttagggtaaaaggtgcctcatgaagctcaaacagcaatttagctcttatttgagaaaaaatgtcacgcagatactctcaggggaggaaattaacaacaccaaaacctgccagtaacaaacagcgtcctcggactaggacagggttcccacaaataagctgatccccacactctgtcttcctctcccaaccccagacagtctgtataaaactaatcagcctgcgcctgtcacgttccacgcggtgacaccgatttcctaagagtggctgacgttaccgtttgcggtgctatgtacttttctcgattctcacaacagccctagtgagttctgtttgtcacttgctttcctggtcacagtcacctacactctctgtactcggtaactgacaagcccagtgctcgtgtggatgtagttaggatgtagttagggacgtagttagctgctaaggcctcagtgaagaggacggttgcttattcagagcatccttggaaagtttgtctcaagtcctaggaagtaacttacttggccaagtccagcacctacccccactacccctgaattcagtaccgttggattaagaagtactgtgagggattcaagcagtgcacacagtaggtgcacacactcagcagctgtttgttgaccagtaataaggactgcagtcctacacctgtggaggactctgagcatagacaacctgacagttgaattcagctcttctcctagccaaagctgtgataagcagaccatatatgtaaagcggctaatacactttgatgtggcaactcttctcccatgagcctccagcacaaccaaaggtgagttagctatggttgcaggggccaatggaactgtttcctaacaagcctttcccattctctactttctcatccaccatccaaggaccccaacagaagcccggagaggactgtgcagtggactgcttccgtctggggtacttgttttgggtgaatagatctcattaggtagagttgggcgttgctgttactgttgctgttgctgttgttgttgttattgttgttttatgccagttaaaatgttacttataaactgtttagtccttaaaattgccaggtgttataaaatgtgtgtcatcttataactgagtaatagcaatgttctgaggtaagaatttgtcttaaattttgtgggactctctggcacttatatactggacactatgaacacgaagtcttattctgtaagtacacacatactcacaaagcatcttgaacagggctccccaaataaagttttctgatgcaatcttttaaataaaagacttatttatttatcagttttatttataatcagaggtttggtagggtggggagcaaaaggattattagaggaggagccagcactcacagtggctctctggaatttaaccagaggattgaatcacatcacatccttcgtagttgtagataatgatgtatttttctttctcgatgagttctttgaagtgtgtacatgactggcccccacagttgttcctttcctaggtagagtgagtgactttgcactgtcacgatagccagggacagccggataaccaaacaggtctagttggtataaagcaagctgtcctccacaggtgaatactcttccttcccacttcccagatcaaatgcctgtggcctgcagcatccgtccctccttccttcccttattctactgtcttcctcctctttgggatttcccaaggattgcccgtgccctgagtcctaaacagaaggcttggcacagctgctatgagcagtgccgctgtctcacctgtggccttggctgcccagtgtattcaccttctttattatcgtctcacacttgctatttcccttcctatctaattaaatgatcccactttgaataattacatttaagtgctaacagcagaagaagggcatttcaaatacagaattggacagcctttccacagtagattcacagtcactaaaacaggatggagcccagggaagaacagccttggcagccttcccttgctgcagctctgagcaggccaagtcacagatcatggcctgagactaagagacaagcatctcttgatgttgttttatctgcccttaagtgctgtctaggaaacaaacggggaattgtttgtcttgtgtattactacacagggggaaggagggatgtttaagggattcaatattggctcggtcaagaaggttgatttttatattcatctttcaattgaaaaaaattctgaacttgtagctaagtgagaggagtaaagggctgtgtgtgaacaatctcttttacacagttactgccctttattactataaaatcaaatttctagaagccaagagtgactgtttagggatgaacactcttcctaggggtagggacagtcctcaggtaacagtgaggagcaaggagagcagtttctccctgacttccgggtgctcccagtcaccctccctgctgactgctagtgctcccagatcattccctgctcctggagactgggctcaggggagatgcgtatttggaggggtctgagaactccagagcagtgtcagacatggctttgctgcctttgaagatctgggaactaaactggaaatggtaaaagtaacaacttctcctttactccaaaggcaagggggccggaagcaagcaggtccggctgcagcacttgcaacagtccccatgcagtgctggctttgctatgttgtaaccattgatgttcaccgtcctagagaagtttggagttctcccatcttcttttaaagcaagcttcccatgcaatagtcaatttctatgaatggagatttcaaaactagtgacctgggtctgtaaagtttacaaataagtgggatatttaaagccgtgaattcgctttatctaaatgtcatctggatgcattagagcattcttaaacgttctggaagcaggcaacagatgctcggaggaaaatctttgcacagctgcccttactctgatgcctgttagtaagttgtgcttccctgtgtgcctgtgtgtttgtgtgtgagccgctcgctctttctaaggcacgagttttcctcaggtgaatggctgtgcatgcgatgctttggtctgactgaattcgtctgggaggggagctctagtcttagtttatagtttgtgaaagtcaaagactagaaataagggaaaaccagaacctcatcacatgtgaccttaatgctttaatgttataactttaggcaaagctaattaaaaatgcaaaggatcacttaataatttaaattatctaaaaaattaagcatactccttcaaataataatggctttcatgatctgattttttttttaaaaaatcatttcgcatgtcttgagtttcttagaagtttggatatcaaagcccatcagagtttatttaagattattaaatatatttgttatgattatgcaaagtcaccaaagattctttttttttttttcaaattcttacagttgtgatccatagcattgttagacataattccagggacatgcctgataatatcattgtagtatgatgttaatttttaatacttttccttaaaagctcaatttgcgatctcactcttaattactttaaaccattattagccagtcccaataaccgaaaaacaaactcaaaaagccctgttcttgcctgtcagtttttgctttctaaaaatagcattctcttattgcagcttagctgacttcagccgggaaactgctcccactgccaccgccctgtatttccttgactattttacagattctttggtaacataaaacggtgtgggggtcggggggagtagggctgaagtgtgcagagcagagcgaggatgtggcagccactgcccctacctggagatcaggctgcttgtagaacttttcctccttttcctaagtgaccacagaagagggttttgtgttctgaacacacatcttttgcttcccttggtgctgtagttgatagcaataaatactctgtattgattactacttaattctaatggaaatatgctaaagctggaaatggatcgcagcttagtattcagcaccttaattttaaggcagtttctaaattttaaatattgatatgattgccccaaatgtgcttctgttcctggacccacttcacgctatgaaatgatcttcattttatgtcttttgtaaagataattttgttcgcagtatattttcccctctggtatctgactcatcacgactttcacatcactgagaaatgtgtcatttctctttgtttagctccatttgaaaacacagagagcatcggaccagcacgttcggggtcagtagagaagtgcacaaagggaaagaagaagaaaaggaaaacgcgagtgggcaagagtcatggagagatttaaatgcagtcaaattcttcgagtgcacaatttcagcccagcaagctgtgaggaggctgcatgggggctgcgtgggggctgcgtgggggaagcttcctttccagacgaggtttttctcactgaaaacatgttgagaagtgtttcatatgaggcaaatatgcaggagttttctttcttggttttttttttttttttttttttttttaagaaaaggataaagtaaggaatgccccaatacacagctctaatttattcctagtcaaaaccaggtcgccgtttatacactaggtattaaaagctagttgagtcattagaggtggtctttcaaatgccctgtagtaagatattcaaggtgagatttattttcaagctatttcaaggccacgggggatgttgtttcccttacgaaggaaattctgaatttttgctgcattgtttttagtttttaaatatatgtataaaacagagaagcagcaagcaggagcggctggttctccgagtcctaatatagtatgtcttcttaatgaacctgccgcagtgcccaggaaacggctccgtgcaaataaacatgctccaagtgatttagccacaatgtccagactgtgtaaacatctaattattacaataaaattgtcaataaatttacattactgctcccttttcaaatgttaaacaactttttctttgcttgataaaagggcataaattgtatttttatgtgtttgtgtttttgttttcattatacttcttgaagcacaccagacaaaagactctgagccttaatgctctgagtgattcctagaggtggaaaacttgtacagttgtttattagcataccgctctgcgttccctctcacagtgaggtggacgcagcctttacagtctgatctttagtcacggcatttctacagaaagccataaagctagcgctatgtagccactgcagctttaagagagacacaaagaattaaggcctctataatccactattagaatggaaatttaagttacattagaagcaaaagataaaacggcaaaatgcaataattccctttaacaaaggttatgtccagtttttggaattatgatatcatgttgagcataatggtggaataccccccacacacacacacgtgtatttcttatataactggtacattaacattagaaaagcaaagcgatattgaattctaatgaggtctggcctatatgctctgctaagagaagaatgagggtaattcatttgtattcaacaaagcgctcggaatccacgcgcatccctgtggctcagcgcacggggctgctcatctgctcctccttggaggggggagtggggctctgcacagcatcagagctggggaaatagttaaccactttcctgctagctcctacctcctaatgacaatttaatatggttggttgctctaggtgtgccttggcttcacctgttcaagtatcttagaaattgaaccccgtggcagtagcagtgcacctctgtaagagccaaagaactggagtgaaattcaggaggcccgtatgatttctccatccttggtaaacatgtcgactttaagtaaacaatgaaatgacggtgaggtgtttgttcattaaaaaaaaaaaatctgaaaaatgcaccatttgatctgatattggcgttacaggaaaaaatgacgttcatttgtgagtcttgctgacattctgagaaaacagcccattttggaaagttatatttagcaaaaccaaggaatgaaagattttagcaaattgccacgtaaaatgatctgcacaaaaaggcatcagggaagtgagctaaggcctgtgccaaacagatggcaccccctgctgtgtttttgattgaaaaagaaaggtaacatttgcagccacgtcaaagagacagtgatcagctaaacaaattggtctccgaagtaccccattgctggagcaaacccgctgcagggtacagccgaggctgtatttcaaaataatgctatgtttgcgtctttcctaagcgaggggatgtgtcccctttccgtagagcaaagggaagaggaggtctttgttgaagcccgctgctgtgatagctgcagaataagcaatagaccactgcaagtaacacaagtgtccattttcccctgatcaccacccattgccggcagaatattcaggaagtctcagcagctccacggctaggtttacactctcctgcatacggtctctggagcttgctgaggagaaattggtatgtggcttccaaacaaacaataccgaagcatcacaaaagcatcactgggctggggaggaggaggaggaggaaggggaggaggtgactgaaggaaaaactctccttgcacttaaattcagttccaaaatacaaacatcaaaaatggcaaagagcatgtcagtgcgcaagtgtgagtggggaggggatttttttttttttttttttttttttttttgggctcatctcagctggcagccttattccgcttcagtaaagacaaggtacagaaatgtcctttgggtgacattcaaaactcgatataaatcctctgctttatgagactgcagtgcaataaattacttagcctaattgtagatgtaatgaattaccataattagtcatgggctacattaaattaatcagcatggtacattattttgctaaattacatctttgccttccaaagccaccagtgcagcaatcagtgtttttttgcgagacgggaatgatgctataatgagaagcctttctgctcctgagcagtgacgggatatgaattttgatgggagggaggaaggtttggaaacactggagtttcaacttgtgcctgaagtgtctttggttgttaatgataccctggtcctcctgcaggggagcagtgggctgtatctttcaaaggttgtagaagaatcccctcacaggggaagaaaaccacttagatggggctttaaggcaaataatatagctgagccaacaagtcacaaagcagtggggtggcagaaagataatgtcctcgaaaatattaatagatttagaatgatctcttacattggttgatgagatttatagttaccaggtatctttttatgatgatgattattattcataccctttggatccaagataaagcctgtagctattcttgttttttacttaaacccccagctgttcaaaaccttgcttctgcttctcagtgggtgatcgggaggcaaccacgtgtaatctaagtattattcactattcaggaagatgtcgggcagcctcggatttcatagacacctctctctctctctctctctctctctctccctacatccctccctccctccctccagcccctccctctctctcagctggtgttacattcttacaaactatacgaaggaaaactacctgtgctgagttttcatatgactgtcttcataagccttgctttccagagaaactccattcactcccaaagcccgtttcctgtgtcattatgttatcctgaaacaggttctgaattggattatctccaacccaaaacaagttgtctgcccagagtctcatggtttgttttaagggcaaaagtgttgctaccccccactcatctatgtgatggaaattcaagttgggctctcagggtgtctttagcacttttgtttggacacctgtctgtgtataccagacgcttcagccagttcggaagcagaatcacagagcg

SEQ ID NO: 1815 - DNA, 3379 bp, Mus musculus
gggagggggcagggcccggcgtccagcgaccgctggctggagagctagtgacttccttgttggcagtctcggacgggccgtgtccggagtcgtagcctctcggtgcttactcggaccgctattgcgagtctaggtccaagccattatcatgcccaaccccagctgtacctcttctcccggccctctccctgaggaaattaggaacctgttggcagatgttgaaacatttgtggcagacacactgaaaggagaaaatttatccaagaaagccaaggaaaagagagaatctctcattaagaagataaaagatgtaaagtctgtctatcttcaggaatttcaagacaaaggtgatgctgaggacggcgatgaatatgacgatccctttgctgggcctgcagacacgatttccttagcctcagagcgctacgataaagatgatgatggcccctctgatggaaaccagtttcctcccattgcagcccaggaccttccttttgtcataaaggctggctacctggaaaaacgcagaaaagatcacagctttctggggtttgaatggcagaaacggtggtgtgcgctcagcaaaacagtgttctattattacgggagcgataaagacaagcaacagaaaggtgaatttgcaatagatggctatgatgtcagaatgaacaacacccttaggaaggatggaaagaaagattgctgttttgaaatctgtgctcccgacaaacgtatctatcagtttacagcagcctctcccaaagatgctgaggaatgggtccagcagctgaaatttatactacaagacctgggatccgacgttattcctgaggatgatgaggaaagaggagaattatatgatgacgttgaccatcctgctgccgtcagcagcccgcagaggagccagccaatcgatgatgagatttatgaggagctcccagaggaggaagaggacactgcttcagtgaagatggacgagcaagggaagggaagtcgggacagtgtgcatcacacctcaggagataaaagcactgattacgctaatttttaccagggtctgtgggactgcactggagctctgtctgatgagttgtcctttaagcgtggtgatgtgatttacattcttagcaaggaatacaatagatatggctggtgggtaggagagatgaagggagccattggcttggtgcctaaagcctacctaatggagatgtatgatatttgagagtctggagaagtcttgtgtctgtctgcaagtgccttggaacatggaatgcctgagtgcctgctcggagccaccttcctttgggtgaacattcctgcctcagctgccattcgatgtagtcacgcactaaagcactctgatgtcagattgagcaggcagtgatgggttacattagatacaagcagtagagataagacctgttgctgttttgcaaataataattagttttaatttacccgtttggtttgtatggtagaattcactgtgattgtacgtgaatcttagtcattgaagcgccggtgagggttgctgtttctcttagtcgctgggtgtaagttatttttagagtgccacaaataatttcctagactttgtacattttgagtcaataataaagacttctttaaagctgtagagatgacttagcctggtattttattcttcatagagtaataacatgttttcattaaagaagttgtatagactcacgggtttacctgctgtaggtaagaaagaataaaccggtgcttgaattacagatagagggaaagtggcagcctgctgtccgctggcgcacagatcaaaccagagccgggttgctgaaagcccttcagtatcctaatttgatgatgggcttgccagtgttttctaatataattttatttaaatttaatgaaatcaaagattcataagaaagcccatttaccattaatacaatggtataaacaacttgggcatgttttcagagtccgaggcaggcaggtattcgctgacctctctgactctatcactgcactatcacaatcccaccgctaagtagcagtcctggccgaaactcctgtgcgctgctctggaccaaacggaagagacagactcttgcgggatggcagcagttggcagccagcagtgagtgaagggaaggctgacttgctctctgatactgctgttgatgcatgggtaagggttgcagaatcctgactctttcatatatagttaaaattggggtgtttttaatcatctctagagacggcaggagagccttactctgtctcagatgcaccagtgactagatattttggagtaaatgggatctactattgaatcattctagtgcaggttctagcttttgcctaattttgcaggtcggaatgcaaatgggctgataatattttttaaatctccactatttatgtaaaactatatttacaggcaatagtagagtgtttattttactgttatactatgtatgttgtgatcactcattttccaaagtcaaagaaaaaaatcctgtttacctatgtagacatagttcaagttttcagaaattacatttgtacagttactcatttcctactaaagtgtcatctaaataggttgaaatcatcttggcaaaagttagacaggcagaaattaattcagtggttcatctttcagagccagcatggttgaaaagccaagcctagcctatggttacggggttgtgcctttaacctaagtggccagcagatggcagcagcttgtcgtttgcacgtggacccacttgggaacccctcccccaccacagccgactgagaggccgtgtgatttccgtcttcttttccagttaatccaggagagggagtcctttgccaacggatggcccccgtttccagcacagaggccgctcttcccagagccgtgtgtggcctttgttcttttctaaacgtgaatatacatgggagatagaagactggaaccaaaggcctttaaaattgggaaagatgagaaaacctgccactccctgtgctttaagtgcgctttctgttgagttgataaactcatctttgtgctatgaagaagtttctctctacccttgacagtacatcacattctcttcaagatcataataacatcattaatgtgaatttaaacaacagggcttgttagaaaatatgctaattgttatgttctcattatgtttgcctagcttttatttgtttttctatgaacagttagagagctaatttttctgaaaggtgattgtaagtcatattttatatagcattttgcttgatggtttgctctgtactgaatttgtactctgttgccattagatcttacaataatgttccactctgcaaatttttaaggttcaaataaagtttaattgtttgc

SEQ ID NO: 1816 - protein, 354 aa, Mus musculus
MPNPSCTSSPGPLPEEIRNLLADVETFVADTLKGENLSKKAKEKRESLIKKIKDVKSVYLQEFQDKGDAEDGDEYDDPFAGPADTISLASYDKDDDGPSDGNQFPPIAAQDLPFVIKAGYLEKRRKDHSFLGFEWQKRWCALSKTVFYYYGSDKDKQQKGEFAIDGYDVRMNNTLRKDGKKDCCFEICAPDKRIYQFTADKDAEEWVQQLKFILQDLGSDVIPEDDEERGELYDDVDHPAAVSSPQRSQPIDDEIYEELPEEEEDTASVKMDEQGKGSRDSVHHTSGDKSTDYANFYQGLWDCTGALSDELSFKRGDVIYILSKEYNRYGWWVGEMKGAIGLVPKAYLMEMYDI

SEQ ID NO: 1817 - DNA, 217586 bp, Homo sapiens
ataagtacagtaaggactttgtctccgaaccaggcaggagaaactcagttactagagctaggatgtaagatcagagccagattatcacgaaagctgacccttctgatggttaggtccctgagcactgagaatcttagataaaggaaatcaattcagttaaagggagaagagggctgctacctgggcagggaaccaggtagcctctgacaagtctggaatgggatggatagttctctcaccttattcctaatttgtagaaccctaaagacgtacagcattatgttaattactcaactctagttcatattaaattgcttattcttaaaatgattgaccagggcagcaaagtgcctgagtacagtcatgtgccacataatgacgctggtcaatgatggaccacgtatatgacaatggtcccataagattataatactgtattttgactgtaccttttctatgtttagatacacaaataccattgtgttacaatgcccatagtattcagtacattaatatgctgtgcaggtttatagcctaggagcaataagctataccatctagctagatgtgtagcaggctatagatctaggtttgtgtaaatacactctatgatgacacagacatacacaatgacaaaatcacctaatgacgcatttctcagaatgtgtccctgttgttaagcgatgcatgactgtgtatgtttgtgtgtatgggaatgagatggacagcaaatcttgctaacttagtaaattatactaataagattaataacaattatgaactaaaaactcaaattgtgaactgcatctatcagtacctttggttctggttgggttgtatgtcacatcttttcagagtaaatgacttcatatgaattccagtgagaatattttttcttgttgactgccacacaatgataaacttataccaactaaacatggaagtttcaaatgaaaacaaggataataacttagaaaatgaaaacaaatctttatttctaaaaattcttaaaagagcccttacaagataactttagagccaacaggttttgcattttgtttagatggattaggctgcaaagtaaatgcaatttcaattgcttaatttattttattagtttatttatttatttttgagatggagttttactctgtcacccaggctggagtgcagtggcatgatgtcagctcactgcaacctctgcctcccaggttcaagcaattctcctgtctcagcctcccaagtagctgggactacgggtgcatgccaccatgcctggctaatttttgtatttttaatagaaacggggtttcagcatattggtcaggctggtctcaaactcggcctcaggtgatccacccatcttagcctcccaaagtgctgggattacaggcttaagccactgcgcccagcctagttgcttcatttatttagtccacattttatttatgatagtacaagtgtatggttggtggctgtcgacctaaatttactagaatccccttttctgcatgtttctggttaggctaggccacaaaatatattcttttgtaagacttggagagcagaaatgaagcagcagtcattttgtagttcacatgtatggttgcttactggttggctcacttcattggtgtaagtcagcagctgagcctgcaactgctcattttctattggatcctccttctacttctctgactcttggtaaagtgtgtgcatttagctccttaatgagggactctggcttctgaagaacatccataccatcaaatgagagataacttgggtttcaggttgtgctcataaactatggcttatacttctggttaccagcttgtcatgaagttcctccatcttccctttctgattccccgctctgtggactttgagctccagcatcagatgtaaagataactgccttatataaagagacagtttaaccagctttcacaattggatagggtttaatctttgtaacaaattgccatatattatatctctttccatctctagcttcattctagtagttttgattttcttcttgaactctgactgatagagaattgggacagtgacaatacaaaatgaaaacagatcttttgaccaccccaccccccacctcaattgtattgtcaggaagcaggttgagaaaattacacaaccgttcatggaaaaagatgggtggctcagagggaagaacgaagagcagaggataagttatttccaggtgggaagagaactgtgtcctaatcaaataacttgccacattttcctggttgggcttcagaattgctctggaccagtgatctttgtatacttcctattctccccacccctttgaacaggaatgtctgtagtggttatcctatgagtgtctcctatcgtatgttgaatatgtggggacaagataacttgtctttgtactacatagatctttagtttgagatatctgtactcaacgagctgtctatatatatatatatatatatatgttttttttttttttttttgagacggagttttgctcttgttgtccaggttggagcgcaatggcacgatctaggctcaccacaacctccagctcccagattcaggtgattctcctgcctcagcctcctgattagctaggattacaggcgcacgccaccacacccggctaattttttgtatttttaatagagacgaggtttctccatgttggtcaggctggtctcgaactcccgacctcaggtaatccgcctgcctcggcttcccaaagtgctgggattataagcgtgagccactgcactggcctcaaagagccgtatttaaggaattaaaccagaggagcaccatccacacctgagcttcatttaaatgatgagattctggactttgagactatgcgacaatgggatgagactttgcaagtggctttgggaggggatcggtgtatttttgcatgtgggagggatgtgaaccattgggcgtcagagggattactatgatagccagcttccaatgtggcccccaatgatctctacctccagtattcacagccttatgtagtcccttcccccttttcagcaggcttggtctgtgttaccaattaaatatggcagcagtaaagtcatgtcacttttgaaattaagtcataaagatattgcagcttctgtcttggttgctctgtcttgtggattaattgctttgggaagccagttgtcatatcatgaggatactcatgcagccttatggagaagtccatgttgtgaacaagtgaggcttttttctaacagacaaagaggaatggaggactctagtcagcagtcctgtagatgagccatcatcaaatcagattctctagccatggtcaagtcttcaggtgactgcagttcttatgagagactctgagccagagtcatctagctaagctgctcatgtattcctaaccaccagaaactgtgagatactgtttgttttaagctactcaattttgttattcagcaatagatagctaatataatgcctaagtataaatataatctttcttccacatgcctatgaaagccaaataaaaatgaagatgagaggctgagaaaagtaaattgtgtttggcttactttctatttttcttcggtgctcttttagcttctcttaaacctaggcctgtgggaaaatacttattcagtgcccctaagctaattttgaagaacataagaaaggcagttagcttcagttatagggatatatacatatatctttgaactggaggatctacttttgggaagacaaatcataagattttatcagagtctagtctctcctttgtagaatggtagggaggccattacctctcttaggttgagatttaaagttacatttattattcttttttttcaacctaatatgactagtttaaagaatgtaaagtatgatttgatttacttcttggtttttgttatggaaacaagagaaataagaatgtatttctcctaacttctctttattacactttccatcttataatcaatttcaataactttaacaataaacagtaaaaatgatagactatacaaagcattgcccaagtgaatctatcatggacctgtgtctgagaatggcttcctaaatagggaaaatgtgtttcacacaaaaagtccattttctgttattgcctttttttatttggactatgagatgctatatattttaaggtaatcttaatagtttcctgtctctcactaacaagaatgacttgtcataatgagcagtgtagacactgtccatttgatccactccagaaagctgtctatttgatacaagagcaaatcacctcaattccttagtggaatgagtggagtataagtaaataaatgagacacaggaatttaaaaacaggttcagttctatcagaaggaaacaaaggattgggacatttggaaacctggtttaataaaaaatgtgacaagacaaagaattatgtgtgataactgtagaaggaggaagaatcctccctaatataaaatgtccatgaaatagttgttttcttctttaggaaggaagataattttgtagcttaagaaaaatagttctcaattctttgaagttggaagacgtatattgtaaaatgactatttatttacttttacctccaccaaaaacaattcaaattttcagtgctctttctataattcatcacattttaaaatctgggtaggaatttcagattccattttggggaatgggtttgtttgcaggggtgtctttttttgttgttatttttgcatgttttacttcagccgtaaagtttttgtcttttatttgtttgtttgttttgagaggcaagatacagactcgaaaatgctctattttttcttttataactagtttacttttatctcagagaattacacaaaaatgtcatactgcatttgactttctaattttttattagactgtctgaagtgtttttgatgaactattaataaagttgttattctgtgttaggtttagggttccagctgaggatgaaagataagttacaacaaattttgtgccctgtaggagctgggaagtagcaaagtgattcttaaaatgaaatttcatgatgtcttgcattcacctatgaggacttttttttttcagtgccagggtcttgctctgttgccccacgctggagtgcagtggcgcaatctcggctcactgcaatctccacctcccaggttctagcaattctcttgcttcagcctcccgaatagctgggagtacaggtgcatgctaccacgcccagctaagtttttgtattttagtagagatggggtttcaccatgttgttcaggctggtctcaaacttctgagctcaggcaatccacccacctcagcctcccaaagtgctaggattacaggcatgagctacggctgaggattgtttaacacgcagattctcaggccccaccctaaaaagactgactcagaatctctggggatgggatttgagaattcacaatgtaataggttctctctgtgattctaatgaaaactatagtttgatctagtgaaagttggagggtaaaggaataaacaatttacaatgtgactggagcccaggaacaatgtaagatataatagtaacttctaggaaagagccactatctctaccaagggaaatctaagtgaaggcttaatatagaagctgacatttgcgtggttttgaaaacgtgccttgccaagcagagatggagggtgtggcagggggcatctcaatgactcatgttgtcaatgatattttcactaagagaaatacacagtgtatactcactaaatgctttgcctaggaagtttctgtctgaagccttcctcctcagcctctattctgtgttcttcagggatttcagcgacttcattttcgttgatggttccgcaccaggttttgagggattttaatggttaagaggcacttgaatgtaataaatatgtatatacgtacatatatgtaataaatacatgagtgtatacacacacacacacacaaacaggcatacctcacagattttccaggttaggttctagaccaaaccaataaagcaactattgcagtaaagtgagtcacacaaatactttggtttcccagtgcatataagcattatgtttactgtagtttattaagtatgcagtagcattatgtctggaaaaataactaacacacctacttaaaaatactttattgcacctgggcatgtcggtacattccggtagtcccaagccactcaggaggctgaggtgggaggatcctttgagcccaggagttccaggccagtctgggcaaacatagagagacctccatctctaaaaaacccccaaaactttattgctaaaaaatgataatgatcatctgagtcttcagcatgttatcttttttctggtggagggtcttgcctcaatgtgaatggctgctgactgatcagggtggtgattgctgaaggctgggatggctgtggcaatttcttaaaataaaacaaaaatgaaatttgctgccttgagagactcttcctttcatgaacgatttctctgtggcatgtgatgttgtttgctagcattttacccacagtagaacttctttcaatactggagtcaatcctctccaaccactgctttatcaactaagttgacgtagtattctaaatcctttcttattatttcatcagtattcacagcatcttcactggagtagatttcatctcaataaaccactctctttgctcattcataagaagcaactcctcatacctccaagttttaccatgagattgcagcagttcagtcacatctgcaggctccacttctaactgtagttcccttgctatttccaccacatcctccactggtcttgaacccctcaaaatcatccctgagggttggaatcaacttcttccaaactcctgttaatgttggacattttgacctcttcccatgaatcatgaatattcttaattgcatctagaatggtgaacctttttcagaaggttttcaatttactttgcccagatatattagataaatgactatctatggcaactatagccatataatatatatatatatgtatatatatatgtatatataggtatatatatgtatatatatgtatatatatatgtgtgtatatatatatgtatatatatgtatatatatatgtgtatatatatatatatatatttttttttttttttaagatagggtctcatttgtggcccaagctggagttcactggcacagtcatacctccctgtaatcttgaactcctgggcccaagggatccttacatctcaccttcatgagtagctaggactacaggcacacaccaccacacctggctaattattctttttttttttttttttttttttttttgtagagatggggtgccactatgttgcccaggctggtcttgaactcttggcctcaagtgatcctcctgcctcagcctcccaaagtgctgggattacaggtgtaacccaccatggccagccatgaaatgtattttttaaataagacttgaaagttgaaactactctttgatccatgggcagcagaatggatgtggtactagcaggcatgaaaacattaatcttcttgtatatctccatcagagctcttgggtgaccaggtgcattgtcaataagcagcaatattttgaaaggcatctttttttctgagcagtagatctcaacagtgtgcttaaaatactcagtaaatcattctgtaaacagatgtgctgtcatccaggctttgttgttccacttatagagcacaggcagagtagatttatcataatccttaagggccctaggattttcagaatggtaaatgagcattggcttcaacttaaagtcagcagctgaaatagttcctaagaagagaatcagcctgtcctttgaagctttgaagccaggcattgacttctactctatagctacgaaagtcctagatggcattgttttccaataagtgttgtttcatctacactgaaactctttgtttagtatagccaccttcatcagatatcttagctagattttttttttttttttttttttttgagatggagtctcgctctgtcgcccaggctggagtatagtggcgcaatcttggctcactgcaaactctgcctcctgggttcacgccattctcctgcctcagcctcccgagtagctgggactacaggcgcctgccaccacacccggctaattttcttttttttttgtatcttttttttagtagagacggggtttcactgtgttagccaggatggtcccgatctcctgacctcatgatccgcccgcctcatcctcccaaagtgctaggattacaggcatgagccactgcacctggccttagctagatctttttgataacttgctgcagctgcttcaccagcatttgctgcttcaccttacaattttatgctctgaagatggcttatttccttaaacatcatgaaccaacctctgctaacttccaacttttcttctgcagcttctttacctctcagccttcgtagacttgaagagagttagggccttgcactcgattaggcgttggcttaagggaatgttatgtctggtttgatcttctatccagaacatgaaaacgtttctttaccagcaataagcctccttcgctttcttatcattcgtgtgttcactggagtagcatttttactttccttcaaggacttttcccttgcattcactacctggctgtttggtgcaagagccctagcttttggtctgtctcggctttcaatatgccttcctcactaagcttaatcatttctagcttttgatttaaagtaagcttttgatttaaagtaaaatgattcttttactggaacactcagaggccatcgtagggttattaattggcttaatgtcaatattgttgtgtctcaaggaatggggaggcccaagagagggagagatatggaggaaggtatagggttggtagagcagtcagaacacacacatttatggattacagtcgctgtcttatatgggtgctgtttgtgatgtcccaaagtaattataatagtaacttcaaagatcaccataacatatacaataataatgaaaaagtttgaaatattgttagaatcaccaaaatgtgacagagacatgaactgagcacatgcttttggaaaaatggcgcccacagatttgcttgatgcagggttgccacaaaccttcaatttgttaaaaaatgcaatatctgggaagcacaaagatgtatgcctgttaaaggttttaaagaagccattttttttaaaagagaaaacttttaagaagctttacagatagaagacagtaagtatttgttgactaaatggtcaagttggagtgagcagattttataattttattctactaaccaccaccagcaattttatttttgatgcttgtagatggacagtggtgccaatgtctattcggccttctgtttttttgttttgttttgtttgttttttcctgccaaaggacggtgcttagaacttcccagtcttccttgtagtggggaaaatctgtcaccccaaggatacgaattaggtagaaaagtaatgtaagagccaatcacaacgcgcgctccggagcggctccagactggcttcgcccggacgactggcggaagacgagacttcgttacctccgttcaatcggacaaagaaggccataatagtttaggacaagagaaaattccttgtgggttaaactgcggtgggactgactgttacgcagaaggcgtaatcgcaaaacttgtatacactctgtatcatggatacattattttctggaatcctgcagaaacgatcagcagttgtgatggcaccagtaccgaaaatggctgtaaggcgctccggacgctggatcaggtgacgcagcatcaggtgacgcagcctcagtccgcccccttcccaccagtggctcctcctcctgcttcccggcgtagcggtgggcgtggcttgcccacaggctctttcttctggggccgggaaaaccgaggaatacacatgcgcagttggacccctcaggcccttcgtgtcccttcccacccatctccccgccccggccctctgggcggggctgggccgacagtccagctgcagctcgctggagattcagtgacttccttgttgtgagccccggcccggcagtgtcccgactcgtagccccgctgttcttaatccgggccgctagcctgagtctaggtcgcagccgcagccccaccccgtcggtcaccttttcagcgcaggtcctttccccgcacgccctgcgctccctaacatgcccaaccccagcagcacctcctctccctaccccctccctgaggaaattaggaacctgttggcaggtaaagagcgggaaggcggcgataatgctgtcggggcgggggcgagggaacggtgagccggtggggacagaagcattcagagcccttatcctccctccccgcgcttcccacgtcttctagccagtggggtcggcacagggaggagaggagaggggttgttttgtctcagaaagggagtggacgtgtgtgttgaaatttggtgcggggatggtggcgaagccctttttggtgatctacacaaatgggatcaggacgtttctatgtgcattgtgaagacggtgtgtgtgtgtgtgtgtgtgtgtgtgtgacagaagggcgggggaggaagagtggaagagggagagagaatgataatgataatgaatgctgcgtgagcaagcagaagggagcagaagtcaaataagtagttcttgggtggtctggccaatggaggtagaggatgtagagatgcaaagagctgtcagagccacaggtgttaggggttatggggtgaaagagtttgtcatttctaaaactcccgtttttcttaaacattcagctcactcacgtttaagacttttgaagaaggtctggttctcaaatggccacttgtccccagcctcagtaatatattaaagcaaaaaaggaaggatatgttaaagttctacttcctgtgtgacacgatgaaagtacttcatctttgtacccttatcttccctttttcagttttacattaccatttataggaacttattttaggagctaaaaacgtggttcttcagtagcattatgaatccactactagttcattaatttactggatacggaggtgtgtatgttcactaagaaccaataatttatatttctgtacaaggtagaaaatatatgtttttaaggtagcacaaatcttacctatctcaatgttctggaatttcaaccatcatttattttgtcttgtgtacgtcagaattctggaaactgaattttgatttttagttttagatgtctataaaatatttatctctcagtattgcttatgaataactagattacagattgcttattctagctcttaaaaagcaatgtcatctaaaatgtgacatttgatgacacattttatatgttactcctatagcaatgtgagtccaaatctcctaatattctgtcattcaattttggtgcttggcattattaatatggtagtgtaatattaagtgtatgaatgtagacttatgtttgtatgattatggtacagtatgttgaatgcatttgtggtgggatagtctttcactctaagaaatgcttgttgtcattaacgggtaccactaagggaaatagttaaagaagtctaaagactgacttcaggcagctttattgcatcacatgactactgattttgttttactacacttaacattttttgtttttacaatgctggaattgtttgttcagaatattattgtaataaccagcgcagaaaaatgtttatcattattccaaaaatagatgaaaccattttcaggatattctatgtctgtatttttgaatttaagaaataacatatagacctctgggtgcatgttttaaagcttggtacctcccatagtacagtttgttatttggatccataatcataaatcacagataatatgatatgtaggtcatgagaacctttattctcttatccccatagatcacaagtatttcctgtggcccttatttgtgtaatttaactaaaaactcaaaattacatatttaaattatctgccaatgctaacttccaatatatttctgccttctctctttagtcaggtaatatactagcatagcatctgaaattattttaagtcattttattgacattttcactattttatattattaaagcaaatcacatattaaaacacacatgaagtattaaaaaatattacaattaaaacttttggaattggaaatttggattacactttattttcagaggatattttcaagaagtatggaagtgagttggggcgtatttatgtttaaagaaatttaacaaatcagtgtttttcaggttttaaaaaaacttatttggaaagttgctaacattttatgtttgactgtaattaaaatcttttttgaggtagagaacgcttcaagaatagatgctgtcagcaattgtttcatgtatttcatctaaaaatattgttagcattgtacatgattcttttcataattcaagtgtattgggtaatagtatatgactagatttagagtaacattatagaagtatttatattggtttgaatattagagatattgctggcttatttagtctatttctttgaaactgaggagatattggtaatggtgttgtagttaacagttgagtgctcttagaatgcatggtactatgctagaattccaaggtagagaagataaggaactaaacttttcaggggtttaaagtcctttgtttttagaaagaagaatatataatcaaaagataatgactgttaaaataatgttgcttagatgtatctgtttgtgttccatatgcctattaaactaaatcattatatgtcatatgtactgtttgaaatttcacctgcttaaaagggataggtactcaagtgtattcttatttattatttttctttctctttatttttctgtctgattatggcagttctatgctatactttcaacatttgttccctctccctttttccttcccctataaaaaccattccatagaaatgtaaaaaaaaaaaaaaaaaaaaaagaggttgttattgttaactcacatgtgttgtgtaaagataccattgaaaaagtggctatctagtttgatttttagttatattttctgtggagtcagtcttgaagacctatgctttttataaaatgttgattattcttttggttatatgaacagaaaaggacttacagaatttcgttgttgaaagcaaattttgagctgccatatgcattacaggcaacctttgatttttttcttttctacaacaatggaaaaacaggtttagcctggataattgaaatcaaaggacaatcccaaatcttgtccatttaatcttctctcacatccaaatattttgactaggactagcagcaagaataatcttgatttatgtgatttttttttttctctagacaggcaagaaagtaagaggaactagaaccacttccctccagcctccttcatttgtttaatcaccctttaaataatggtttgttagtggcttgcaatcagaccttctcattcatcctcattcatttgttttaggacaacaaattttaaaaggaaagctctaagaagatgttattttctgtttactaaattagcaaatgaaaccattgttaaaagaagaaaatagtgattgttagtgctctgaaaaatcaaaccaaaccaaacaaacaataaataagtgatcttgaggttttgttcacatggcactcttgattagaaataccacattttccctactgggaatttttagaacattagaaaattttttcccacactattatgtgtgaatatttttttcacacaatattatttagggtatgtaatcagtcccctaaagggattcctgtaggggcactaggtgaagagtgcaatttatttgaaatagaggcagaattttttcaatgctgagtatattacggtttaatttccacctttccaaagttccatttataatttggtcaacattttggttttatttttcctatgagaattatttatggtgtatctagtgtcccataacttccttctgggacattggctgagtatgtaaagggaagagtgccacctactgagtcaccaatagtcacctacctccttagcacctgggttttcctatggagcaagaacaagcctgccccatttgggcagcaatcactaaagagcataaagttgatatgagaacatttaatctcaaaatgaaatctatcgtacctccaagatattcttttctagaaataggaatatatgtaaattaagggactagaggtttacagagttttttgtatgggctaaataatatagatgaattaagatgtggtgttaggaaaattatttgcctattttaagtatataatgtcctgctttttcttgggaggagatcttttggcatggctgtccattgaaagtattttcatctcattactatataaggctcttgatactacgtacagtttttatagctacccaatccaaattatcattggttttcttcaaaaagaagaatctaaacatattaaaaaattagcattatatgaaaaatttgcaaatgggcttattgctcctgttaccagcattaaagtattactagaaagaaggtagacacaacagagtaggaaaagctgctggtgatttgaaacacagtttagttgtctcataaatttcagattaagtgtcatatatgggtgataaaagtggcataggctagattttatatactcatgattcacttagtttgtctttttcaattaaagctaagtctctttttcattccactgaatttacatttctttttcaatcacattctgaacacattacaatagatgctgcctaaaactgaatatagtgtaaatctcagactaatgtgttattcactgtggcttctttgaaaatatgtagtaaaaagattttgattattgtaaggtgctatttatcaagagtcatcttttagggttgaaagatgttcagccctacctttaaacagcccagctttctatcaaaatacatcatttagcttcccaaagtcaattttggaaattttgtccaatgattggattgtaagactctggtattttttacccattgtaccatgagagctcttgtgccagttcatgtcaccttttccatgtttgaaaagtccacagttcatctgtaacctgtaaaagtgctaagtaatcagggaaagacatcagttagaacaatcaataacttttcaattagccattttccaactttgggcatttggctctgttgatttgcatgtgcccagtttaattgatttttatgtttatcagtacctgtttggtcagagccataccctgctttaacagagaagagcatgtcttttttttttttttttcctgatggtagcttacattctagggtaggatccctatcatattaagtttggtgacagcacatctcaatgaaagcagagagaaatctggcccaattcacaatgtagagagagatgtggaattaagttagaaaggccatgggggtgctgtgtgattggttttacctttattttattgatctgcggctaagcatatggtggtagattcagcccaattcttgcgccctccccctcccccatacaattcaggccatcacagaggctgagtgtgtgtatatgcatgggccaggaggtattgggtggttggaggactaggcaggaagaggaggtgttacctttgtgacttgtttttaacctccagtatgcaagccctattctaggctgtttgatagtcgggggtggtgaggacaagtggccaaactgcttttcaagagtgggaatctgtgctagatactacatccagaagctgagagttactttatcatttgcaaaaaaatttaaactgttctgacctggtgtagttccaccttttcactatgtgatctgtgtagaagttggcagaaagcagttagtgtgtgtgtgttagatacttgtcccaaccacttgcgactccagggaaaggtggggtggctgttttttaggaggtctatatgttaaaaggggggaaaaaggaagattggagtactattcagtgatttggtgtgtttgcctcttaggggtctccatggcaattgagagatttctaacttaaactgctcaagattgctgagccagtatacgtcaacttttaattttgttttcagaccttaacatttatcgacagagcagttgtaaatctgatcttttcagaggccttctcccccagatccttacagctgtaccgtgagataaggtttactcttgacagtgttaaggtgtattaggagctaaaatcccatcacgtttactttcaccaggataactttttcctgctgatgacttgggctggggtggaggctgatggagataggggtaattctggggttaaatgcaagcagtgtagactctgcagtctatttggctgccggcccggaggcaggagatgggggtgggtgggggtagttagacctggtagttaaaccctttcccgcgggcgcagagtgggcctcccacgcttctctcccgtggccagtatgcgtgagagtgtgagttgagcccctgcctccgaggaagaattctaaaaaccgggctaagggtcgagcgagggaggctgaccttttcttgttatcaaattactgcgtttccctgaattacgggcactcaggaatggtgaaatctacatattaaccgaggaacactaccctcaaaggaaggtagaagaaggctaacgctcttgctagtttactgtgcttgctagtttaccgtttgcagggctatttagagcacaataagaagcttcaaatctcttctccaaccagccagaggaacacttgattcgcccaagactcttattgcttgcttttgaaatattaccctggctctgagctacaaagccacagatccagccccatttgtctagtgagggctctgccccagacccggctctccatgctcactgctccgcctgagaggaaccctggggtttaacgctgaagtgcgtttctcagagggcagagctggagcatctcgcagccctacaacttctttgcggcgcttggtctgtctttgcgttgcgagatcaggatcggtgtgttgctcagacaccggccgaacgccaccggcacgtctaggagtctcctgtgcctggaagaggctggtttcattcgattctaaaagaaacgggtaaagtgtagattttaagaaataacctagatttcaaaagcttaaaaaccaaccaagtttggttgtggacagtcaacaaactaaaattatttcgggaactgcttccagtttaaagtttttttttttttttttttttttttaagcaaagcagtttctactctctccacatcacctttgagaaataatcacgaaaaagtcactgtttattaaataattttagttgctttaaaccttttctgggaaaagcttaggaataagtatattaaaaaaggctactctaaaaaaaaaaaaaaaaagaccatacccaatctctgaatttctggcatccttgaaaaataccgattcttcctacagtcccacactctttcaaaaaaaactttgtcataaaatagtaacatggatcagtattttaaaaacatgtttgggggcgttagagggcactatgtagagtgtttattgcagccttttttttttttttctgagtttttataaaactgaaatgaccttttaaagaaaaaaactcttgggggcaattcattgttattacttccagtgatagaaaatagattgtttgtttaaacttggattgtataatgaaaatataaaataggcaattaaatactcatggaagaggaaatcaaaggcaaacattgagtgaaaataacattaagcagactattccccagtcattgggccagtgattcttcctattgagtctggttggaagacgaatcagcagtagggatgttgcttcttcccttattccactttcttgcaaaagttactgtaatgatctcaggggagccagtgatcttttccatttcagctaatattgaaatatccaaaggttgcttgctgttctgggcacaaaatttaaagcttttagagcaacatgcttcttcataagttttgttattttgaattcactttagaagtctgtgtctaatttgcactggtactagattatgtctctatgtcccccacatcaaaatataactcaaagaaagagaagctgtgacatttgctttcatttcattttcatacttttttttaacacattagttgttaatataactcaaggaaagggaagctgtgacatttgctttcatttcattttgatacttattttttaatacatcagttgttaatataactcaaggaaagagaagctgtgacatttgctttcatttcattttgatacttaaatttttaacacattagtcgttaatagacttcaaaccataagctattttttttaaattattacagtattcttaattattttacttgtcatattgacttagtgaaaaattacctgtacacatttattatgaatgtataaaagtttaattggctttcctcattggatcaagatacttttgtaatcaagaattacaaacattctatcacatatactaggttttaaatggttaattgtaagtacagttgaaagattattagattattatactactttgaactatttatacgtaatattgttttgatgctatacaaagtagttaaggaaaaagaaagtaaaacacaaatcccttccatatgaaataatcaatgatttatagccatgcctacttaaacatctttaatgatatcctccatattagatatttcaaaatgaggtgtgaaattctgaaaataaaattaaaattgcacagtatttcatgaataataagaatggaactagtataaaaattaaacctgtaaggacttgttggaattttacactagagagacccagacagcaccgtaatttagaagtttactaaaattaaaaaaagaggctatgagggaatgttacatgaagccacagaaatcttgtttcttggtgactatatttttatatagtggaagaacttatgtttgtacttcttccttaagaaatatttcaggtggtaataccaaggcaagaagcaagagctcacaaaactacacagctggttatcttttttatttgagggtagtcagaatgagtgtgtaggtaggaagaaggagggcttgatttgggaatcttggctagaaaagtggatttactttttcctttaaagcattacatgttggatatacctgaaaattgattatactagggaaaacagacccttgccagagacattagcttgtattgacataataatatgaatgacattttcacacaggaacttacaaaatactagaaaatgatattaacacatgcttaaaagcttggtgcttgcttccatataaagaatttgttttatggggcaccatagtttattaaaacttggtgtgtgcttcttccttgtttaatgatgccaaacatccaaatagtatttgctgtggtaagcataagtagaacttacaaattttattagctaagtggtgatcagatttgttcaacttagtatttgaaacacacttcaactgttatgctttggaatgataaataactataacaaattgtacaggtattaacacttatatgtagaaacaatcattgtcctatttatcttcacaaaacctttatttcttataatttgtatcctgtttcttatattgcatggtttagatgttgaaacatttgtagcagatatactgaaaggagaaaatttatccaagaaagcaaaggaaaagagagaatcccttattaagaagataaaagatgtaaagtctatgtaagtcacttaccttttgtttactgatttcttacatagaagcagttttgtaactaacattttaataagaaatcgattattatggagttaaatttttcatgttccagtttaactgatgttaagtatttttgaagggcaaaaaatatatttccactatatagtttttaaacacagatatgcttatcatagtacccttcttgattatgtatttttctgagcattctagcagagttcagctgtttattttgattatctgagggtatatttggtttaaatgataagacaaaggtggattgaggactttaatatacagaaaatacctgacactgaagaaagagaattcttttgttactactttaaatgaataaatgtaatatatttacatgtcataagtattaaagatatatcctcattttactactgtacttagatccttaaaaattattttatttaaaatttttaagcattttggaattgtcatttcaggacaggaattagtttttttctaatgtatatctaggtgtgtatttttaatatagattttggattttaattattgttactgattagaccttgttttgatttttcaacctcatttaaaaatatgttctttgttttgtagctatcttcaggaatttcaagacaaaggtaagttttcatgtttggcaaacttgaaaatttttttcctctgtggaaattttcaataggataatctaacacatactgaaatttgatagttggaattaaaatttagatttccgtaatgtgtacttagaccttcaagatgagagtgctagctccccctgctgagaagaaaattaaaaagtatatccagaatttactctgcacagtcttctgatgcggaaatcttaggcatttaacattcttaggttttgtgtttcttagagtacattgtggcagaaatttgttaggaaaggtaaaaacgtgcaattacacgtggaataacttggtgaagcagaggtgagatactaacccactgccatttaacactgcagagattattttatagtggtggtgggagaaggtcctgtggctgagtgctcacaggtaatgtttttgaaggatattttgaaaacagtgtaaatttttgtttgagaacaaacaataaaatctttttcaagtgaaagtttttattttccttgtggttattttgatatgaatacataggggccatagacattttttaaagaagggaattcagtttcatttttttttgaaatatgtgagaatgctgataacctgattgtctccctctagatttgagagacagctgcttagcagactgaaaaccagatcaggaaaggtataggaacttcctactactttatatattcaattctttaggggaaactgggtgtggcccttacttccatgatacttattcataggttatgatgtacagcttgtggatgctggtgtgagggttacaatatgaggttagttaacctccatggagctaggttctgggtttgaggaagacacacagtatggcatcttctaactgaagctagcagatcccagagtaaatcatatttgtgccaactggtaagtgagaaggtggtaacagtttcaataaacaaagaacttaaccagacaaacctaaaatcaattaaaaggaagtcacagtttattttcccattagatcatcaagattggtatgattgaagggaatgagaagagatttttttttcatattaagatttttaacacttaaataaagaaatgagcaggaaactattccctgtaagtacccagttttttttgtgctctacaagaaatcctaaactatgggtttaattatgctacattttgtttagacgaatgtataaatgaatttatgcattttaattacgataacttttattatgtagtatactttatggaagaatattagatatcagattctgcctctcttaaaaggcatattatttccagtgattatcgaacttgcattgtgctttgtggcttaattatttgtacatttaaaatttttaagctaaaaaagcatgatatgaagtaattgtgtaattgcatatggatcagtaatagttgggaagctttccctttggtattttgttttagaattcgttcaggtgtgtggatattaaaattacattactgagatacattctttgtctctaaagagaatggaaatttatatggtatttgatagaaattgaaaaatgagcataaaatggagttcaaatagcatagaatttagagattgctcataatcattttcctctgaataagtcatttgtagttcaatactgctgtattgagttaactaatcacaaagagtgcctgttcagaagtaagcctgtagatgaattagatgtataccttggagaaatatgagctgagtacttttatgccattgtgtactcaaagtatattcagctttgttctaaaaagactattcctgtactttgttaggcatagtaaagggtacagacctaatagttgcaaagtaattattcaatatatagtacatcttttttaaaaataggaatttattttcaggtctctacattgagtaaattcaattctaagtacgttttggtggtgctgccttttctccaccttacattttccctttgaggttttggattatctttatccaagaaggtctgggcagaagtccttttggctgctttcccgtcctttctcttccctcttgtctctctctctagtcaatgtagggtcacattgtgaacataacctttttcctcctttctacctttacacccttattttatttacatatatgcatatatgtattttaaatgacagttaagtatcattttgatgtcactattgggggggtaaaaaggaccaggtagagagttcttaaataaaaagagttaattcagatttattcatatctaataagtcggttattaatttctctaaggcacacagatgtgtatcatccttccttacttccctcacaaatccttcccttctactctagataatctcccatcctgagatttaacaatacagattttacagtttgaggtatttcttttttttttttttttaattattatactttaagttctagggtacatgtgcacaacatgcaggtttgttacatatgtatacatgtgccatgttggtgtgctgcacccattaactcgtcatttacattaggtatatctcctaatgctatccctccccacccccaccacccctcaacaggcaccggtgtgtgatgtccgccttcctgtatccaagtgttctcattgttcagttcccacctatgagtgagaacacgcggtgtttggttttttgtccttgcaatagtttgctgagaagacagggtctctcactctgcgtctcaggctggagtgtagcggcaccatcttggctcagtgcaacctccgccttccatgctcaaatgatccttccacctcagcctctggagtagatggaactatatagtagatggaactataggtgcttgcctccatgcccagctaattttttttttttttttttttttggtaaaaacggggtttcgccacgtgtcacagactggtctcgagttcctgggctaaagagatcagctgcctcagcctcccaaagtgatggatcacaggcatgagccaccctgcctggctgtcaattcctaaaatttaaaattaattgagttgatatggtagttgaaacactaggctgcatagatcttaggagatttttttggtatttccatttttttgggtgagaatagtttacactggtagaaactcgttttattacagtggcttctagatactgaagcttgtgtattaggctaatttttcacttgtttatattcatttccatagaaagctattgttttaaaactttctttttcatttattaaaattcttcttttatctttacatgtgcaagtcttgattcccctattgaagagatctgacaaattgccgctttagaataattatcagctgattttctaaattccttaattttacttgtacttaggaaagatttgaatctaatcagctagaacacttcttgcttagtctagtccttgttattcatttgaaatattgcttgttttatctggaacagatagttccttcttatatccttcaaagtattgtacgtgacagaataacctagtttctttttttcttttctttttcctttttttttcttttttttttgagataggatctcactctgtcatccaggctggagtggagtggtgtgatcatgactcactgcagcctcagcctcccccagctcctttgggaggctaaggtgatcctttttccatttagcctcctgagtagctgggactataggtacgctgcctgtgtattgtatttttttgtagagatgggttttcgccatgttgcccaggctggtcttgaactcctgggctcaagagaccacccgccttggcctcccaaagtgctgggacttacaggcatgagtcaccatgctcggccgacagaataacctagtttctaaccgtagatttttacttgcaatattgcctcatattataaagtatcctcccgaatttaggcttcatgcactggaattatgctatgtgattatttcagcattgttctctatcacataacaaggtcataggtctcttagttgacttgaaataattatttttgcaatgagaatatgttactatttagtaaatactgttattgactaataagaattttctaatactgtatatattaagtacatgataaaaaaatttgggctatagttgtgtcttgatcatgtattagtctcagttttctccagagatgatttaggtgtgattactttctttatagaatgatgtactgaaataagataatgtgaaagtacatagtaggtgtttaataaatattaatgcatattctcagattcaacttcatttgtcaagaagatttaagttaatcttgattcataaattcagttttcaaacaatttgggggaaaatgatcaattattaaaagaagggcatatttattagcattagtcaaatgtttcatgagatttttttttcaaatttgtaaaatgttagtgtctacagctttttttttttttttttgagatggagtctcactctgtcgcacccaggctggagtgcagtggcgtggtctctgctcactacaacctctacctcctgggttcaagcgattctccttcctcagcctcccgagtagctgggattacaggcatccaccaccacgcctggctaattttttgtatttttaggagagacggggtttcaccatgttggtcaggctggtctcgaactcctgacctcaggtaatctgcccaccttggcctcccaaagtgccgggcaggtgtggaccactgtgcccggcctagtgtctacagttttgaaaaaggggaatatactgcttcaggtgctagagatagataaaagtctcattttctcctttaaaatctttttgctctaattgtaaaaaaaaatagattttgccttaatattttattgatattgttaaatatgcatagatttacttagaaagcagtttcctttgaccttctcactcatgctgtttcttaagtttattaatggactaagaatagcagaataagaatagcagaaaagtctgaagtttggatgatgtttaatttccttttttaacccttcctaacatagtgtgttttctgttgaacgataactccacagtgaaatctgaggaaataattcacagctttttccttcgaccacctacccccaccattggccttgtaaaaatgtcttaagcatgtttgaaatgatgggacctgtagtagtagaagtatatttcacaggcagtgcttgaaaaatggttttttcttattttaaagctctgccccagttttgtgccagaagttgtctttagtatttgcatgccctcctattgtagaagaattatgaggagaatcttcctttcattgacctagattcttcagagccttaagaatgaaacttttcctgaagaaatgacaagttaaatgcttaattatgtatatttagctatatattattacttgaaaaattagacaagtgaactatgtagagaattagaaattaatttattttcattagagtaatttttccccatttgtcttccagtaagaaggaatggttatcactcagattttaggtacaggtttagtagtatcccttatccaaagttcttgggaccagaagtgtttcagattttggattttgggacatttgcatatatataatgagctatcttgggggacggaacctaagtgtgacactaaattcatttatgtttcatatacaccttgtaattttgtgcatgaactaaagtttgcgtacattgaaccatcagaaagcaaagatgttaggcatggaattttccatttgtgttgtcatactgacactcaaaaagttttggattttggaacattttggagttctgttgatttagggatgttcaacctgtatattacttcatttcctgtttacctgattgtgtttaaaataggactgttttgaaaaaacaagcaacaaattgggtaaatcagcttcagtggttgtagagattatgactgttcagttgttgttgggctacatctctaggcatttgggaaaatgttaattgataatgaaccatatcagaaagaatggctaatagtaatttgatcccagctagtataaatttaaaaatgtttttcagaaaaatatgctgctgtagtatgattaaaccttgagtttgttgcaatgtttgttactactgaaattataggaaggtaagtcttggatcattgtcttttattctgttaactttgtatcgttaattaaacttttgaaagttgtgggataaatcaaatgcttttctagggaaacaagaaacagtattaatgagcaacaaccccatcattatccttgtgagtacataacagggacacattcatgtcttttctttgtgcaataacttttacaaagaagtatttttaaactgatcattaattttatgaccacagaaatgagatgcaaaatttatgctattgtcagtggcacaggctcacagcaccactgacattttgtgtgattgtaatagaatggctgccaactaatgattctgtagacatttcatttgagtgtgcttttctttagatgtgtgattagctgtaatgctttcacttatgtctgtaaattatattggatatgtttacctgatgcctattgttgatttggagttcagttttgtattacataaatgcaagttgaacttttttttttttaatttatcgaagtctttgcaggtataactacaaatactcagcccctggggaggaaaaatgctttgcactactcaacagtaacccctgcgttcagttaaaactccttataagacagcagcttttactctttattgggtcgaaaaaaaaattaggggggaggaaaagggatggaccatcactggaacaatggtaagatgaagaagaccatcttgaaaaatgatgtgtcctttccacttaatgcaggttaaaaaggggctatccctgtatatatagcatatagattctttgctctctgagttaattcaaaggattatggggagaaaaaaataaggaagaagtgaagccagtagcagtacttaattcattttgtcttaggtaaatgtaaacatcacactgatttaaaaaaaaaaatacttgcagtgagctgcaattcttagaatgggtaagttgaagacaatttcattttaatatataacccaaaagcgttttatttttattttgattttttgagacagagtctctgttgcccaggctggagtgcagtggcataatcttggcccactgcagtggcatgatcttggctcaccgcctcccaggttcaagcagttctccctgcctcagcctcccgagtagctgggattacaggtgcctgccatcatgcccggctaacttttgtatatttagtggagacggggttttgccatgttggccaggctggtctcaaactcctgagctcaggtgatccacctgccttggcctcccacagtgctgggattacaggcgtgagccaccgcacccggcctattttttaaaataaaaaccgaaaccatgactttctataaaagtcaaaaccatgactttcataaaaaccaaaccatgaaagcctctcaggtctttcacctgttagtgatcagtttgtgtagaataaatactctttactttgagtttatagctttagtaatgaactgttgatatgtatgtatatatttatacatattcgttgaatatagaatcgtgtttgcatttgtgtgtatgtgtatataaatgcatatatacacatatatatatgcacacataataatggatgttatcaaaggataataaactacttctaattttaaaaactaagttttaattttttctgtttacttccacctagaatttaatataatttaagcctgaatatctgaatttttttcaaaatctttgctatatattatttggtttcactgttggttttaaatagttataatagcaaaatatgccacatgctaagttctagtaatgtttttgaagtatcctaatacttttttttgcagcaagattttttttgtgtgagatatgaaatattcttggaaaattcataccacaaaaattcttaatttcattaagaatgtaaagatactctaacaactaagagtaactgagaatttcttgatccctactggtacatattccatgaactgttgtaacatgatcaaaatatgtttactagcactttatgaagttccttcctaccttatatttgaaatcagagcactcttcttttgttaaaaaaatttttttttagagatggggtcttggtctgttgcccaggctggaatgcagtggtgcagttatagctcactgcagcctcaaactcctgggctcaagcggtcctcttacctcagcctcccacagatgtgactataggtgcaggccaccacacccggctaattgtttttatttttatttagagatgtggtcttgctatgttgcccagcctggtgtctaattcctggccacaagcgatcttctggcctcaagcatgctgagtagctgagattacaggcgtgagcactgccaccagcctagcactcttcttttcataagagaaatattgtaagggatcattgagtgttctgaaaaggactttgaacatctgaaaagaaagagaaattaagttccaaagaatgagtagtatttatgtgttccttagaattttaactgtgggagtaacatcaccatatttactgtacctagtagtagaatccctaaggatgacaatatagccatctctatgttctgcccttatcatcttaatgagagatgtctctgatgacagttgctcacaaagtggcaaaattataaggaaataggaatatgtatttttaaaaaattatttggacagtgttgtcttgagagaggctattttctctaccaaaaatgtggtaacaaatagggtgacacccatcaaatgggtgtcagaggacaaagatacccttttggagagacaagtagcattaatctgaatctgccaggaactgtggttcaaaagtaatactataggcactctgcggttcctatggggattttccttgtgctttaagggtaatccctgaggtggctgtttttctgtcaggtaacttgaattcaacagtcaaatacttaatgtagaattaagcatacttttttctttgttgtgaaatccgggtgacaaatgaatgcttatgtgtaactgggctagcaaatatttgtgtttttttaaaaaaattattttaaatgattatatggaaaaaattgaaaccacaagatcttgtggagattaattagcctaaaatagaaaagtcaatcaaaaaatcgaccaacgaacctaggatttgaaaatcaagttggaaactggccagaacattaaaaagtaataacataccattgaatgaaactgaaagtgtctagtttgtaaattacccttacttgaatttaaaaagattatgaaaattttaaagcagttttttctataaaagattttaaaagatttgtgctctggaaaatgcaacagattatttttaatcctctctaaaaatgtataaaatgtataaaaatgtataaaatgattttatacaaaatattcatacagcttcaaattattagtttctcatcataatttttcaaattattgaataggtaaatggaattacttgtattatgttttctgttgtgcttcctgggttttgttgttgttgttgttactgttatcttggttttgttcgtttggatatacactctgttttaccctgcttctactttttggattcttctttgtagagatcatcataattttggactatatccttttgtgtcataaataagcaattgtataatgaccttcaaaaattcttactatatctaagttacaatggctataaaataaaataagacctgtttttacctagttttaaaagttttctttgtttttccatgacaatgactcaatttactagtagaatttacctcttctaacaaagtaacattaacattaagtaacattactttaaatggctaaagtataaaaggcagttctctgattttttttttttttaacaggtgatgcagaagatggggaagaatatgatgacccttttgctgggcctccagacactatttcattagcctcagaacgatatgataaagacgatgaagccccctctgatggtatgtgacattttcccacgtaactctgacactcacacaaaacaatgctatatatatgggtggtagttttatgagaaagcagatgaacatagaggcttcggttaacttacctttaccaaaaccttttaaggaacagaagagctctctctagtggttctggtgaggttttcctaagtatgtagttggttctttttcttggaaattttctttactaaaatttttgagagagtgcctgtatcatcatatgaatattattagtaacagtttgatagttaatttaatattatcagattcttgcttaattttattatgctacttgaaggcttactgtattatttattttataaataataaaaaagatttttgatctatttttttctgaaaactttatacaaaatgagttaataaaatattaagttaattttccgacattgcctcttcacactgagacaggtttttatcaaatgcttcttttaatgcgcattttcatttttatattgtcacttaaaagtggaccatattatgcagtaatattgcagtgtttgtattaactgaattagtaataaatttatctcttagtaatttctaaaagctattgaatgttgccaaagttatgaaacttgtttttagtgtagtatgtactttctctgttatagccattgagtacatctgcattatagaaaccttataagggtaatatatagttataaattaagaatgtgtatcaataaattagtcatgcatattaatttgtagcactcaaagtttcacatagacatagaaatgaataataccttctgccactatgtgatgatcaaactgtgcagttccatctctaaatacaattgctgaatgaaaatatgcttcctgcaacagagcactccacattttatgttatccagattattccctttggaaacataaattgcttttatgaggtataaaattatgtctgttgcagaacggggataagtcaagtacatgcataagtgataaacattctaaccagtgattcagtacaaaacaatctttttttatatccagaactttgtacaaagtgtagcaataatagtcatatctattttatgttgaattttatgcttcggcaaacatttaatttctatttttaaagggagggtttttttttgctgttatattcactttctatcttttaaagagataagcatttcttttctcttcaccaaaacagagcattaccctttccaacctcatcttcaaaagcatttctactagaaaatgttttataatcaaagaaataatattttcaggcaaaacaatgaattattatttaagtggtactatttttcagacacattacaattgctttatttctctgtaaaatgttggtatatatgaatgtatgtgtgtatacacatacacagacagaatatttatactaagagagacatacggagaatatattcatagactatatagacatagtttcttaaaatagcataaacattttgatatacaggggagtgctatgtgtattcttgaaaaatttgcaacctaaaaagaaattcaacaattaaatatctatgagagccagaaatcttccagtagcttgttagaaaaagtaaattattattaaattatagtgcatttacattattgttttctttttaatagtaaataatttatcatatatttttataacaaaatattcaggaaatacactaaaagattgttgttaaaaggttattttattgattttaaatattatttaataacatttatatgtaacatcaagtttttttgttaatagtgcctattcattagtgtttaagcaattcttgagcagattaaaacttttacctgtagtattactcatttttgatatataaataatactgtttttgatactttcacattttcttctaagaatatcattattaaaattaatttttaaactaccacttggacatttaatattcactctaaaatatcatctcaatgtatcagtttttctctcttcaacttagattttgtgtgtgttctctttcctttgatgaataaatttgcttcattatgtgacctcagtccaataatatattaattataaaaaagataatgcatttaacaataagcataaccgaattagcacaggtcaccaaaaggccttttgtcaaatcagattgttgttttgtccttttgacttttaccttatggaaggcactaacaaagtatctaaacttcaatgggttataaactctaaacatgatatgtatttttcataatgctaatgtaattttcaaggtactgaaaaggtcaaacctgcacatctctatgtgcattctaagtctgtcttttgctttaatatttatttttctctattcctctggttcaaaagttcactcagttcccaaatggccacctaattttccagttattcccccaagccatatgtgttttggtttctttatggtttattaggtactgtaggaaagcagcataagttatatcttctaatgaaattcaagcacacttcagtgatgcttcgacttgattgctggtagcaattaaatcatagccaaggagaataatgcataatcttacaaggtccaggcaccgtatagaaattgaatggggatgaaaacaacaaaaagaaagtttccaaaccctgccaggtacgttgttttcagcctgcctttttttttttattggccaactgcctgattgatagcaaaatcataacttgctgcatgctaacaggcagagttcacttgtaggttattgtgagctgataaagggttagatgcagttttgattttcgcattggaccttggtacaccagattaatggaatttcaatgagagactagagtagccacagctttgtcagagaaacagatggagattctatagtcatgtctactcattaatactagttgcctgaaaggtgtgctgcttctctatacaaaagagttgatataattgatttttgagttgtacattggaaaaaagtaccttattgattactagaattgtaacatagatggtgacagatttttgtatagcttgtagcttaaaaatattgtactttgtaaatttttcttttccctctttggaaatgcttcttatgttttatattttttgagaagaactacattttgagaccaatagcaaaaaaagagagaatgacatgccaaatacctttttaggaaaaagaataagagtctgtattttatttataaatgattgcatgactgctgttagagtttcattttgatattctatttagaagaaagtatacttattagaagtttcattttattagctttatgcttgatttttttctggaaaacaaaaaaatcgtaatagtttctagactattgtagatcactgttagaagttttatgctatcatgtggctggatatattggagtttcagtataaatggtgcatgtcagtaatcagataaagttagagataatgagatttacaaccttaaagaatatccctttctgtacactttaaaatgtttaggcactaaggtgggtagatatagagtagactttagacaccatataattacttgggtttccatttttctattctgaaatcatttttcattcatttttgtcatttgtgaaagaaagcttctaactatatagcactatggaaagtctctaaggtaaggtgaaaggattcagtgagctagaagacatatattggctctgcccctcgacgataggtcgaaggatcccagtagatgtatgttacaaatctgattcagtcctagaccataatcactttgtggataaaaatctgaaacctctagggtgtgaatacaggaaggctaaaatgaagctgaaaatatagaacagtcatttattgtcctggtgtctttctaactaaaaatttctgaataacctaggttactgaaaggctgtgggcattgcgagacacaggtttgtgtgaagaaatttttttttaggaatggaactattttttaaatctcagggattaagaaaaaggctgaactattatcataatttataatattaaaaattttttttggtatacttttctttacaaaaatccaatgtacaaaaatttggattaataaagcatgtaaatcattttttccaacagatttctttagagagattgtctccaggatgcctataaataattagctcttagaaagtgtctaaaacaggcttagatataaacctgtccgtgtgcacaacataaatttaatgtaccaaatttttgaggaagactttttttgtgtaaaattaggtgtagcactaatcagttcttacaaaagccacgaaatagatgttttacttttctctcatatcagtagagtatgaaacaatgtttaaaactggaaaaaaaggtttttttcaataacttagcatttaggataactatgaaacaatgtttaaaactagaaaaaaaatttttcaataacttagcatttagggtgtttttaacccactatcatatttttgacacctaaaattatcttttgtattttgttctaaaaaattcaattaatttgcaatttgcacatatttttgcatatataacatgtatcaacatttcacttttgtttttaaaatttttgggttgtcttaatatgccaaattgctagcttatatatgttttagcagtttaataacaatgattattttagtcattgtgctatgtgtatagcacagtttcaagtattttggtggaagagaagggattatagttgaggaaatgacagaaagtagaggacatatttttaatcctcaaggtatatattgtgcaattggggatataaagtacacagatgtaaaatatttttgtgatacaaaggtatatattagtaaataaaacacatagccattgagaattatctttctaagtttttatgctattgatcaggaaaattcatcagaataaaacagagtggacggatgatactataacaaagtggactagatacgaaagactgcaaaggttaagtaaaactcaacattatgaaaaataatgcatctttaattcagcaaattagcagttatttacacagtacatgaagaggagaacaagatacttggacagggcaattgggggtgaataagataaagttcctatttttaagaaaaatgtaatctagatggcaggagaagataatcacctagaataaggtaactagcaatctaggttatattaaaccagattccaaaaataataaatactacgtgctacaatattcaattgatttagtctataccaaggcaagtagttggtttcattgattttacttcctgatgtattggctgaatcagccatatgttttagcatcctgtcaaaaaaaccacagcataaactttatgcctaaattctaagagattgtggagggagggccttttatttaagtgagttttatgtgggtcttgaggtttgttgcagagaatgggaaaacaaactgaaaagaacttttggagttcaagctcagaaaccaggttttcattataattgatgataacttttttgtcaaggacaagttgcttaggcctttttggatttttattttctggtatgtgaaatgaagagtttgaaccgggtaattgcttagacgttccctagagcactaaatgcttgtgtccccacatttcagaattagtaaattgaatggtggcagtgaggtgaggtgatctgcatggggaagatatgggtgacgaccagaggtggtattgaataggaaggagtggagggggtcttggaggtaggtgcatgatttatagtaggagctgaatgccaaattaaggaatttacctttgatttggtagtcattaagagatccctgaaggagtatactgaagtgagggatgcagatttgagggatattgtcctggaagttaaatgtaggttaaatgaaggcgtagagaccatctagtggaggtagcaagctaaatgctttgctacattacttatttttaatcatgacagtatctctatgaagtagagtactatcactatttgacaaatgaggaaacctaaaatagagaggttaagtgatatgcccaatggcatatagctacatagtggcagaactggaatttgaattcatgtctgtcaactgtaggattatgctctgctcttaaaagagttactttttccctcttccccagctagcatactgctctgctgcttttgattaagggagtgattttctagccctttcctactcaaagtatggtcagtagaccaacagtatcagcatcatctgggagcttgttagaaacgctaaatctgtctccacctaatatagtttggatatttatctccgcccaaatcacatgttgaattgtaattcccagtgctggaggtggggcctgttggggggtgtttggatcatggggcaaatccctcatggcctcgtgctatcttcgtgacagtgagttcttgtgaaatctggtcatttaaaagtatgtggcacctcccaaccccactctctgtctcttgttcttttaccgtgtgttgtgcctgctcccgctttgccttccaccatgattgtaagcttcctgaggctttctcagaagccaagcagatgtccagtgccatgcttcctgtacagccttcagaaccataagccaattaaacctctttctttttcttattattatactttaagttctggggtacatgtgcagagcgtgcaggtttgttacataggtatacatgtgccatggtggtttgctgcacccatcaacccatcatctacattaggtatttctcctaatgctatccctcccctagcccccaaccccctgacaggccatggtgtgtgatgttcccctccctgcgtccatgtgttctcattgttcaactcccacttatgagtgagaacatgcaatgtgtggttttctgttcttgtgttagtttgctgagaatgatggtttccagcttcatctgtgaccctgcaaaggacacgaactcatccttttttatggctgcatagtattccatggtgtatatgtgccacattttctttacccagtctatcattgatgcatttgggttggctccaagtctttgctattgtgaacagtgctgtgataaacatacgtgttcatgtatctttatagtagaatgatttataatcctttgggtatacacccagtattgggattgctgggtcaaatggtatttctagttctagatccttgaggaatcgtcacactgtcttccacaatggttgaactaatttacactcccaccaacagtgtaaaagcattcctatttctccacatcctctccagcatctgttgtttcctgactttttaatgatcactgttctaactggtgtaagatggtatctcatggtggtttgattttcatttctctcatgtccagtgatgatgagcttttcttcttatgtttttggccgcataaatgtcttcttttgagaagtgtctgttcatatccttcgcccactttttggtggggttgtttgtttttttcttgtaatttaagttctttgtagattctgcatattagccctttgtcagatggatagattgcaaaatttttctcccattctgtaggttgcctgttcactctgatgatagtttcttttgctgtgcagaagctctttagtttaattaggttgcatttgtcaattctggcttttgttgccattgcttttggtgttttagtcatgaagtctttgcccatgcctatgtactgaatggtatagcctaggttttcttctagggtttttatggttttatgtcttgcatttaaggctttaatccaacttgagttaatttttgtataagatgtaaggaaggggtccagtttcagttttctgcatatggctggccagttttcccaacagcatttattaaatagggaatcatttccccattgcttgtttttgtcaggtttgtcaaagatcagatggttgtagatgtgtggcattatttctgtggcctcttttctgttccgttggtctatgtatctgttttggtaccagtgccatgctgttttgattactgtaaccttgtaatatagtttgaagtcagatagcgtgatgcctccagctttgttcttttttgtttaggattgtcttggctatacgggctcttttttggttccgtatgaaatttaaagtagttttttctaattctgtgaagaaagtcagtggtagcttgatggggatagcattgagtctataaattactttgggtagtatggccatttttcatgatattgattcttcctatccataagcatggaatatttttccatttgtatgtgttctctcttatttccttgagcagtggtttgtagttctccttgaagaggtccttcacatcttctgtaagttgtattcctaggtattttattcttcttgttgcaattgtgaatgggagttcactcatgatttggctgtttgtctattattggtgtataggaatgcttgtgatttttgcacattgattttgtatcctgagtctttgctgaggttgcttatcagcttaaggagattttgggcagagatgatggggttttctaaatatacaatcatgtcatctgcaaacagacaatttgtctccctctcttcctgtttgaatacccttatttctttctcttgcctgattgccctgaccagaacttccaatactgtgttgagtaggagtggtgagagagggcatccttgtcttgtgccacttttcaaagggaatgcttccagcttttgcccattcagtatgatattggctgtgggtttgtcaaaaataggctcttattattttgagatacattccatcaatacctactttattgagagttttttgcatgaagggctgctgaattttatcgaaggccttttctgcatcttttgagataatcatgtggtttttgtcattagttctgtttatgtgatggattatgtttattgatttgcatatgtcaaaccagccttgcatcctagggacgaagccaacttgattgtggtggataagctttttgatgtgctgctggattttgtttgccagtatttcattgaggatttttacatcaatgttcatcagggatattggcctgaaattttctttttttgttgtgtccctgccaggttttggtatcaggatgatgctggcctcataaaatgtgttagggaggagtccctctttttctgttgtttggaatagtttcagaaggaatggtaccagatcctctttgtacctctggtagaattcggctgtgaatccgtctggtcctgggccttttttggttggtaggctgttaattactgcctcaatttcagaacttgttatgggtctattcagagatttgacttcttcctggtttagccttgggagggtgtatgcgtccaggaattcatccatttcttttagattttctagtttatttgcatagaggtgtttatagtattttctgatggtagtttgtatttctgtgggatcagttgtgatatccccttcatcattttttattgagtctatttgattcttctctcttttcttctttattagtctggttagtggtctatctattttcttgatcttttcaaaacaccagctcctgaattcattgattttttgaagggtttttttgtgtctctatctccttcagttctgctctgatcttagttatttcttgtcttctgctagcttttgaatttgtttgctcttgcttctctagttcttttagatgtgatgttaggttgtcaattttagatcttttctgctttctcttatggtgatttagtgctataaatttcctctaaacactgctttagctgtgtcccagagattctggtacattgtgtctttgttctcattggtttcaaagaacttatttatttctgccttaatttcgttatttacccagtagtgattcaggagcaggttgttcagtttccatgtagttgtgcggtgttgagtgagtttcttaatcctgagttctaatttacttgcactgtggtctgagatactgttatgatttctgttcttttgcatttgctgaggagtgttttacttccaattatgtggtcaattttagaataagtgcaatgtggtgctgagaagaatgtatattctgttgatttggggtggagagttctgtagatgtctgttaggtctgcttggtccagtgctgagctcaagtcctgaatatccttgttaattttctgtctcgttgatctaatattgaccggtatcattgtgtgggagtctaagtctctttgtgggtctctgagaacctgctttatgaatctgggtgctcctgtattgggtgcatatatatttaggatagttagctcttcttgttgcattgatgtctttaccattatgtaatgcccttctttgtctcttttgatctttgttggtttaatgtctgttttatcagagactaggattgcaacccctgctttttattgctttccatttgcttggtaaatattcctccatccctttattttgaccctttgtatgtctttgcacgtcagatgggtctcctgaatacagcacacctatgggtgttgactctttatccaatctgccagtctgtgtcttttttttttttttttgagacggagtcttgctctttgtcacccaggctggggtgcagtggcgcgatctcagctcactgcaagctctgcctcctgggttcactccattctcctgcctcagcctcctgagtagctgggactacaggtgcctgccaccactcctggctaatttttttttgtgtttttagtagagatgggtttcaccgtgttagccaggatggtctcgatcccctgaccttgtgatccgcccgcctcacagtttgtgtcttttaattcctagttacagatttttgaccctctgcatacttttttggtgctggggtggtagggagtctagagttatctgacacactgctcagcttctctcttggttgcaatgctcatggagaaggcttctttgggagctagttcgcttgcttagagaatgagagagtggagtttgggatttagcccgaatacacaagcctttactgccagctgcttttgaggatggacccaagggttctagctgctttgattacagttctttaatgagttcttcatcatcctgtatctttgcttgtagcatctctgagtcttctctttgtgaaaactagcacttattctccttggtatcctcctgggcttaggtgtcctctgctgtgtcttcattactccagtctcatctgctttccagttgcaaggaattactcaaaaattttggtccactttctttaccttttcttgattaccagttttattaaagctttcttctttttttcttttttagagatggggtcttgctgtgttgctcaggctggccttgaactcctaggctcaagtgatcctcctgcctcagctgagactacaggcatgcaccagcatgcctggctcaaggctttattctttaaaaacaaacaaaaggaatttcaaggaaactttaggaggaaaggttgatgcttagtctatgcttcctttttaatgacaccaagaggctgctgtatcctaaaactttttcataactagtctattagaatcattggaagaagtagctccctggctaccagtcaaaggtagtccaaataagtatgtcagtcaagccttagatatagtcacttagagtgaatactagatttctagaagaaccaagatgctataagcaatagaaaggaactgttctttcctgtaaaaggactacagtgttgttttgggtaaaaggtatgcatatctaatagttggaaaccttaccaactttattcagttgcagaaatgtgtggcattgaccataaatactctaagaggttaaagaaggaagaagctattgccaactggtgtcagtggttagatgttttatggaagaagttggagtttgaactagaatttagtaagggtggatagaaatttaattagtagagaatggaaggaagaatactttctacataagttaagggaatgagggacaaggggaaacggagctggaaatgaccatagtttgatgaactgtggaaagactaacatgactgagaaaggttggagaatgggagatgaggattgacaagggtggcatgtgaaaagttttggctctggcttcaggtatttattttagagtgactaaggtatgggataggacataccttagtcactctaaaaatgaaacatagtagttaagaacatactgcctgggttcaaatacttcattgcctgtctctgtgacctccagcaaatttcttaacttttcagagtcttctcatctgtcaaattaaggataataatagtatctataacctatggttattcttaggattgagtaggataaggtatataaaaagtttagaatacttcctgacccatagtaaagacatattaaatgtgagttactattgttatccagtcaattttagggattatcttaaataaattttcctttttgtgttagacacaactgtttgtgagtgttgtctaacttctatactatatagctcatatgttttactggctaagatgaattttgtaggatttgcagttggaagttttagggattccatatacacaatcattttttcaacagggtattctgtgttgaaaactgttagtggttaaatttgctatagcaaatatatcatgcctttttcttgaacccttgtacttctttgtgccttggcttctttcttttgagtaatgagcatgtaagaataaagaaattttatacctggaaaaattttatacataggcatcatgagccttgggaaggagtcactgtgtttgatacatgagcttgatagctagtgactaaaaatttacaaacttttaagaacatttgaatgagtttggactgcattagaagatcacttatgaagctatatatgaaaataagtggggaaaaaatggtcccaaattattaggaaacaaggctgccaatcaaaacctcataattctcattcaagaactgaatggtataatgctaaagacaataacaaatccaaacagaaaaagtagtacacataactaaaatgcagggctgcaaagtcattagtagcaaataaatgccctgttaataaataagcccagagaggattagggcaaaactgtatattatttttacaaaaattaaacacagagaaggtaccattctccagctttcacatgtgcttatcaaagtatttctttttcaaaactcagagtcgatatcagggtccttgcttcacacttgaggaaaaattaagtatgctatagatttaaaaataacataaatactattgaagaaaatatctctgcaaggaagttataagaattagctcaggtaaattattttcttgagctcgttatatatgaatagcacattgatttacagaattgagggtaagacttaagcaattttaaaattaaaccttctaaaattatggcttgagaagacatgcatttattgagttaaaagagatcattttgattttacatagtttaccaacagtttaggggtagggtctaggattcttaaagtatttttttttactcactttattgagatatatttaaccatagaatatactaatttaaagtatacaattcaggtggtttttaatatggtcacagaattatgtaagtataatcccagtcaattttagaacattttcatctccacgaaaaagaaactccatgccatgagtagtcactctcagttttctcctaacccttctcctccatctctctcaaaggcctaggcaactatgaatctaatttctgtttctacagatttatataatgtggatatttcatataaatggaatcatatatcagaactttgtatgtctggctttttttacttagcataatgttttcaaggttcatccagcatattaccagttctttattcccttttatggcccgataatgcttcctgtgtggatgtgccaccttttgttcatccatcctcaattgatggacatttgtgttgtttactctttttgactattatgaataatgcacatttgtgtaaaactttttgtgttaatatattttttcatttttcttgagtatatacctaggaacgaaattactgtatcatatggtatattttggtttcattttttgaggaattgccaaactttttccaaatgactgcaccattttatgttccagccagcgatatgtgggggttctgatttgtccacaattctcttcaacacttactgtcttttttatttcggccatcctagtgaatgtgaagtggtatcttactgtagttttgatttgcacttctgtaatgactaataatgttaatcacctttttatgtgcttattggccatttgtatgtttttagagaatgcccacttcaaattcttttcttatttttcatttgggttggctttttattgttttttgtttgtttgttttgagccagagtcttgctttgtcacccaagctgtagtgcagtgtggtatgatcagggccctctgtagcctctacctcctgggctcaacgaatcctctcaactcagcctctcaagtagctgagattacaggcgcatacgactacacccaactaattataaattaatttaatttttttgtagagacagggtttcacttttgttgcccaggctagtcttgaactcctgggctcaagcgatcctttcaccttggcttcctgaagtgttgagcctcccaaagtgttgagcacaggcatgagccactgcacctggcctatttattgttaagttctgagttatttatatattctggatactagttgcttatcagatatatgattggtaaatattttctcagtatctacaggttttcatttcactttcttgatggtatccttgaagcacaaaagttttgcattttgacgaagtttaatttatctgtgttttcttttattacttgtactttatttatttatttttttgagacagagtctcgctctgtcgcccaggctggagtgcaatggcgcgatcttagctcaccgcaacctctgcccccactgggttccagtgattctcgtgcctcagcctcccaagtagctgggattacaagcgcacaccaccacacctggctaatttttgtatttttagtagagacggggtttcatcatgttggccaggctggtcttgaactcctgatctcaggtgatctgcccaccccggcctcctaaagtgctgggattacaggtgtgagccaccgctcccggccatcacttgttcttttgtgacgtgtctaagatgtctgcctaactgaagattctatttttttttttttttgagacagagtctcactctgtcgcccaggctagagtgcagtggctcaatcttggctcactgcaagctctgcctcccaggttcacgccattctcctgcctcagcctcccgagtagctgggactacaggcgcccaccaccacgcccggctaattttttgtatttttagtagagacggggtttcaccgtgttagccaggatggtcttgatctcctgacctggtgatctgcctgcctcggcctcccaaagtgctgggattacaggtgttagccaccgcgcccggccttgctataccttttaagctcagtgaactcttgaattctctagcctttaacatcgttcgttaaaaagaattcttattttgtttatataccgctatcatttctagcaacataatacacagatttgaaatgtaaatgaaatgtttgttgcattgcaaatacaaacctataatcacatgactcttctttcatatcagttttccttaagttatttcagagaacacatagtctaatagatcattttgttgactttctgggttctccggggccaggctttgtcaatacatagttatagcggtgggatctaaggggtgctgtgatcatggtcttagaaaaatggttactgttgttagcttaacaaaagaaagttagtttgtttatttgaattgatctcttctctcttgttaagatatgtatgtatgtatgaatgtatttatttatttattttttccctgtgtcagtcacataggggactgagacacaaagaggccatgtgaattttctaagcagcacttgctatcagtgtgtggcctaaagactggtcctgatttgtgatctatttgttactggtcaacgacaacataagtacaaaaattaagaataagcatttagaaatgtttatagcaatttgatatttctgccttatctaagtacgtgatcttttttctagtaatttatgtttttgttgttgttgttatttttacaaaaatagtggggtttgtgatgtcttgggaaaaactggttctttaccacagattgaaccattgatctaggttcagagagaattatttacagtagtgccagaactattttgattgctggactttttattttgaattcctatatctttctctgtatcttcctccatagccatagtcgtattttaatttaaatgtttaggtttattttcactatggagaaactttaggccttctaatcccacatttctcatcaaatatactttcagattccaatgtcataatcagatattaattatatttttgtatgagagtcaagcaatggagcgtgctgaaagtttttcatttggaatatctagagaaaagggtaattgaatttgaatatcaactaattctttttcatacctaaaaagcggaaacatataatgccatatttaaagactatgtcagaaagtaatttcatgccagagatgcttttgtgttgttttgtataaatgcctccagaagctcctccttgctttttaataccacctgtgagcttttctattttgaacatgctcatgtctttctttaacactaaaggagtttaataagaattatattttaatatcaaaaatagtaaaatttcttaccacggggaaaagaaatacacatatatttctttcactgaataggacttattttggtgttggtgtcctgggatctatgtatgttataatcccctaatacgcttaaaataggatttcttttctaaaagaaaatatgtcttataagatgtaattgatttttaaaataaaagtagtaagaaagggtaatagtgtacgttttaggcaaagtgctagatggaataaaagtttatttcaatagattttacttttagctattttagacttgggagaataaaatgattaataaggtatgtcactgtctttaaggaccttatttatagattagtagagacaggagagatataaatatcaactaattcaaggcagattggtttaatcactattacaagaaatatagaaggagaaagaagacggtaattatggtgggaataaagacagacttgataacattaatggcatttgaaccaggtctaggagaataagatttttgatatgtagaacatggaggtaatagtttttcacatttgtgaaacagcctggtaaagggatatattggtcagaactctttgaatggacaggacagaaaaagaaacccaactcaaactggcttaagcacaaagcagaaagggaagtttattggttcacttgtgaaaaatgaatagaattggaatcttgcctcttgcccacctagatccaggtaggtgttcaaactgtaatgagtattcccactcacatactgctttcctatgtgtagcttcttcttagagacactgtacccataggatggctgtggcaaagatgaccacccaccagcagcttcttagatatttctaccaggttagcaaccccattgaaatagagatctctcaagaattgcagcaggaatccttggcttgggttatgtgcttattctaaatcaatcactgtggcgtgtgtgtgtgtgtgtgtgtgtattgcacgaattggctaggtctggatcgtgtgcccaaaaaagagtttgtggagaggggtaaggccagcttcacctgatccccatggagatttggggaggtaccattctccaaaggaaaactgaggtagtcttaaagaaataagcaattcaaaagcaaagagcaggcaaaaacagccactaaaggtaggatatgtgaaagtatgactaaacttaggtgttgtaaaaatgtgtatagagagaataaaaggctgggatagataatagttatagatatacattcagtagtggatatttcaagttcattagaggagagtataatgtttatgcagtaggttaaaataattatttagcatgctaaattttgaattgatttatagagagaagagctggaggcaaaaataaatgttaaaactgtctagactggttaatttttaaattcttattatttttcacttatttattttcattaattcttcaaacctttcataagagctgatgttccagttagtgaaagttctcctttttttttttttttttaactgtttgctgtttggccattatattctttctctttttagcaatgtatgagaagagaggattaactagataaaataaaccaatcacttttacttgttagcacctatatgaaaaggtacaattgtatagattagaactaaacaaaaattagatttttagattgtttgaatttaatttgtcttggatagacatgctttttatttattttttcctaatttctattctttagtaaaaaacaattgaggcagttagcgaagatacatatattataccaaggttaaaaaaaagaggaaatcaaaggtggggaaaaggaggatacataggaaaattaaagtaaggctagtattaatatctgtatctcaaatgcataccataagtactgtagcttttgctggagattacttacttatttgaccctcggcttgcttgctttctttgccaatgcaaagaaggaaaactgattaggtgcaagatttatagtgttcttgctataaaaataaatcaagtactcaagagaaatacagttcttagtacctgtagcactaggacctggtgaaatttctttcaagggggctttaaaaagaacgtcatataatgtggtaaataaaaaccacaagagtatatttaataatgctctggagttctttctgaaaacatccaccaacataggtatgtagcataatgccaaaatacagcttaggacaagtcatttttgtgtggggccaaaataacagtctagatcaggggttggcaatctacagcccatggagcaaatttggcttgttgctatattttatagataattatacagcacagccatacgtatttgtttacatattgtctatggctgtgttcatgctacaacagcagcagtatgtagttgttacacagaccatagtcccacaaagcctggaatatttctagtctgacactttactaaaaaagtttgtccatccttggtctagatacacaactcactgatggattggtttaaaattgagacagtatacaaagtgtctagaacaagggtctcaaactgataggccaagttacaaatttggcctataggtatattttgtttagccaaaccagtatttgacttttgaaaatttctgccaacccagaaaaattcagatttatgccttctctgggaaaattggatagtctggcaatactgagcttacgttgtgtttgtcatcctttaaaaaggatgcaccctctttttccaatttgtattccttactactatattacctcccagcacactattgtgtgcattatgtctacaaaaccccacacatactgtaattttaaaatgctttattgttaataaatgtcagcaatcatcttagccctcagagaattataacctttttgctggtcgagggtctcgtctcaatgtggatggctgctgaaggttggggggctgtggcagtttcttaaataaagacagcaatgaattgattgattcattgattgattcattgatttctttccatgaaagatttccctctggcatgtaatgttgtttgctaccattttacccatggtagaatttctttaagaattggagtcaatcctctcaaaccctgccactgctttatcaactacgattatgttatattccaaattaattgttgtcatttcaacagtgttgttagcatcttcatcaggagtagatcccatcacaagaaactactttctttgctcaccctgagaagcaactcctcatcccttcaagttttatcatgagattgcaacaattcagtcatatctgcagggtccacttctaattgtaggtctcttgccatttccaccacatctgcagtgtcttcttccattgatgtcctgcacccctcaaagtcatccatgagggttggaattaacttcttccaaactccttgcacttttttgttatgaagatggcttctttccttaaacctcatgaaccaacctctgctagattctaacttttcttctgcagctctcatctctgttagccttcatagaattgaagagagttagggccttgatctgggttaggctttggcttaagggagtgttgtagctggtttaatcttctagccagaccactcaaagtttctccatatcagtaattaggctgttttgctttttgcttgttttttttttttttttttttgagacaaagtctcactctgttgccgaggctggagtgcagtggcatgatctcggctcactgcgacccccacctcccaggttcaagcaattctcgtgcctcagcctcctgagtagctaggattacaggcgcccaccaccacacccagctaatttttgtattttcagtagagacgaggtttcaccatgttggacaggctggtctcaaactcctgactgcaggtaatcctcctgcctcggccttccaaagtgctgggattacaggcgtgagccaccacacctggccaggctattttgctttcttatcatttgtgtgttcactggagtagcacttttgttttccttcaaggacttttcatttgcattcacaacttggctgtttggcacaagaggccttccttttggcctatctcgactttctacgtgccttcctccctaagcttaatcatttctaccttttgtaccttttgatttacagtgagagatgtggaactctttctttcacttgaacacttagagcctttgttgggtaattttttttttttttgagacggagtctcgctgtgtcgcccaggctggagtgcagtggtgcattctcggctcactgcaagccccgcctcctgggttcacgccattctcctgcctcagcctccctagtagctgggactgcaggcgcccgccaccacgcctggctaattttttttttttttgtatttttagtagagacggggtttcaccgtgttagccaggatggtctcgatctcctgacctcgtgatccacccgccttggcctcccaaagtgctgggattacaggcttgagccaccacgcccagcccattgtagggttattaattggcttaatttcagtgttgttatgtttcagggaataaggaagcccaaggagaggcagagagataggggaaggttgagttgtggagcagtcagaggacatacatttattattaaagtttgctgtcttatatgagtgcagatcatagtgccccaaaacaattagatggcaacatcaaagatcactgattatagatcaccataacagatataataataatgaaaaaatttgaaatattgtaagaattaccaaaatgtgacacagagatacaaagtgagcatgtgcaattgaaaaaatggtgctgatagacttgttccacaagggttgtcacaaacctgcaatttgtaaaaaatgcagtatctgtaaagtgcattaaagcaaagcacagtaatatgaggtatgtttgtataaatacagatgggtaattgaagaccaaatgacatatctgttacgtttactactttggctcatcagttgtcatacttaacagaggtgataatggatgaagctatcaccacagaaataaagaataaagattggatttggcaaataaaatacttacattaataattattattaattatctgacaaatgctaatgtatcagattaagcaggcagagataagagttgtaaggaatggatcaaatgacaaataaattttagtttgttatgggagggagctggaagtgtagaagaaaggaagggcttggtatacttctggggaactcaggcctgggaagaaccggagtgtaggatcaacttgatgggtgggacaaaggggagtaaatagccaggggtagaaccaatggtagacttcatgattatgcttaacgtgaatcttgatacttagattcttttctcagggaggtgatattatctataaagaaagtggaaaggcagataagaaagatcaagtttgttgagcttgaaggagtattgagaatccagtcaaagatatttaagagggagtctgagatatggaatagagatgtggcaaatcattgatttattcgcctaaacatgtttaatatcatgagaaagagaagactttccagagacagtagaatgagatagatgagaagatttagaatagagacattttctccaactttcctcacaggtaaaccaggagaattgctgcttttgtttctaaacctgtgattctattttacagaattttagaagccattaattactttcattccttagtatgattatagtcctggtgatacattttatcttggtcattttctttggcgttcatttgaatgttgatgtgatcttaggctttttttcctccctctttgttttatctaattatttttctccatgtaattcaggcatcatgttatgttactatgtcttgtcctggcaacttatataatattaagcaatattcaaggcagatcagatgtacttttagtatctgcatactaaattttcaaggactttaaaaaagataaactcttatgtttcatcatgtcatgagtaaatagtactgttgtcgtcaaatgcacagattattgtatcctatatacctgggtttaatcctggtttgacactctgactttgaacaaattattttctgtttaagccttagtttcttaatttgtaaaattagggataattaatagtatttcaaaagattgtagtagggataggtacataggacatgccaatgttagctcttggttactgtaatgtcacaagatgaccaagggatggaataattgacttgattttagtacatattttctttggaatttttatccatgtttgaacataagtagtttaatttgtgttggacaatattttatttaatcatatcatattgtgagtagctaaaagataactgattatttttatgatttaatattcaactttttgctaataaatatggcaggcatttttacgtggtggttcataaatgtcatgacctgtgtgttgacctatgttaaatttctgtgatcttttttatttgggtgaatcgtatttagcttcctgtctgttagatagtaggaaagtaatgaaacaatagcatatgagaatttgatcaaaatgaaccttaatcctgagaagcattaactggattattttgttagaaatatgccaatggatttaaaatgtagataatcttgaaatttcaaatgatttcattctttggttggttgtttacctacttgatgaccaaaaaagccaagatatgtagttactgtcacattaaattcagaaaatattttataaataaagcttcattttaaatgtactaggaggtaacttttgagaaaacttattagtagatactgttttacaagtggaaggattatgttttgtgacaattattaacagttttaaaaatcaagttcttaaatatttgattttttaagagataagatctcacaatattgcccaggctggaatagtggctattcacaggtacaatcatagtgcactacagccttgagttcttgggctcaagcaatattcctgcctcagccacccaagtagctgggactataggcatgtgccagtgcgccaggcttatatttgatttttttaaattttctgagcacttttattttaacttttatgaataatttcaaacatacagacatagaatattataagaaaacttacatgtatccatatctcagcttgaacagttatcacctcgtagacagtagtcttttgtttgtacttgctctacttgctccttctagattattttgaatcaaattccacatgccattcctaaatattcccagatatataatatagatagtgattattttaaaaacaaccttaatactcttatcacaccttaaaaagtagcagcaattacctaatattatcaaacatacagatataaggcatgtaaagatgctgtcttttaacaactgaaggcattgaaaaattaacatttcagaacgtgattagtgttaaagtggtttttgtcttgtgaacactgagaaggggagaaagcatgggaaagttcttttttttttttaagtatactttaagttctgggatacatgtgcagaatgcgcagctttgttacataggtatacatgtgtcatggtggtttcctgcacccatcaacccgtcatctacattaggtatttctcctaatgttatctatccctcccctagcccccaccccccgacaggtgcaggtgtgtgatgttcccttccttgtgtccatgtgttctcattgttcaactcctacttatgagtgagaacatgcggtgtttggttttctgttcctctgtttgctgagagtgatggtttccagcttcatccatgtccgtgcaaaggacatgaactcatcctttttttggctgcatagtattgcatggtgtatatgcgccacattttctttatccagtctatcattgatgggcatttgggttggttccaagtctttgctgttgtgaacagtgctgtgataaacatatgtgtgcatgtgtctttatagtagaatgatttataagcctttgggtatatacccagtaatgggattactgggtcaaatggtatttctggttccagatccttgaggaattgccatactgtcttccacaatggttgaactaatttacactcccacgaacagtgtaaaagcatttgtatttctccatatcctctccagcatctgtcgtttcctgactttttaattatcaccattctaactggcatgaaatggtatctcatcgtggttttgattttcatttctctaatgaccagtgatgatgagctttccttcatatgtttgttggccacataaatgtcttcttttgggaaatgtctgttcatatcctttaccccctttttgatggggttgtttttttcttgtaaatttgtttaagttccttgtagattctggatattagccctttgtcagatggatagattgcaaaaattttctcccattctgtaggttgcctgttcactctgatgacagtttcttctgctgtccagaagctctttaattagatctcatttgtcaattttggcttttgttgccattgcttttggtgttttagtcatgaactttgcccatgcctgtgtcctgaatggtattgcctaggttttcttctagggtttttatggttttaggttttaagtctttaatccaccttgagttaatttttgtataaggtgtaaggaaggggtccagtttcagttttctgcatatggctagccagttttcccaacaccatttattaaatagggaatcctttccccattgcttgtttttgtcaggtttgtcaaagatcagatggttgtagatgtgtggcattacttctgaggcctcttttctgttccgttggtctatgtatctgttttggtaccagtgccatgctgtttcggttactgtagccttgtagtatagtttgaagtcaggtagcgtcatgcctccaggtttgttctttttgcttagggtcatcttggctatacgggttcttttttggttccatatgaaatttaaagtagttttttctaattctgtgaagaaagtcagtggtagcttgatggggatagcattgaatctataaattactttgggtagtatggccattttcatgatattgattcttcctatccatgagcatggaatgtttttccatctgtttgtgttctctcttatttccttgagcagtggtttgtagttctccttgaagaagtccttcatatcttctgtaagttgtattcctaggtattttattcttcttgttgcaattgtgaatgggagttcactcatgatttggctctctgtttgtctattattggtgtataggaatgcttgtgatttttgcacattgattttgtatcctgagactttgctgaagttgcttatcagcttgagattttgggctgagatgatggggttttctaaatatacaataatgtcatctgcaaacagagacaatttgattttttaaaaagaaataaacctgtgtcatgtgtctatctatatgttttataattaaataaatttaaagtcttaatgttgttgtctgcaattgtatcaactggaattctaatcctttggatggtaaaaatgcatgagacataggtgttgttctttatatacatgatatttggattttatataataataactcctttagttgacaattgttccccaattttttttcttgctctgttttactatccactgagttttaatagtgtccgttatcatgaaatatttcctctctgctgacattcttttaaatcccctgtctttctgttctgattttcatctaaagatgtatttcaatgtatttttataaatcttgatggatatataaacctatagacctgtgtgaatgtatacactcctgtgaactagctgtactcctctgagactataaacacattgctggtctgttatttagtccagatatataaagattgaacagctttttatcccaaaatcatggtgggggaatgtgtaataaggtgttgaaatgctgatgtccatttaaaatgttataaatgttttaaacaagctatttgaagtatgcatacacaatttttgtttgatgaggaaaagtgagttaggtgtggtttaggtaaagcatatcctctcagattaatttttccatcactgtgactgtgcccacaacaggggttcagatagtgcactgagcaaaccatgttagcaattaatttcctatccttttgtaacatgttagaaaatgtgtcagaaaggtttcagtgaactttgatcaaattagtttatgcctgtgatttgactaatacttttctagaatccttgtgaatttagtcttgctttcatacttagcaactaattaatcagaacattttttttgccttatcaaatttctttgctagagaaatctaattgatctgttactgattgttgtttgagacaaaatccaaaggccatctcttagtgtaattactaatatattaagtgcatcaacacatacttatattgtaaaaattgacagtctgaattttcttatttttaatatcttagtattcttaattttcttaatatctgacttactacaactagagtaatataaaacagctgtaaaaattgactgtattttaaaaattgatagcctaaattttcttatctttaatatcttagtattcctaatattcttatcttaatatctggcctactaaaactagagtaatacaaaacagctgtatgtattcataagtgataggaggccaaagaaacaaaaattttttctcagcataagctctgccagttaatgctgaatatgtaactatttttcatttcaaaagtatgagtaaaattgatattttttcataattgcataaattaacaatgcacttatcttttatctaccgtgtggttggattttgaacgtgtcttgcgatgttgctacttctttagcattctttatatagcacaaagtgggaaatgcttctttttataagcaaaaacatggacaaaacatttgttagaaaacgtgttaagtcagttatttagccatgagatcatcatatgcaaccattatctatttataattctccttttggaaagtaaatagaattttaacaaatgctgtcatttaatgtcaagcaaaatttcaaaaattttttaaaagcctgatttttaagtaatggagctatactaaaatgctttagtgtttattgtatgtggattttatgcagttgggtcaggttatcaatataattgactagggcttaagatgaaaaactgagattatattctactttttactatatactgttttatcattcccaactaagtttggggctacttaaaccttgaaaaatttactgatgtggtatttagaatctgttatttgggtatcataggaagaatgtagtgagttggtggtaattgatttatcctccatcatactgaacctcccactcgtcttccactttgtcctcccttgggcaataatcacagggtcgaactgccaatctgtagacttaattttttccagcagtaccatctggctccttggcaccataagttatattggttctttgtggctgttactgagtttgtcatattgttagacagctgatgggatgttttttgctattcgacccttttaaaactaattattgatttttatttagagaatcttctttggccatttatgatagcatggcaggattttattgtgaaaaaagtagaatgcacctaaacaaatcctatattatgtgtcaaccttgagattctattctctgtattgtattctgtctagttctttagtagctctccctttcaagagagattaaaattaattgtacaggttttctgtttcattcaaacctgtatgtgtttttaaattatttgaatttgcatttaaaatcctgttattactgcagtcatttcctagtcacgaatgtttagaagtccctattagtggcacagataaacttctaatacccagtaatactttatccccttaaaaaaaaaaagaccatttgtatattatcttgtgttttattttgtagataggtggttttactgttatgtctaatgacattcataacaatttaaaagagtaattttgaaaggtagttctgagtttcagtaattaaaaagaatagcctaagcacatttctatttttcatattacacttaactagacatttttgatgaaggcaaaaattatttgacctatttgtttctaaagtaaggatcataaacaaaaataaataatttttttaaactcttgaatctgcatatgaagcagttcattttgcaagtatttatcatatttgattgcatttatttttaatggtacatgataaacgtcttttagaaagttttaaagtagttattttagaacacaataaacatcttttacaaggccctttagaggttttcattcatataaaagtgtttctcttgagtttaaatatttaattagaatctgttaatctatgttgcattataataatggcaggatactgatgtgttggaaatatttacactgaatctttttttttttttttttttgctggtgtaagggtgtttgaagttcctaaagagtgatttcgctgggattattttaataccaccatattagaagcctgctaactacaaactggactttacagaatattagataaaatatacagctaaattgctgtgatttggttgtgatgtgatttcatttaaagtatgtaaagaagaggagcagtaaatatctctctgtaagaggagctaaatcagatgtcagtgaaatgattcatgtgccaactggaatagttaacatgcattttattctactgtctagcaggaggaggtgggctatagaaaatgaattctccactaaataatttacaacaattacatcaaattttaataatgagctaagaaggcatacatatgattcatgttctcacagtttcctacattagagattaattgtgcttttgttaaacaaaaatgtactcttataaatatttttaattagtaaatcatgattagttttatatttatagagtagcatcgtttgatcaatttttagctgtagcttcatatgaagctaaaatatcacagctaaatctgttgtctcaaatgccagctcatgagaatttgctcctaatatcaagaaacgccctgaattgtttgttggctttatcttaactcaaatatgtaaaggggacagtagaacatttttctttcgaatcacagagagttcagtgacctttctgtggcaaattacatagaaagaaaatatttatattcatttaaaataacctctgtgaagaaatagtctcattaccctgtttgatcaatttcttgtagcctgagctgtagcatgctgctattgccattggttgatggaatacactgagtagtggctaatggtgatggtgctcatcaggaagggttcagccagcggtcagcaacaaataattcaagactgtttctaagtttgtggctggtggaatttgctttttgccccaagccagcggcattgctgagctgggctatttgattagaagagaggcatatttgcttcttagcaactgcacatttgcacaacccatagtcctttactgcctccaaaggttttccttttgtggtggtagaataatactttattgttgattgacagacaaaagaagttctaatacaaggcaagcttataaccatttttgttgttgttggctttaaaaaatttcagctacatacgccattttttgaaaaagtatagacaaaaggtatgtatagtgtaaatcagtatggaaaccccaatatgctagatttttaatatattatcaaggaggtttgcacagcatgaatacaattgcatactgttacttttgtgcctagcaggttcaatgatagaaaatcaattctgactccagtgtatgtacctatatcaatattctgggtgtttgcagtctccaactagaattaatgctagagaaaatttaactaataatttttaaaaaaattgaagttagtagaacatctatatagctttgtcacatttaagaactagtttttatataagattagaagtcaaattttgaattctgaatacagcgtgagtatagaatttggaatatagttctcacaggaatgaacttacctttaatagaagacagaggtatttataactcaacagttaagaaacaagtgagaaaagataaatttggggaggacagtttgagttttatgatcctgggaaaccaggaccggaaaaaaacaggcttttttttttcttttttaaaaaagcatggttttatggcttttctcactgaaactgtatggttaggacttgaatctcaagattttaaggaagatggtataaaaagtgatacgaccatagatgataattttattcttgcattatttttggtaatagttttttaacatacctattataccttaaagaaataatgcgaaactatttgagtcaatacattttgatatacatcatttaaacccattgtttaacatattttgtcgacgtaattcatggtaaaatgaaatggcatctgtaagattaattgccattggttgatttttttatattctatgaagttatgtttagaacatatggtgcttttttaagggatttttttttgtatttttgtctcctaaggtttagaacagatatgagaatttccgtaatttaagatgaacaacagaaaagtgcactggtgtgaattatccagttcacaaatcttgaaacatgttttgggatttagggaagttaaagcaagtgcagacattaacatagacataaagtgtatatgggcaaatactctcatttcccagtaaaaggaccttaggatatatcagtatgcataatatgaccatcactctatttacttactaagacatagccattttagtggcaacctagagcccaaaaaagggaaaagaagtgaggttgagtgatttgatattgcaaggcagtaatatgcccctttgtatcaagcagctgtccctttgcaatttcggttaacatctttgaaacagttcccttaaaaacaaatcagggccctaggaggaaatagaaaatacttttaagagtggttttaaattgtttaaaaattaacatgcctgcaaataaattcccaaagttaggatgtgactttaatgttatataaattaaggttatagcttttgctagcattttacttataaggtaaattatgggaatttgatgtaataaggaaaatgttctttaaattactaaactctcttgcaaatagttgcaaaatggcattttaaaactctaatctactacattaaaattacttgtatttattagtctgtatcattagatggcatttactactaagtgcccttttcttctcttttaatagcttaacagtttcttattttgggatacataacaaaagacagttttcttagtggggctttatgacaattatcacctgcaggtggaggggggatctgttttattactgactagtttcttctctccatctcccattgcaaatataaaaagtacaaagtaatgtacaaaatggtgttcttttggacttaagtttttacatataggtccatttgttgagagagaagaggaacagagacaaatagaggtttctggtgcttttctactaggtaaagagggtgtagggacagggaaagagaaagatggtgtggtttggggatatggatgggattttttaatttgttcaacagaaattttcagtgctccagtggcttcctgaagcctttaaggtaaaatcaatagagaaatatatcagaataattttcagtggcatgcatgatgaattattgttttattattgaagaaactatggcccagagagattaggtgatttgcccaaagctacacagcaaataatggtggagctgaggtagaaatttaggtcttttttttctccaaagcctacaatctttttctggtggaacacgaatacctgctcttcaggcttgttgtgtttagggacatgagctttggatgctaacaaataagagatgaaagctctgagacttgctttgtgactggtcaaactacttgacttcattttatttttattttttaatttaaaaaactttaaattgacaattaaaattatatatagggctgggggtggtggctcatgcctgtattcccagcactttgggaggccgaggtgcgcggatcatgaggtcaagagatcgagaccatcttgtgcaacatggtgaaaccccgtctctactaaaaatacaaaaattagccaggcatggtggcgtgtgcctgtagtcccagctacgcgggaggctgaggcaggagaatcgcttgaacctgggaagtggaggttgcagtgagctgagatcgcaccactggactccagcctggtgacagagtgagactgtgtctcaaagaaaaaaacaaacaaaaacatgtatatatatatatggtacacagcatgatgttttgatatgtgtatacattttagaatggctaaatcaagttatttagctcaagtgttacctcatgtacttatatttttgtggtgagaacctttgaaatccactgttagcaattttcaagtataagtaggttaagcagtcaccgtgatgtacaatagatttctgaacttactcctcctatctaactgaaattttgtatccttggactagcatctccccattcctcctattcctcagtgtctggtaaccaccattttgctctctgtttctgtgagtttgacttttttgtttttcttgttttctttttttttctttctttttctttccttttttttcttttagagacatggtccaggctggagtgcagtggtgcaatctcagtttactgtaacctcaagccatcttcatgccttagcctcctgagtggttaggactacaagggtgtaccacaatgactggctaatttttttatttttgtggagatggagacttgccaggttggctagtctggtcttgaactcctggcctcaagtgatcctcctgcttcagccttccaaaacactgagattacgggtgcgaaccactgtgcccagcccaactttttaacgctacatataaattaagatcatgcagcatttgtcttactgtgcctggcttttttacttaacttaatgccctccaggttcatccatattggcacaaatgacaagatttccttcttttgaaaggctaaatggtattccattttatacatatactacattttcttcatctattcatcttcatggacacttaggctgattccgtatcttggctattgtgaataatgctacagtgaagatgggagtgcagatatccccttgacatactgattttgtatcttttggatatattcccagaagtgggattactggatcatatggtagctctatttttaattttttgggggaagctccatactgttttccataatggttgttctaatttacattcccacaaacagtatacaaggctttccatttcttcacatcctcacaaacactggttatcttttgtctttttgataatagctgttctgacaggtgtgaggtgttatctcattgtggttttaatttgcatttccctgatgtctagtggtattgaacattttttttgtatacctgttggacatttgtaggtcttcttttgagaaaagtttattcaggtcctttgcccactttttttttttttcttgtgaaacgaagttttgctcttgttgcccaggctggagtgcaatggtgcgatcttggctcactgcaacctctgcctcccgggttcaaatgattctcctttctcagcctcccaagttgcgggattacaggcacatgccaccacacccggccaatttttgtatgtttagtagagatgaggtttcatcatattggtcaggctggtctcaaactcctgacctcaggtgatctgcccaccttggcctcccaaagtgctgggattacaggcgtgagccaccgcgcccggccagaccacttttttattgagttttgttttcctactattgagtctgttgagttccttatgtattttggatcttaaccccttaccagatgtgtggtttgcaaatattttctcctattccataggctgtctcttcactctgttgattgtttcctttgccgtacagaaactttttagtttgatgtaaccccatttaccaacttttgcttttgttacctgtgctttgggggtcatatctaaaaattctttgccaagaccaacatcatggagcttctcttctgttttcttctaatatttttagtttcaggtattccacttaagtctttaattcactttgagttgatttttgccgtaggcattgttgttatacccattttgtacatgaagaaattaaggtatagagagactaggttacatgcctagtaagtatcggaaccaaggttgagacccaagccatcttattccaaggcttgtcccttcctttttttttattatggtaaaagacacatattatgaaatttacaattttaaccacttttaagtatacatttcagtggcattaagtatattcacaatgttgagtaaccaccaatcaccgttttcataatgttttcatcattgtaaacggaaactctgtatccattaaacagtaactccccattcacccacctccctaccctctgctcccacaacctctattctatttttagtctctgaattggcctgttctaggtacttcatgtgagtaaagtcatactgtatttgtacatttgtgtctggcttattttacttagcataatgtctttaagggtcatcatgttgtagcatgtatcagaatttcattctttttttaaagctaataatattctattatgtatgtataccaaaatttatccattcatctgttcatggacatttatttgggttatttccatcttttggttattatgaatactgcagagcctacacttttgaccacagccctatacagatgtattaattatttattgctgtatagcagattacccctaaacctgtgtattattttattatcacagccatacctcagagatattgtgggtttggtttcagaccactgcaataaaatgaatattgcaataaagcaattcatgagttttttgatttatatgcataaaagttatgtttacactatactgtagtctattaagtgtgcaattagtattatgtctaaaaaacaatgtgcataccttaatttaaaaatactttattgctaaaaaaaagtgctaacaatcatcttacccttcagcaagttgtaatctttttgctggtggagcgtcttgcgtcaatgtggatcactgctgactaatcaggacagtggttgctgaaggtttgggatggctgtggcaatttttaaaagtaagataacagtgagttttgccacatagattgactcttccttccatgaaagatttctctgaggcatgtgatgacatttgctagcattttacccaaagtagaactccctttcaaaattggagactgtattagtccgttttcacactgctataaagaactacctgagacagggtaatttataaaggaggtttaattgacttgcatttccacatggctgggggcgcctcaggaaacttaaaatcatggcagaaagttaaagagacacaagcagcttcttcacaaggtggaaggagagacagagagcaaggagggaactgccaaacacttttaaactatcagatcttgtgggaactcactcactatcacaagaacaacatggggaacccccacttccccgatgatccaatcacttcccaccaggtccttccctggacacgtgaggattataattcgagatgagatttgggtggagacacagagccaaaccatatcagaggcaatcctctcaaatcctgccactgctgtatcgcctaaatttatgtaatatactgatccttccattattgtcatttcatcaatgttcacagtgtctttactggtagtagattccatcgcaagaaaccactttttttgctcatcctaagaagcaactttgcatcccttcaagttttatcatgagatttcaacaattcagtcacgtcttcagggcctacttctaattgtagttctcttgctatttccatcatatctgcagcgactttctccactgaagtcctgaacctctaagtcatccataagagttggaatcagcttcttccaaactccttgcacttttatgttatgaagatggcttctttccttaaacctcatgaaccaacctctgctagatttcaacttttcttctgtggcttccttacctctcagtcttcatagaattgagcagagttagggccttgagctgcattagatttcaccttaaaggagtgttgtaactgatttaatcttctatccagaccactgacacttcatatcagcaaaaaggcttttttgctttcttaccatttgtgtattcactagagcagcacttgtatttaccttcaatgactttacctttgcattcacaacttggctgtttggtgcaagaggccagctttcagtctgtcttggctttcaacatgaatttcttaccaagcttaatcatttctagctttgtttgtttgctttgcagcctcaaattcccaggctcaagggcttctcctacctgtttcctgagtagctgggaccacaggcatataacgccatacctggcttatttatattttttatattgatttgtttatttattgattgattgagatgaggtctcactatattgcccaggctagtctcaaactcctgggctcaagtgatcctcccactttggcctcccaaagtgctgggattacaaaagtgagtctagcttttgatttaaagtgagaggtgtgtgattcttccttttatttgaacacttagaagtcattgtagggttattaattggcctaatttcaatattgttatgtctcagggaatagggaagcccaaggagagggagagagacaaggggaagagtcagtcagtggaacaatcaaaacatacacaatatttatcaatgaaatatgctatcctatatgggtgtggctcatggttcccaaaacaattacaatggtaactatagatcaccgtaacagatataataataatgaaaaagtttcagatgtgaaaattaccaaaaggtgacacagagacacaaagccaacacatgctgttggaaaaatggtgccgatagactttctcgacagagttgccacagaccgtcaacttgtagaaggtgcgatgtctgcaatgtgcaataaagtgaaatgcaataaaatgaagtgtacatatatttattattaagtaataaaccttttattctcacatttctgtgagtcaagcattggggaatggcttagcagtctctggcttagaactattcatgaaattgcagtcagaattttagctgaggctgcagtgatccgaaagtttgaatccactttcagggaggctcactcacatggctgcaagttggtgctgactgttgtcaggaggccttggtcccttttcacatgagtttttccactgtctacttgagtgccctcatgactttgtagctggcttcccccgaagaaagagccaagtagaagctatatatttttttatgacctagtctcagatgtcacatagcatcactttagccacattctgtcctttagaatcaaatgggtgaagttgacccccattcaaggggaaagggattaggctctgcctttcgaaggaggagtgttaaggaatttgtgaactcattttaaaatcagcatacctgattagaataatgaagaaagtaatcactggtaacagaaataattcctacaaaaattatggtatacaactgtctagagacattttctgtacatatatgacatcatagtctgttgattgtttcataatctgattaaaaattttttattttaaagagacagggtgtcactatgttgcccaggctggtctcaagctcaagggaacctcccacatcagcctctaaagtaggtgggaatataattgctcaccaccatgcccagctttataatctgatttcaaaactaacccctgttaaaattgtagtatattatctgtctagagacattttctgtgcatattagacatgatattctggatactgtgttttatactttaattttttcatactataggaaacatctttccatgatagtaagcattttttatacattggctgttaatcttttaaggatttcccaataatggtatttcactgttaactggcttttctttttactagttgatggtgaatttaaaaaatattttattcattatttgcatttttaataaattgcctttttatttattcctgcattaaaaattggcactttttttttttttttttgagacggggtctcactctgtcacccaggctggagtgcagtggtgctatttcggctcactgcaacctccgcctcccgggttcaagtgattctcctgcctcagcctcctgagtagctgggactacaggtgcgtgccaccatgcctggctaatttttgtaattttaatagagacagcgtttcaccacgttagccaggatggtctcaatctcctgaccttgtgatctgcccgccttggcctcccaaagtgctgggattacgggcctgaaccaccaggcccggcccggcacattctttttattaaacattatgtgttaaggattctaaaacattatcatgtaaggtataaatatttcttctttgcttataatttgtggtattgattaaaacaaattgtagaagtatagagttagaaaggataacagaggaaatttagtccaacacttctttttaaaatttttttaaaattattttttaaaaaattttgtgggtatatagtagatgtatacatttatggggtacataagacattttgatacgggcatgcagtgtgacataggcacatcatggagcatgggccatccatcccctcaagcatttatcctttgagttccaaataatccaattacattctttaagttattttaaaatatacaattaagttactgttgactataatcaccctattgtgctattcaatagtaggtcttattcattctttctatttttttcatacccattaacctccccctccaatcctccactactcttcctcgcctctgataaccatcctctacactccgtgtctatgagttcagttgatttgatttttagatcccacaagtaagtgagaacatgcagtgtttgtctttcagtgcctggcttatttcacttaacataatgatttccagttccatccatgttgttgcaaatgactggatctcattcttttttatggctgaatagtactccattgtgtatatgtaccacattttctttatccagtcatctgtttatggacacttagttgctttgaaatcttagctatcataaataatgctgcaacaaacgtaggagtgcagatatctcttcagtatactgatttcctttcttttgggcatatatccagcagtgggattgctggatcctatggtacctcaattttttgtttttttgaggaacctccaaactgttttccatggtagttgtactaatttacattcccaccaatagcatacaagggctgtctgtcattcacatgctcgtcagcatttgctattgcctgtcttttggatataagccattttaactggggtgagatgatgtctcattgtagttttgatttgcatttctctgatgatcagtgatgttgagcaccttgtcatatgtctgccatttgcatgtcttcttttgagaaatgtctgttcaaaggttttgcctattttttgattggattgttaggcttttttcctgtagacttgtttgagctccttatgtagtctggttactaatcccttgtcagaggggtattttgcaaatattttctcccattctgtgtgttctctcttcattttgttgattgtattctttgctgtgaagaagctttttaacttgatgtgatcccatttgtccatgtttgctttggttgcctgtgcttgcggggttttgctcaagaagtctttacccagactaatgtcctggaaattttctccaatgttttcttgtagtagtttcatagtttgaggctttagatttaagtctttaatccattttgatttgatttttgtatatggtgagagataggggtctagtttcattctttcccatatggatttccagttttccaagcagcatttatttatttatttattgagacagagtcttgctctgtcaccaggctggagtgcgatctcgactcactgcaacctctgtcttctgggttcaagcgattctcctgcctcaccctcccgagtagctgggactacaggcacgtgctaccatgtctggctaatttttgtatttttagtagagactgggtttcaccatgttggccaggatggtctcaatctcttgacctcgtgatccacctgcctctgcctcccaaagtgccaggattacaggcgtgtgctactgcacccagccccaagcagcatttattaaagagactgtcttggctgggtgtggtggctcatgcctataatcccaacactttgggaggctgaggcgggcagatcacctgaggtcgggagctcgagaccagcctgaccaacatggagaaaccctgtctctactaaaaatataaaattagccaggcatggtggtgcatgtctgtagccctagctacttgggaggctgaggcaggagaatcgcttgaactcgggaggcggaggttgcagtgagctgagatcatgccattacactccagcctgggcaagagtgaaactccgtctcaaaaaaaaaaaaaaccaaaaaaaaaaaaaactgtcttttctccagtctatgttcttagtacctttgtcaaaaatgatttcactctaagtgtgtggatttgcttctgtgttctttaatctgttccattggtctatgtgtctgtttttgtgccagtaccatgctgttttgataactataactctgtagtatgatttgaagttagatatgcgattcctccagctttgttctttttgcttagggtaacattggctgttctgagtcttttgtggttccatgtaaatttgaggatttttttttctgttttggggaagaatgtcattggtattttgatagggattgcattgaatctgtagattgctttgggtaatatggacattgtaacaatattgattcttccaacccatgaacatgaaatattttttgatttttaggtgtcatcttcaattttctttataagtattttatagttttcattatagagatctttcacctctttaagttaatttctaggtatttaattttatgtgtggctattgtaaatgggattactttttaaatttctttttcacattgttcactgttgacatatagaaatactgctgatttttgtgtgttgattttgtatcctgcagctttactgaatttgtttctcagttctagtagtttctttgtggagtctttaggtttttccaaatataagatcatattattggcaaacaaggatagtttgacttcctcctttccaatttggatgcctttatttctttctgttgtctgattgctctagctaggacttccagtactgtgttgaataacagcagtgacaatgggcatctttgtcgtgttccagattttagaggaaaggctttcagtttttcctcattcagtatgatactagctgtaggtttgtcatgtatggcttttattatgttgagatatgttccttctatacccagttttttaaagcgtttttgtcatgaagggatgttgaattttatcaaatgccttttcagcatcagttgaaatgatcatatggttttcatccttcattctattgatatgatgtatcatgttgattgatttgtatatgttgagccatccttgcatcccagagataaatcccacttggtcatgatgaatgatctgtctaatgcattgttgaattcagattgcttgtattttgttgatgatttttgcatcaattattcatcaaatatattggcctatatttttttttctttctttctttcttggatgcgtctttttctcgttttggtatcagtaatactggccttgtagaatgaatttggaagtattctgttctgctctatttttttggactagtttgattaggattggtgttagttctttaaatgtttggtagaattcagcagtgaagccatcaggtcctgggcttttctttactgggagatgttttattacagcttcaatcttgttgcttcttattggtctgttccagttttggatttcttcctggttcatcttggtcagttgtatgtatctaggaatttgtccatttcttccagattttccaatttattggcatgtacttgctcatagtgtagacactgacaatcctttgaatttctgcagtatcacttgtaatgtctctcttttcatttctgattttatttatttggatcttctctttttcttagtgtggctaaaggtttgtcaattttgtttaacatttcaaaaaaccaactttttggttgatcttttgtatttttttaaaatttcaatttcatttatttctgctctggtctttatttatttattttttcttctactaattttgggtttggtttgctcttgcttttcaagttcttgaagatgcattgaaaattttcctctttttcaatataggcacttatagctataaatgtccttctgagtactgcttttgctgtatcacataggttttggtgtgttctgttttcattatcatttgtttgaagaaatttttcaatttccttcttcatgtcttcaccgacccgctggttattcaagagtatactgtttaatttccatgcatttgtgtagtttccaaaattcctcttgttattaattttgaattttattccattgtggtcagagaagatgcttggtagtttttcagtttttattttattttatttatttttttgagacagagtttcgctctgtcgcccaggctggagtgcagtggcgcaatcttggctcactgcaagctccacctcctgggttcatgccattctcctgcctcagcctcctaagtagctgggactacagacaccccccaccacaaatggctaattttttttttttgtatttttagtagagacagggtttcaccgtattagccaggatggtctctatctcctgacctcgtgatccacctgcctcagcctcccaaagtgctgggattacaggcgtgagccaccgcctgtttttttgaatgttttaagacttgttttgtgacctgacatatggtctattcttgagaatgatccatgtgctgaagaaaagaatgcgtattctgcagctcttggatgaaatgttttgtagatatctgttagatccatttggtctatagtgcagattaagcctgatgtttctttgttgattttctgtctggaagatgtgagtgatgctgaaagtggggtattgaagtctccagctattattgtatcagggcctatctctttctttagctctgataatattttccttatatatctgggtgttctagtgttgggtgcatatatatttaaaattgctaaatcctcttgctgaattgactcctttatcattatatagtgaccttctttatctcttcttattgtttttgtcttgaaatctattttgtctaagtatagcaattcctgctcttttttggtttccattggcatgaaatatctttttttatcactttgattttagtctatgtgtgcttataggtgaaatgtgtttcctgtaaggcaacagatcaatggggttttttttttcttccattcagcccgtctgtgtcttttgattgaagagtttaatccatttacattcaatggtattattgataagtaaggactaatacctgccattttgttacttattttctggttgttttgtggtctggtgttgtcttgccttgccttgccttgccttgccttgccttgtcttgccttgccttgccttgccctgccctgccttgccttgccctgtccctgcccctgtcccgcccctcccctcctcttttcccctcccctttttccttcccttcctttcttcctttgtttcctttcttgtcttcctctagtgaaggtaattttctctggtgttatgatttagtctcttgctttttatgtcttgtgtgtccgttgtatgttttttggtttgaagttactgtgaggcttgcaaatactatcttataacccattattttaacctaataaaaacaacactatttgaataagcaaacaaccaagcaaaaagcaaactgttaaacactctacagcttaacttcatcaaaaacatgttttaagtttttgttgtttttatttatatcttattgtattgactgtgtcttgaaaagtagttatttttgattggttcatcatttagtctttttacttaggataagagtagtttatacaccacagttacagtgtgatactattctgtgtttttctgtgtacttactgtgactagtgagttttgtaccttcaggtgattacttattgctcattaatgtccttttctttctgattgaagtacttccggttgcatttcttgtaggacaggtctggtattgatgaaattcctcagctttcttctgcttgaccaattctcctatttaaaggactctgatgccttcttcagtatgccaattgcatttttcagctccagaacttctgcttggttcttttttggtttctccttcatatttgaagtttatttccaccaaatctagtattctaggttagtttttttcctttggtactttaaacatgtcatgccactctctcctggcctataaggtttccactgaaaagtctgctgccagatgtattggagcttcattgtatgctatttgtttcttttttcttgctgtttttaaagtcctttctttatccttggtctttgggagtttgactattaaatgctttaacctttgggttaaatctgcttagtgttctataaccttcttgtacttggatattgatatctttctttaggagttggaagttctctgttattattattattcttttttcttttgtctcctctgactgtatattttcaaatagcctgtcttcaagctcactaattctttcttctgcttgatcaattctgctgttaaaggactctgatgcattcttcagtatgccaattgcattcttcagtatgccagttgcatttttcagctccagaacttctgcttggttctttttcattatttcaatctttttgttaaatttatataatagaattcagaattccttctctgtgttatcttgaatttctttgagtgttttcaacacagctattttgaattttctgtctgaaaggtcacataactgtgtttctccaggattggtccctggcaccttatttaattcatttggtgaagtcatgttttcctggatggtgttggtgctagtagatgttcttcagtatctggccatttgttgtagtcttcactgtttgggcttatttatacccatccttcttgggaagactttcagatattttaaaggacttgagtgttgtgatctaagctgtatctgctttagggagcacccctagccaagtaatgctatagaggtgccaccttgacagtcttggacaagatccgggagaattctctggattaccaggcagagactcctgtttccttcccttaatttctcccaaacttagagtctctctttctgttctgagccccctaaagctggggggtggagtaacacaggcacccccgtggcggccaccactatgactgcacggggtaagacctgaagccagcacagcactgggtcttgcccaagatctgctgtaaccaccccatggctactgcctattttagctcgaggccctggggctctacaattagccagtggcaaagcagccaggactgtgtcctttccttcaaggcagcgaggtcccctaatccccggtgggtccagaagtaccatccaggaattagggactagagtcaagtccaacacttctgattcatggatgaagatgccctattttctttatctcctccagatttctcctctacttttctcccaccaaatcttaacctattatgaccatttgcccaaatgttttgtgctctgctcatggtaaaggagtaagggatatacagttgactcatgaacaatgtgagggtttagggatgtcaaccccctgtgcttttgaaaatccacatataacttttgactcccccaaaactaactactaatagcctgttgttgaccataagtcttaccaacaacataaacagttgattaacacatattttgtatatgtattatatactgcattcttataatagaataagctagagaaatgttattaagaaaattaatgagaaaatacatttacagtactgtatttattggtgccacaagttgatatcatctatttatgcaatcgattatctgtccgaaatggcaggcagccacagctgcagaactcaatctatggtacatatcaagcaacccaacttttccttgtaatgtcatgaattttctctgcttttcagaggtactgttagcatcaccagtggcactttgtatgggtcccatggtgttattcaaggttttcagtattgcactaaacatggtaaaaaatatgtgagacccacaagagatcactttttactgcgatatgcaatttactggagaggtgaactactcacatggagatgattagtgtcaattagtgtcacatagcgttttaagcagattttcgtaacactcaagctcaccccaacagcaacaggagatggctatgatgttattaccaaaggacaggatatactacagttaattttatgcagttatgatttaatactacattatcatttgtttacatttgtgttgacttttcgtagcatcatgtatgatctgtggtgcgtaagtttggataaatactaactttttataatagatatttgtatgttttatggtggtaaatgataaaatagactagtatttacatatattttatgcattaatgacatacctttttcttgtttccatatttctaggccatgcaggtcatctctgagttttttcaaattgtcacagatctctaaaaaattttccaatatatttgttgaaaaaatccatggataagtggactcgtgcagttcaaacctgtgttgttcaagggtccactgtaattgatgcactgctatttgcacttatcaaggagccattcctaaataacccctaacaaccactaatgatgtattaagtatgaatcaccaggtagtgggagagattttattttttcaagagttaagtgacttactaagtttctcaaacagtactcttcataggtgcctgcttcccttatcattttataagactgtatctggatcatgaggttgttgcccagtaaatctaaatataacataggggcttaaatgatgctattgtttatattatacctcatatttttccaaaatggatttgaggtggctaaaattttgttccacttacagtgctgagaatcgtatcttgctaataaatgttgattacatttaattaactgcttctaaagttatcaaaatgaggttcttactaataagaagaaaaattcaaaaatccacttagaagtttattcatcctatgatctacgataagattaaaataagtagtatttagataatttgatcttattcaaaagcttggagctttctggtaggaaaaagtgataacacttagtatgttcatccagatgaataaattatttactggaaaggaccaacatctggatctttcacattcttcctctttggttgtatataactactgaagtttacctattgcaagtgataaggaacttggctagaatttcaaagaatgaggaatttgatggcataaactgaagcaaatactgtgtagcaagagtaacagtgaatttctgtgactcttctcttttgaacttttaggacattttctgtttattagtaaaatctctttaattggttctcaaacatgtgtccacttatgatcaacattgttttgtctgtgttgtgccaaacctctattaacctcaatagggaaggcaccaggttcaagaggctgaagaagagacccagagccagcaaacgagacatggggttttattaggaacttatatacgtacaggggagagaatccagtggtggctggctggacaagatatccaccttccttgcagtccagtggtggtgggctggacaagatatccaccttcctacagtccagtgctgcgggctgtacaagatatccaacttcctgtagtccagtggtggtgggctggacaagatatctgccttcttacagtccagtggcagggggttggacaagatatccacctttttacaatctaatggtggtgggctagacaagatatccaccttcctacagtccagtggcagcaggctggacaagataattgcatggcccagtgatggtgggctgggcaggaaaactgcaaccacttgcaaacagcatgcagtttatatagcatttttatttaacaacctcccctgaatgacctccacctggcaacttttatccaacccaaaactcagggcctcaatccatgttccatgggatgggccaggggctcagatgttccttatagacaaggaagaaatctttggattggtcactcccagattccctagcttggaacacacattcaggtatatctgccatacggggtcattctcagcgtatgctcagggcatgcttaagttattgctatcagggtgtctaccctagtctattcctttagccactttttcctccccctaggattactgagacaaattattataggtgaaatatattggctttgtaatttttataaatgaaaattcgaatgttactaacatctcatatttaaaaatataaaagaagatacactatttcctgagaaaaagtatcaacttaaaaaaaattgggctcctgctggggatagcagctcaattttcttgtttgcttttaatttgttatgaccatttccaaatagaaggattggatgaagcagctttagctaatatatcagaatttctgtagatacttaaccaactccttactctggctttgatttcttttgggctttaatttcctaggtaggcacatttcctgacagcccaggctaattaattgtattttaagcctgaatcttgcagctttacagaggctgtcaatattagcaagtgtaaaacttgagtcatttgtaatcgctctatatttcattcatctgcttttataaatgcagtttttctgatatatgagaggatcatcgactgtgagagtttaaagtggtttcagagattattttacagatgaggaaactgtagtactgatatgttaattgacttgtccaaagtcatacagcctgttggtggtgcttttataacttagattatgtacctcttatttgggattaagactttccatgtcttgcccttactggtctaacttccttgccaggtcacacaaaatactaattactatttatattgtttaatagaaaaaaattttaaaacttagacttatgaaaaggcaacctttcctagagaatttggtgtggtttaatctactgtacaatttgagttatcagtccttccacaaactgtggtggtgaagtggcttctcttgtatggatattgagctgtgaggaattcttctgtaaggatacttcagttaagattttcaatttctgattctagagcatagggttaaggaaagggccccctggaggattcctgaaccttttctcattttggagaattagcagtataatttctggtcaacatagtttggtaaaggatagttggcaattgtgcttttgcctgtttcacttgcagaagggtcaagtcaggtaaaagtaagtctgtcagactagggaagcattagcctagaaacagcaggtaggtaaggaagtttagcacttcagaaataaggccctgatttctagcaaacactatgtcactgctagtctggagtagcctaattgccattagaaaagaattcgtttcttaaagggaaaaatcatgaagaaaacttcctgagagctttattacattctttttatgaaattatttctgcaatgtattgattaatatctaactttaagaattttatgtaggcctttcaccattataattttgaaatatgaaaagtccttgcaaacattcttagattgccttctgtctgtctgccttgtaaaagatccttttagttaaatggaccatcctccttataaatgatgtcattagctcagattgaaaagacattgcctgcagggaaatcatttaattgaactaaagtgcctttatttctgtagatcttggaacagctcactcactcttattttcagattagataatttatatcagataattttttcagctctataaatgataaaatattaagaaaagtaatcttctttttaagatattttgatgtttcatagttttccatttatatctgagttagaatttatggttcttaaaatgcaaaatcttatttttcaaataaaagtttttttgttcattagactaaattattaatgtgtttgggatacacaggtcagtggctccaaaataaatgtatgtgagatatatagaaatgagtcaacttcttttactcaagatcttttctcactgtcctttttgtttttagatcaggtttatcaggtataatttacatacaataaaattcatcctttaaaagtgaacaatgtgatgagttttggtagctatatgcagctgggtaaccacttgcacagtcatgataagatatagaacatttccagcaccccaaaaagttcccttgtgctcctttgccatcagtaccctgcctccacacccagcccctggcaaccacttatctgatttctgctcctgtagttttgccttttccagaaggtcatatcaatagtattatacaatatgtagccagagaaatctggcttcttatacttagcatgatgcttttacaattcatccatgttgtttcatacctctgtagttccttcctttattgttgagtagtgttctgttgtatggatgtatcacaacatatttttctactcactaatgatggatgttttaattcttttcagttttgactaataggaataaaactactgtaagtgttggtgtacaagactttttgaaggccatgttttcaaatctctatggagtggaattgctgtatcctatgatacatgtttttatcagaaactcccaaaatgttttccgcaatagctataccattttgcatgcccaccagcaatgaaaataacagttgctttgcattttcacctttcttcatttgtattgtccctttcttcattttagtccttctagttaggtgttttaatggctatattgccttttaattctactgctacctattttaatcctagaattctaataatttagaaatacaaataaccaaaatagatagttacctaattgttagtcaagtctgctttaaagatactagattggtttggtttatggttctaaaaccaagtataagcataaccagcttttaaaaaattgtgtattgaggctggttgtggtggttcacacctataatccctgaactttgggaggccaaggcaggaggatcgcttgagcccaggagtacaagaccagcctgggcaaaaaagtgagaaccctgtcttaaaaaaaaatagaaaaaattagccagcagtgagccgtgatcacaccactgcactccagcctgggtgacagagtgagaccccatatcaaaaaaagaaaaaaagaaaatttttatattgaactaggtacaggctaataatcacttttggtattacagaaataaaaccattattatttctttttgtcatgttcctaaatatgtgatatgataatgctggctgaagcaacacatgtctcctcacctcttggagcgtgccctgttaagaaatgtattgaatttacttggcaactgtacatcctggattttttttaaattaaaacaagttttacaatctcaatgtgatgttcaagagttataccattgtactggttctatatatatttctttaaggaagacatttctccatatttgactattaaaaatatcgacagttttttgctatgaagtcctctggtgtcttaggcataatagaaaatgttgctatattcaagactttttatatagtatgagtatttagtaataattttaaggtcctcttgatatatggttcctgcttttctgtttggattagcattgttttgaaagtgagaaaattattttacatataaatttaaagctaatccaaatatttgtttagaatctccaaagtcttcactcttttatcccggatactttaaaaaacttagaaatgttaggatattagtttcaaaagcaagtatgaaatataaaatgttttattaaaatgaccaacatatgaatgttcttactgaggtagaaagttgtaccaaataggacagtatattaaatcccaacagtaattgaattataactggtaaaaccttttgttagtatttcttctgaaaactggtttgttcttaaataactgtacctcacagttacctgtaccaatgttttatgactcatattgtaaaattcacatgtaagatttctaaaagttcaccttactaatttagatgatttcatgttgtgtagctcttctgtcagtcatttgatgtgaacgacaccaaaatcagccacaacatccaattttctcttggtctctagttcactgctaggtcagcaaacttttatggagaagagaatgaaagggtagattgggtctgaaacaggtaataggcaggttttgtatccaggtgagaaggttccttgcttccagacctaagtaattagggggctaagaatcctcctataattcagctcataaaggtgtttaactatagaatgaacagttagaggtgatgattaattagcctgggcactttgggctggccagtgtgcaagcggtagtacatactggccatcagctggtaggcatgcagtcttgtaaagggctttctgctctgacactggtaatatatcattgcagctgtgccctttgattactgggagggcttgcagagtgattaatagccaggatcaatgtttctgcccagcacatgacatttggtcacagagcaaccatatacttattcccctttggcacaacgcttaggaggaatgaaggatgagacctgccaatttatagctgaggagattccagtttataaaatgagtcaactttgactgtacaaaattattccccattgaaataattagtgcggcattaaacacaattagaaccaaaactacaggagcatgcctgctgaattcaagccagttgacagatggttaaggcttgatatttggcggcctatgatgaccaagagttattattttgcgagaaaatgaaaaagcttgaaagtaaacagtggctacttaaaaaaattaggtaatatgatgcaaaatacacatttaaaaaacactggaatagtagaatattcagtgtaataactctataactgtaacacaaacaattgaatatctctgtgtgagtgatgcttaatgcattgtacgtcaacttaaagcagatcctgtttaaaacaaaattggttacatgaaggccacctgaatatgatatggtcttagttaatgatacatgttgggcctcaacttcctttaagtggcacttataaatcctactagaatagaaggtttttggacatcagatattattgtgaacttaactatgtaataaaaatgtttgagctaaaaatttttttaacctaaaaatctttaccttgaaatttttagatacgtaaattaagctttcttatgttcattatgtcagaatatattactataatggaaaaagaatgttttcctactttccaaattaaactttaataaatgaaaagtctatatactctaacagagtagaacaaatacattgtggtcttggattttgctagtgatacttaactaatggttcatactgtatttgaagtgtctgctgccattttgtggcattagctcacagagtattatactgtttctacatcaatggtagatgtgcttcttagtgcggagtcattttacattctgtttataattattccgaagagactatgttcagaaaattgtcagtctattttgtataccatagaactttgcgattaatttgtgtgtgtgtgtgtgcgcacgtgtgtatctgtgtatacatgtatatggtattaagcatataattaggggggagtgggatttaggatttggaaaaaattacaagaaatttacatgaatagaatttcagtttttcaacttacacacttgattagtgctagagttgcattttgtgctcatagtaacaaaaagtcagctttcttacctgatttttcttttgagctattataaaggggtataagattaatacattgtttggtgtttatatgctcctttattttcagttagaacagagccaatttaaattctgacagttttgggttatttaatttatgacatatttacatttcttaatttgtaatgtaagaaaaataagctaattattacttggatttatatactagttttttttttccttcagaatgctaagtgctttctgatttctcttataacatttttttctttttcttttttttcttaaccactgcgaagatgaagggatagaaaggttctttggcttaagatcacagccagtggcacagctgttgtaagaaaccaggacttgcttctaattatctactgattgttctggtactgtaacttcataacaatatgaaatgatcgcagtcagctttcattaagtctaataaaacatcttcaatgtattttataactattcaaacccattttcttttttgttcttagaagctatagtgattttgttcttatttgtccacacattccttaataccttcttctgaccaataacaaatttgtgggttgtgggagtttgaaaagaggtggtgatatgatttgaatatttgcccctgcctacatcccatgttgataatcccagctattcagggggctgaggcatgagaatcacttacagttgggaggtggaggtggcagtgagccaagattgagccactgcactccagtctgggcgacagagcgagactcggttaaaaagaaaaagaaaaagaaatgtaatccccgctgttagaggtggggcctgatgggaggtgtttgggtcatgcgggcagatccctcatggcttggtgctgtccctgcaatagtatgcgacaatgagtgagtacttgtgagatctagttgtttataagtgtgtggcacctccccctccctcttgctcctgctctgccatatgaaacaccaggtcaccctttgcctttcaccatgagtaaaaaagcttcctggccaggtgtggtggctcacgcctgtaatcccaacgctttgggaggcagaggcaggtggatcacttgaggtcaggagttcaataccagcctggccactaacatggtgaaaccccatctccactaaaaatacaaaaattagccaggcgtgggtggtgcacgcctgtagtctcagctactcaggaggttaaggtaggagaattgcttgagcccaggaggcagaggttgcagtgagccaagattgtgctaccgcactccagcctaggtggcagaggaagactctgtctcaaaaaggaaaaaaaaaaaaccatcttgaggcctcccagaagccaatcagatgctgacaccatacttgcacagcctgcggaaccgtaagccaacgaaacctcttttctttataaattacccagtccaagatattttttatagcagtgcaaaaacagcctaatactggtggttaaaagtcatttgtggctgtgaataagagcaaaattctgaagtcaaacgaagaccttagcttcattcttacctacattctaatatgagatagctggatcttgagtgcatgaaaactaaaaatgagtttacttgagaacttcaaggctttagatttctactttaactttatttttttgtcccatgtggatatataatgtgttcaaatgattaaaaattaattagctatgggaaacagagatgcaaaatgttgagttaattacagattagataattgctgtctaaaaaagaatgatctgtagaaggaggagagttaagttaaccttaaaaaaaactgggcaattttataggtagaataaagtcaaataattatatgttcagaaaaaaaagatattctagaactgtcagtttgtacagaatgtatgtgtttagatacagactgagataatttgcatactaaaagagctcatgaccctgctcttgctagggcacgtgtttattataattaagaatgttttcctttatggagcacatgcacacaggcacccgttgaaagtgccaggctcgccactgccttaggtcccctattactctgcctggagtgctcttcctcactccctcccaccttcccccatcttgacctgactgatacttttatattcctcagttcagctcattggtcacctcttcagagaggtcatcccagacaacccttcctaaaatagttctccaagctctgtcatcattctccatcccattagcctgttttacatttgccattatctgaaataatcttacttatatgttttttacttgtttctcctcactagaatgtaatttctgtgaggttagagaccttgtctgtcttgttcaacactgtatccctaattgtagaatggcggatctttaatgaatattggtttaatgaattaatttaacttttttacattaaatgttaatcttagttaaaaagaaaaaattcccctgggtcctaatttcccccatcttgattaccaaatagtttgtatagaattgccggtacagcccttagacccagacaagaggagcccctgtactttggagggccctaattgggcccttttccagttgtgccctgtcccacaggttcagttcttggggtgaaggggaggtgcccaactcatgtctgcatctcatttcccctcacctcatcttctagactatattccagttcccagggtccctgaaatccctactgagatggccccaagcttgctcccagggcctgtatgggcctcttcaatggctctgtcttatggtagatggagcatattactgctgtgtatgtctataggcatgggggtaactatggattgtgtgcaggggactgtggacagggcatggaagggtgggcatctccacaagcctcctttgggtatcagatggagccagggtagggaaaaaagaaatggggatttcttaggagtccaacattctaaatttgagcccagtcttccttattattataatggtgtatatttgtcaagtttggaggatagaccatgttttggttaacagattcattagcttgatataaaacttcttaatatttagacatatgctctgtgggcctccatttatattcttgtgatatgccctttgatgtcaagggaaggtttgagtgttgtatttaaaactttgtttcctcggccgggcgcgatggctcatgcctgtaatcccagcactttgggaggccgaggcaggtggatcacgaggtcaggagatcgagaccatcctggctaacatggtgaaaccccatctctactaaaaatacaaaaaattagcccggtgtggtggcgggcgcctgtagtcccagctactcgggaggctgaggcaggagaatggtgtgaacccaggaggtggagcttgcagtgagccgagatcgcgccactgcactccagcctggacaacagagtgagtcttaaaaaaaaacaaacaaaaaaacactctgtttcctcacaggatcctaaaggcatgatcttttttccagaacttgggtatattgaaagagtttagtaggtttttaatgaaggtaaaaactatttgcacacctcatgagcaaaaaaatgacagttcagttttgccccaacattttattatgaaaatttccagatgtgcctcaaagaattggaagaattttacagaaaatacctatttatccaccacttagatcttattttcctgtccttgctttatcacatatcagcttcccacccctctgtatattcattagctcattcttatttacagttttttgatgcatttcaaggtaaattgcagacatcagtatacttccccctacacatttaggcatgggaattaatttttaacaggagagggaaaaactttactgtagatgcttaatgttttaaaaataatttttctgtataatttgttaaactttcttatgttcactcttcaataatgactttgaactcccactgtgtgtcagccttctacagaagatgcctgtgttgatcattatttgttaggacttgatgcagcacatgttgatttatatccagttttgtttaggtaaatcaggctttgagaatacagagataaatatgaatgattcatcacctttagagacaaattctggttgaagagccacagacagcaacatggagagttagagtgcaggatgagaagcagtgatattctggtagatattttatcgctggctttcacagaagaagaaagcctaatttgtagcttgtggcctttacagctttccattgtgtaaatactctcaccgtggaggaaaaacttttgctccatcaacttagatctgaatgattggggatcttcaaattaactgacaataggtagattaacaggagaaaagacaaggtttattcacacatatgtggtaactcaacaataggtaactccctgaacagccagaggtaaaggtttgtataccagcttaacaaaaggaagatgtttagggctttaaaggatggaaagttctgatgagactcgtttacataattttttttttttttggaatgtccctgtgcccaaggttagtgcctccctaactggagatgggggtagtggggtgaaaaagtgagggtggaattgtggcagctgactattttaatgctctactttagtcagataagggcagttcagataagatttcttttttttttttctaagacttataattattttatttcattattattatactttaagtttcagggtacatgtgcataatgtgcaggttagttacgtatgtatacatgtgccatgctggtgtgctgcaccccttaactcgtcatttagcgttaggtatatctcctaaagctatccctccccgctccccccacctcacaacaggccccagagtgtgatgttccccttcctgtgtccatgtgttctttttgcatctgcttttaggtttctggtccctttagcaaccaacatgatgtcactgtggaggtgggaagagatgctaacagttggcttatgatccagctccaggtggtttcagcacattactggaagcattatgatagaggagagcctataggtgggatttccaatccagagggaggcatcctggaagatatggtacttaagctcactcttaaaggatgagtatgagttaaataagaaagggtgggagagtgggtcaattaatgttggatttgtagttggtttgttctggtcttggtgggtcttgtatatattgctaaagagttcagagataatcagagaaatattggtgggggaaacgggtaggggagtcacatttttctccccaaaacatcaacctagtaacggtatggattggaggaagaccagaataaaggcaggagggaagaaggagagaacaaacaagatattcttaggaacacaagtcaacagaccttggtgattgacttggagaggagacagtcaacaacaacgtctggatacctgctttaggcaaattcatggggaatgatacattccaccagggtaatgcaaaaaggaagaatgacttgggggaatttaaaaataccaagttgtaactgctttggggacatgcgagtgacagtgtgggcagttagatactggtctggagctcaggagagtgatctgagttaatcatatgtatttcaggagaggcagaaagaatctggtacattctggtgttcttttttatacatgtgtcttagtccattcaggctgctgtaacaaaataccttagcctgggtaacttataatcaacagatatttatcgctcacagttctggaggttgggaagttcaaatcaagatgtctggtgagggcttatttctcataaatggtgccttctatgtgccctcacatggtggaagagcaggcagctctctagggcctcttttatgagggctttaatcccattcgcagtgattctgcttttatgactaatcacctcccaaaggctccacctctttttctgttttagagacacagcctcagtctgttgcccaggctagagtgcaatggcatgatcatagctcactgaagcctcaaattcctagactcaagtgatctacccacctcagcctcctgagtagctgtgactataggcatgagccatagtgtccaattcccaaaggctccacctcttaatactatcaaccttgggggttaggttttaatatatgaatttgggggggacacatatttagaccatagcagcatgtttctaagatgtgttatttaatacaactcttttttcagttaactttttaaaggtaaaaacaaacttttaaccaatctgttcacaagatgcctaagataatatttacgtattataaattgatgtagctttacatctgattttattctggtaaatcaggctttttggctaattgaggtttatcactaccttatattaattatcagttaaataattaccaggtgacttttcagtggcaacaagaattttctcaacatatacccaaatgatgttataatggcttatagcatatttagtggtcagcaaagtcatcagactcctgctatatgccaggattgtgccaagtattgggaatccatcaatcctgcccctgtgaaacttaaagtctagtggagaaaatagatactaatcacagaagcatagaagcaaataaaatcagtattatctacaagttctaataagctcatcctataaaggagaggtacatgatgctaacagggaaacttgatctattcagggaggtcagggaaggcttccttgaagaagaaacaggatgaggtttgaagagtgtctatagtgtgaggaacagtgtggaggagagtgatcagagtagatgctgctaggaggctatttcagtccaggagagatgacaatggctggtctagaaaagtggtggaggtgctaaccaagacagaagtgatggcaatccttaggaggtcagatcgtaggtcttggtgatggtttagcaaagggaggtatcaaaaattgtcctagctgttgatttaaagtcttgtgttttatttaggagttagcgctgattcactgtttaaatgaaacttaaaatggcaatttcacaaagcctagggagaatgcctagtttctttgtaaaggtgtccattaataagtctccttggaactaaggatttgttgcaaagttgactcatcagctgttttagtagcagataaatatgcaaatatctctgaaaaggcgcagtagcaccctggttggtatttgcacttccatcttcttttaacagatttatggattttttaactgttataaattgaagtcatatgaaaggtgggctaatatgcctttatttttttttccagaaagacttcatttttttaaatgaaggaaatagggaaaaaccccacaaaagattatttttctgttgtgttttagatgcaccctgctctgttcaaagctactgtcatgcaatatgcactgttttacatagtgtaagagggtcacatttatattgattctgtgttgatgagggataagcttccatctttgtcatcttttataacaagtatgtctgttggcagggatttagtaagattggataaatgtcttcttttgtgttaatgacaaaaaggcaacagctctagttatcttataaaataaacattggtaaataaagttaacattataataggaatttgtatattatagtgatctctgaaagtgaaactttgaaatttataaacatatccttaatacactatggcctgagactcagatgatacgtagtacaatagcctttttgcactggtttagccatgattttttatgtagtatgttggactggagcaagttagggaaaagattgggcccatgaattagacattactcctcatgtgaaaataaattttgctttttgaacatctaaaagttgggaaagctgatcacaattactttggttttatatatggaggaattatgaccaagagggttctgtgtttatctatgtgtatatatgggcaaactagcttaccacctgtttttgtacagcctgtaagctaagagtggtttttatatttttaatgattgaaaaaaataaaagcaatatttcatgagatgaaaataatatgaaattcaaatttcagtgcccataagttaagttttattgggacacaatcatgctcattcattacgtattatctgtgactgctttcaagctacttcaaaagaagtaagtagttgtaacagaatctgtctggccactaaagctgaaaaaatgtattatccatccccagtctagatagcccctatgcaacaatggaaattatttaggtcattcaaaaccaaatgaatgcttctgagagacagatgacagaagcatgagttgaactaagcagaataaaacaactttaccacaataataattgcaacagctaccatttattgagcatttgctaatgtgccagatactcttcagggcacttttcacacattaactcatttaatccatacaactctatgagccactaacatatctcattttacaggagtcagcacagagaggttaagcaacttctccaaagtcagtcagggatgaaacaggccagtttggctgtctttcacacttacctcagtgattttctcacatgtacataccttacaagtactttctattgaatatattatatttcttgagtcagagataacagtgttttcctttggttgaccctaattgcttgttctcacttcaggcactcctggtttgtaatgtttgtacataagagcttagtcagtgcaggtcatctaatttcaaatagaaattatttaaacctgtttttaatgatgactttagcagattggattattgtataacaggctctcctgtcttaaaacacaaattacttgttttttaaaagcagactctaggcatattttctgttgtttatatctaatttatgaccaattcaataatttttccctctacatttttttaacatgttatgttacctccctgaccaaaatcctccagtaatttctcattgccttgaaatcaagtcgtgcatgaacattttccctcagaatcccaataagaagctaatcttaatttaaacagtatattttatagaatgatatgaattgaaatgctttgtcatgtggttgtcaattttgagattagggaaagattaaaatgtattccatttctgtcttagatattaattgggatatttgatgtcaacgaacaaagttgcattttatctttattaaatttcattgagtattgttaggcttcagatttttcccatctgtaacatagagacctacttataaaatgaatggaattatttccattagttcagaatttgtggtaataagggcaggtaattgtattctgtctgtaagtaaaagtagaattcactgtgtaaaaatgattgtagaggaaatatcttattacaatcattcttttattttataaacagctatttaatggtagcaattacaagtaatccttaataagtttttaaaagcaggatgcccccatcagacatttttatggaattattgataacatatttgaattcacatttctattcacaaattaagaacagttattactgttttatgaaaaatatctttaaaaattaaatcttgtcactcattcaaacttactgcctcctagttcatttcaactagtgggcttaacttactgagtcctttgaaattctagacttaagtttagaatgtcttggctattaaagcagacattacatagtctgaaaaatagtctttatagctgcttttgatgttgacagtgaagatcattgtaattcatttatttacttcaaaagttatatcaaatattggagaggaaataaatttattttgctttaaatttattttatatattatatacatgtatacaatatgtatgtaatttgtattacatgtttacattacttgatcccaaaatgtatttcttttagacacagaagaaacatatatgtttgatgtaaggtgttacctgctttcccagataagtaacttatctgaggtcatgcagtttttagtggctgaatttgaactgggaaacctggacctgactcctgaactaatgactttgaccaatgtgctgtactcttcacagacataaacagattaatatagtgaagaataatggatgcagtgatagaaatatgtccatcagttcaaagttctttgctgttctttatgtcctttatatgaatttaaaaatatgagaatgtgtgcagcactgattgttagcggaatcatagtatggaactagaagggcctagaacactgtcaaatattgctctaagtactttatataaattatttcatttagtcatcaaattgagattggtgcttttattgttcccttctgcagctgaggaaactgagattaaatgtcgtatttccccaagggagcctaggctaaacccagccgtgttcttttaagtactgtgaattttgcctccctgaaatgcttttcccccatcccttaaaaataagtgctttcgtatataccaataatgattttcctagaacaaacaacttttagacttgtcattacaattcttatagcctggcagtgttctgacttaggtctcagtggttaggaatcaatttagggtcatcaaaagggttctgtgctaccttttgctatagaactaacaaaatataattaataggattggcatttcaaaatttatagcttataaaattatatattctcaggatttaaatacctataatcagttcatttataggtgttgagttgttaaaaaaaaatgagtatgtagtatgttaccaggattttaccaggtatgtagtatttaccagaacttggtctgttttcctgtttttaccttgaaataccattcatgcctgtctttgacatgtttcttattactcctccctagaagtatcttgtttgtcttgacagaacactctggacttttgtgatatattgttaccatcattatttggtattcttctgtttatgtatgtaaaacaaggagcagctgctttctgccagcattttgggtactcatttatattcccacattggtgaccttaatttgaaacacactgctaccatgtggataagcagaagaatacactgcctaggggtgtagattgatcagtctgttatcactggttaaaggcatagcaagaaaattgacagaagattaaaactaaataattgaggatcctacacatctgagaaaataatatcaaatattcaaagaactattaatgtgtacttttttaatagcaaattttatcaaaagcaaatcttatttcctcttttttgtccccatttattctcttaggggagaaaaagatcttatgtctgaaaaaaatccataacttagactttattttgtgttttattcaagcatctagaaagcttatatcaactacttcatgtctttttctgtcgtattcaggagggtatttgagtgtcatcctctggagttgaagaaaccagatggctgctgtacaggcaaatgtatttcatgttaaaatattttttaaatttttttctttaagtttataatattttcagacatttaacattttttcctctgaatattaaaccaattaatgatttcaactcttttgacctcctggaagtcccagctacattttggtttcctgagaaagcactccagattcctcatttggagacctgaatcactggtttgtgagacagaacatttgggaatggcatgtagtttggaatgatgacagcacaggatgtagatgtgccagaggtgagagaaggtggagaggtagacaagagatagattttgaagggctttgtatgttgtgctaaaaagtcaggctctatcacatagacagtgaggagccattgtaagatcttaatgcaggaatgacatatcagatttgtgataggtgtctaagtaagaggaccttggcagaagtatggagaatggccttgaaataccagaagtagggacaagctgttgttgttgatccaaaagaaatgataaattataagagcttaaagaaatggtagtgaggagtaagaggagggcataaactcagatatttcggagatagagttgatgggacttagagactgattagctatggagggtgaaggaaaagaagtagagatgagtctgaagttttgagatgactaaatagatgtgatgccattcatagagatagagattataggaaggaaaggaggtggttggaattaggtcagtcatacagaggaaggaggtaatgagttcagtcttagacattaaatttagaagataaaacatttaggcatttgaaaatatccatatggaatttaagagaaagatcttggccagagtcttcagcatacagggggcaatagaagttataagtgtgggtaaaattacactgggagggtgtgtagaattttagaagtgaaaacactgaagatagaatgctgggaggatttcaccattaaggacggggataaggggcataagagtctacaaaagtagactgaaaaactgtataaaacgaccaggagagaatggtttgactagaagccaaaggagaagagcgttttaggggagagatgagtcagtagtgtcagctacttgagaaaggtaagtactaaaaattgtccattgaatatgcaatcagcatatgagatatccatggagcagtatgtgcagaagtcaaattgtagtggattgaggaatgaaacatgaaaagtagagaagcaaactactcttctaaaaagccaggtagaaacaaactatgctatatgcataccttggaataccagtcaacaataaaaaagaacaaactattgatacacatgacaacttgaatgaaactttgggcagttacgctgagtgaagaaaagtcaatccctaaaggttacatactgtataattccatttatatgacattcttgaaatgacaaaattatggaaatggaggacacagagtggttgccagaatttagggaagggggcgtgggagggaggtggttgtagttataaaagggcaacaggagggatccttgtggtgttggaacttttcaggatcttgactgggtgcatacattaacctacacaggtgatgagattccatagaaaacacacacacacacacacacacacacacacacacacacagtacaagtaaaactgggaaatctaaataatattggtgaattgtgtcaatgtcagtatcctggttgtgtaattatactatagttttgtaaaatgttaccactgaggaaaactgagcaaagtgtataagggattctgtattatttctgagaaatgcatgtgaatctaaaagtatctcaataaaaatttcaaaaaaatttaaaagtcaggtagtgaaggggagaaaagaagggacaatagccagggagttgcaaagttaaaaggggaacttgatcatgtttttatgttgtggaggaggcagcactggagaaggagagattgagatgccagggagaaagaactttctctgaatcaggaggaaaagtataaggttgggtgtgaatatgaatgtgtgtgtatatgtttatgagaaaagcgaagagagttgcctcttgatagtgtttgtgtgcatgtaaatctcttaagattcacaaaaaaggaccctaataattgcagattaattttgtaatcaatggctgtgacagactttggtattgtgaatttaaaagatccctttagaataagaattagcaactctttagtccaaatcaacatgtgtgatgtgataccatttacctaccacagacagtaacaaatcaggtgcttgttaacttacatcagttaccgggctgttccttttattgcagttgtagtctgataactcaaaatattttcaacagggttaaaaaaagtctatctagattattggtgttatccacatctctctgacctagaatttgaatcagcaccatgaaacactttactatttatagtgtatcttgaaatccaaagttttagaatggtattgctggcttcttaggctttggcaaaagaagtggtggcatgattcatattcattctgggaaagagtgagtgaggatagtcacctggaactgaggggttggctattcacaggagagatgattttgactggtagcatatacacataggtgtgtatgtatatatatatatacatacacacacacacacacacaacttgatcttgttctttcttccactgacacttcgcatttcagtaaggtaaagaagcggggatcattttttccctcctttctgccttttgcatattatgtggggtgtgtgtatgtgtgtgtgtgtgagaagactttctgtcttcaaagtggcctttgatatgcttttatttttattttttatttttttgagacggagtctcactctgtcacccaggctggagtgcaatggcacagtcttggctcactgcaacttctgcctctcgggttcaagggattctcctgcctcagcctcctgagtagctgggactacaggcatgcaccaccactaccagctaatttttgtaattttagtagagacagggtttcaccatgttggccaggctgatctcgaactcctgacttcaagtgatccacccacctcggcctccagaagtactggtattatgggcatgagccaccatgtcctgccaataggcttttaaaatctgattttacctgtaaaaaagttggagtgtaggagaaagaggagacatgtaccaagtgataattcttcaaccctgcctctccccacagcactgggctttcataccttattgtcataccttacagtagccttaccccaggtattgatgttttagttgcaatttgattctgtttatgtgttaagcttctataatatttatggttattgttttgtcatatcttgctgcttttcagtacaagatataaactgagatgtgagataactgcaaaacctgtattgtctttgtttttgtgcctccctagggattcttgacatatatgtggttcattataaatgtttattgttcattgaataatgactcatgccttgtggatgtgagatggagaccgtgtgaaaatacatattattctgaaataaagttatcagaaattgaagttaggaggtttagttggagaagaaaaagggagaaattgtgggaaggtgcctagcactttatcctgctatccagttgtagaatcgctttattaaactggcatttgttgatgttcctttggaaatgtattagctggaagatgcagaatgaatgtaactgagaaaagcctgtaacataccaagaaatacctaaggcaaatgctaacttaatacaaattatcttgccttcatcctcagaagggcaataaatctcaattccgataaccagcaatgggaaaaaagaaggttttcacctttatatcctcaatggagagataggaagagaaaaatgtaaaatggcatctcattctagtcttctgatatcctcagccaatctgtaagtaacagccacagtaagggtgcatgcagtaatgttgtgtggctgctagttgtagacctacataattacatgcctgaattagctcatttgtttcagggagtttaaaatgagtttcagtgccaaaccatgcagagtgtatttctggaaaatatcatcttcatcttatgtgggaatgtattttatagataacagactggatcttcaagaccatcactggatttatctaataaaactacataaaggcaggtataacagagttagcgatctcactggactcagccttattgtaagaatgtaaaatttcccattagtgctaaaagtttattaattaaatattccagattctatgaacagcagaatgaacatgtataactctaaagtgatattttataacttccaccaattaaagttacaggccataaaaatacttggttcccacaaaacaaacacacacgtggattgagtttcacttggaattttttgtgaccatttgaatgtttgccaaatgctttgtaaagtgctgcatacaagcactattcacaatagcaactacattgaattaatctagatgcccctcaacagtggactggataaagaaaaggtggtacgtatatatcagaatactatgcagccataaaaaatgatatcatgtcctttgcagcaacttggatgcagctggaggccattatcctaagcaaattaacacaggaacagaaaaccacataccctatgttctcacttgtaagtgggagctaaacattgagtacacatgaacacagagatgagaacaggagacagtggggcctacttgactggggatagtaggaggagggtgagggtcaaaaaactacctattgggtactatgctcactacatgggtgaggaaatcatttgtacaccaaaccccagtgacacacaacttacccttgtaacaaacctacacatgtacccccgaacctaaaataaaaggtgaaaaaacaaagtgctgcacaccaaaaaattcaatatgctttggtttttctgatatttatatagtgtttattgacttaaatgaaagttttatttccttctgagggaaaaatttgcctttatagctcaccatagttattacaatttggcataaaaattaaaattaatcttttggtataaagtataatccccatagtacatgtctgtatttaataaccattatttatttaacatgcatttattaaataatgatcttccaggcgataggaataggaagatgaataaaactttagtggtcctgccctcagatagtttgtgcccatacctgcctatgtccaaacccgtttgttattcagtataactttctcttggctggttttctggtatcatcttttagctacatattcaaagaataacctgcataaaagtgcatcagcttttactttgaccattttattttctataaaaatattgatttttgctttatacacaatagttattgttttcaaaatctactaaatcagtggtacttttgtcaggttcatacacttattaaccaacagcttgtaaattcctgttttataggtaaagaaagtaaatattaaattgcagacataaagacagctatataaatatgaatattttattaaattatgtaagtatatactcttctacttattacacaagcatgcatattcctataacatactatataaaatatacatatgcagctgactccggcctagattttgtgcctatccactggtatcacaagttcactataactttgtgaatatcagttacatcccctacgtatcattagatgtacagtagataggtcttattggattcaacttgttgacttctcttccctttaaaccaaggctaaatttggacaacagttcaaatttgtttttgttgtcaagtctggaagaaaagttttagaaaccaggctctttgattacaataggcgagtgtacctttaggtttgagtcctagactgattatcatctaaaacctttattatcactagctacacctagggaaaggtggcatattaacaagttgtaacacttatctcacaggaacaatacttgctttgcttttgttggatgaaatttataccataccgtctaatataaacaataagataaaatgactgctgtgttatagatcataactagaaggttcctgagaggagttataattttatttcctttgaaatattattaagtaagacttatctaaacagttgttatacttgtctccacttttagttttttttttctcagacatgtataaaagttatgtagtaggattcccaggcaagatggccaaataggaacagctccggtctgcagctcccagtgagaccaatgcagaaggcaggtgattactgcatttccaactgaagtacccagcttatctcattgggactggttagacagtggatgcagcccaaggagggtgagcagaagcagggtggagcatcatctcaccggggaagtgcaagaggtcagggaactccctaccctagccaagggaagccgtgagggactgtgccatgaggaatggtacactctggcccagatactatacttttcccacagtctttgcaacctgcagaccaggagattcccttgggtgcctatgccaccagggccctgggtttcaagcacaaaactgggtggccatttgcgcagacaccgagctagctgtgggagttttttttcatactccagtggcacctggaacaccagcgaaacagaactgttcattcccctggaaaagggactgaagccagggagccaagtagtcttgctcagcagatcccacccccacagagcccagcaagctaagatccattggcttgaaattctcactgccagtgtagcagtctgaagttgacctgggacacttgagcttggtgggggaaggggtgtccaccattactgaggcttgaataggcagttttcccctcatagtgtaaacaaagccacccagaagttcaaactgggtggagcctaccacggcttggcaaagccactgtaaccagactgcctctctagattcctcctctctgggcagggcatctctggaagaaaggcagcagcctcagtcaggggcttatagataaaactctcccatctccctgggatagagcacctgggggaatgggtggctgtgggcacagcttcagcagacttaaatgttcctgcctgctggctctgaagagcgcagcagatctcccagcacagctctcaagctctgctaagggtcagactgcctcctcaagtgggtctctgaccctgtgcctcctgactgggagacacctcccagcaggggtcgacagacacctcatatgggacagctctggctggcatctggcgggtgcccctctgggacaaagcttccagaggaaggagcaggcagcaatctttgctgtcctgcagcctccgttggtgatacccaggcaaacagggtctggagtagacccccagcaaactccggcagacctgcagaagagaggcctattagaaggaaaactaacaaacagaaagcaatggcttcaacatcaacaaaaaggacgaccactcaaaaactccatctgaaggtcaccaacagcaaaaccaaaggtagataaatccatgaagatgaggaaaaaccagcacaaaaaggctgaaaattccaaaaaccagaatgcctcttctcctccaaaggatcacaactccttgccagcaagggaacaaaactggatggagagtgagtttgatgaattgacagaaataggcttcagaaggtgggtaataacaaactcctccaacctaaaggagcatgctctaacccaattcagggaagctgagaaccttgataaaaggttagaggaactgctaactagaataaccagtttggagaagaacataaatgacctgatggagctgaaaaacacagcatgagaacttcatgaagcatacccaagtatcaatagccaaatcgattaagcagaagaaagtatatcagagattgaagatgaacttaacaaaataaagcgtgaagacaagattagagaaaaaaagaatgaaaaggaacaaagcctccaagaaatatgggactgtgtgaatacaccaaacctacgtttgattagtgtacctgaaagtgacagggagaatggaaccaagttggaaaatactcttcaggatattatccaggagaacttccccagcctagaaagacaggcctacattcaaattcaggaaatacatagaacaccacaaagatactcctcgagaagagcaaccccaagacccataatcatcagattcaccaaggttgaaatgaaggaaaaaatgttaagggcagccagagagaaaggttgggttacccacaaagggaagcccatcagactaacagcggatctatctgcagaaaccctgtaagccagaagagagtgggggccaatattcaacattcttaaagaaaagaattttcaacccagaatttcatatctagccaaagagcttcacaagccaaggagaaataaaatcctttacagacaagcaaatgctgagagattttgtcaccaccgggcctgccttacaagagctcctgaaggaagcattaaacatggaaaggaaaaaccagtaccagccactgcaaaaaacatagcaaattgtaaagaccatcgacactatgaagaaactgcatcaactaatgggcaaaataaccagctagcatcataatgacaggatcaaattcatacataatactaaccttaaatgtaaatgggccaaatgccccaaataaaagacacagacctgcaaattgtataaagagtcaagacccattggtgtgctgtattcaggagactcatctcacatgtaaagacacaaatagagtcaaaataaagggatggaggaatatttatcaagcaaatggaaagcaaaaaaaaaaaaagcaggggttgcaatcttagtctctgataatacagacattaaatcaacaaagatcaaaaaagacaagggcattacataatggtaaagggatccatgcaacaggaagagctaactatcctaaatatatatgcatccaatacaggagcacccagattcataaacaagtttttagagacctacaaagagacttagactcccacacagtgacactgggagactttaacactccactgtcaatattagatcaacaagacagaaaattaacaaggatattcagaacttgaactcagctctgaaccaagtggacctaataagacatctatagaactctccaccccaaatcaatagaatatacattcttctcagcaccacattgcacttattctaaaattgaccacataattggaagtaaaacactcctcagtaaatgcaaaagaacagaaatcataataaaccatcactcagaccacagtgcaagcaaattagaactcaggattaagaaactcactcaatactgcacaactacatggaaactgaacagcctgctcctgaatgactactgggtaaataacgaaattaaggcagaaataaataagttctttgaaaccaatgagaacaaggagacaacataccagaatctctgggacacagctaaagcagtgtttagagggaaatttatagcattaaatgcccacaagagaaagtagaaaagatctaaaatcgacaacctaacatcacatttaaaagaactagagaaacaagaacaaattcaaaagctagcagaagacaagaaataacaaagaccagagcagaacggaaggagatagagacacaaaaaacccttcaaaaaatcaatgaattcaggaactggttttttgaaaagattaacaaaacagaccacttgccagacaaatcaagaagaaaagagaagagaatcgaatagacacaataaaaaatgataatggggcgatcaccactgatcccacagaaatacagactactgtcagagaatactataaacacctctatgcaaataaactagaaaatgtagaagaaattgacaaattcctggacacatacaccctgccaagtctgaaacaggaagaagtcaaattcatgaataggccaataacagattctgaaattgaggcagtaattaatagcctaccagccaaaaaaatcccaggaccaaatggattcacaggcgaattgtaccagagatacaaaaaggagctggtactattccttctgaaactattccaaacagtagaaaaagagggactcctccctaactcattttatgaggccagcatcatcttgataccaaaacctgacagagacacaacaaaaaaagaaaatttcaggccaatatccctgatgaacatcgatgtgaaaatcatcaataaaatactggcaaactgaatccagcagcacatcaaaaagcttatccaccatgatcaagtcggcttcatccctgggatgcaaggctggtttgacatatgcaaatcaataaacataatccatcacataaacagaaccaatgacaaaaaccacatgattatctcaatagatgcagaaaaggccttcaataaaaacagcccttcatgctaaaaactctcaataaaataggtactgatggaatgtatctcaaaatagtaagagctatttatgacaaacccacagccgatatcatactgaatgggcaaaagctggaagcattccctttgaaaaccggctcaagacaaggatgccctctttcaccactttcattcaacatagtattcaaagttctggctagggcagtcaggcaagagaaagaaataaagggtattcaaataggaagagaggaagtaaaattgtctctgtttgtagatgacatgattgtatatttagaaaaccccatcgtctgagcctaaaatctccttaagctgataagcaacttcaacaaagtctcaggatacaaaatcaatgtgcaaaaatcacaagcattcctatacaccaataatagacaaacagagagccaaatcatgagtgaacttccattcacaattgttacaaagatagtaaaatacctaggaatacaacttacaaggcatgtgaaggacctcttcaaggagaactacaaaccactgctcaaggaaataagacaggacacaaacaaatggaaaaacattccatgctcatggataggaagaatcaatatagtgaaaattgtcatactgcccaaagtaatttatagattcaatgctatccccatcaagctaccattgactttcttcactgaattagaaaaaaactactgtaaatttcatatggaaccaaaaaagggcccgcatagctaagacaatcctaaacaaaaaagaacaaagctggagacatcacgctacctgacttcaaactatactacaaggctatggtaacccaaacagcatggtactggtaccaaaacagatatatggagcaatggaacagaacaggggcctcagaaataacaccacacatctacaaccatctgctctttgacaaacctgacaaaaacaagcaatggggaaaggattccctatttaataaatggtgttgggaaaactgcctagtcatatgcagaaaactgaaaccggaccccttccttacacattatacaaaaattaacccaaggtggattaaagacttaaatgtaaaacctaacaccataaaaaccctcgaagaaaacctaggcaacaccatttaggacataggcatgggcaaagactttatgacttaaacatcaaaagcaatggcaacaaaagccaaagttgacaaatgggatctaattaaactgaagaccttctgcacagcaaaagaaactatcatcagaatgaggagacaacctacagaatgggagaaaatttttgcaatccatctgacagggggctaatatccggaatccacaaggaacttaaacaaatttacaagaaaaaaaaacatcaaaaagtgggtgaaggatatgaacagacacttctcaaaagaagacatatatgtggccaaaaaacatatgaaggaaagctcatcatcactggtcattagagaaatgcaaatcaaaaccacaatgagataccatttcacgtcagttagaatggcaatcattaaaaagtcaggaaacaacagatgctggagaggatgtggagaaataggaacgcttttatactgttggtgggagtgtaaattagttcaaccattgtggaagacagtgtggtgatttctcaaggatctagaaccagaaataccatttgacccattaatcccattactgggtgtatactcaaaggattataatcattctactataaagacacatgcacatgtatgtttattgcaccactattcacaatagggaagagctgtaaccaacccaaatgcccatcaatgttagactggataaagaaaatgtggcacagccaggcgccgtggctcacgcctgtaatcccagcactttgggaggccgaggtgggcggatcacgaggtcaggagatcgagaccctcctggctaacacagtgaaaccccgtgttagataatattaggagaaatacttactgtagatgatgggttgatgggtgcagcaaatcaccatggcacatggatacctatgtaacaaacctgcacattctgtacatgtaacccagaacttaaagtatgataaaaataaaaataaaaaaagataaaagaaaaaaagaagagattatgaaaaaaagttatatagtaaaggtaaaatttttaaaaacatctgtgtataaatcaatatattttaaaaattattaaaatgaataatagaattggaaagaaggttgtaaattatctagtctatgcctctcattttataagtgaagtctagaaagattgaatcgtctaggaacgcacacgaagtttacggttcaacaggagtagtcttctgattcctgatctatgttttcttcttcttctatagagaatgactatgctattcctattttttattgcatagtttttctcaatatatgcactactaggtactgtacctagttgctggatggttacaaaaatattaatgtagacacatatatacccacaccttcctatacacatacatatcaagtcacgtttgcagactacctgggaaagaatcacctatttctcttgaaattattgaatttccaaactgctatcttttgtctagctttcatctttgtcatataaagagtatttgacatcttcatttatttttttaaaaaaggctggaaacatcatttgagatgatgatagaagaacagtcatgtgctgcctaacaacctttcagtcaacaacgaattgtatagttgatgatggtcttataagtttataatagtgtatttttactgtgccttttccatgtttagatacacaagtagttaccattgtgttacagctgcctacagtattcagtagagtaacatgctatagggggtttgtagcctaggagcaataggctatatataatattgcctaggtgtgtagtaggctgtaccatctaagtttgtgtaagtacgtgtcatgatgtttatacaatgacaaaatcacctaatgatgtatttcttagaatgtatccctgttgttaagtgatgcatgactgtaattaactccagcaagaatctttgaattctaaatctatagatgttaaaactagtgaatgaaagtttgaagaatgggatattttacgtcatctcaaagtatctctctgtgagatacttattatctataaagtgaaaaacagtcatgtgacagtggagaaatatggcagataacaccttaaataagtgatgaaaattaacatcatcagggatggataaattggtatcatgttaactcctgacatggtgcactgagccataataatgggatgagtttcataaattttttttgcctttgtaaatttttggaatcccttggaataaaaaattcagactttgtatcttttatgtctgagtctacaaagaaatttatggtgctactagatcattttcaatgtgagcacttattttcctttgtaaatattttcttatgtggaaaatcttggtaactttggttttatccatgtaactaaaaacacaagaaaaatgtttttatttatattcaagcaagtaaatatttggtattattaaaatataattgaaaatatttatagaaacctgagatctcagacttgaagacaacattttcttcagaacaagtaaacttcaattggtcagtgagatgcacaatgctgttttctcattatatcctaaagaagaaactaatgcctgactagcaagtttgttcagttaaaatatattgttaatgaggccaatgttgttacatactggaacttgtaagggcattattttgttctctggctatacatgtaacattggcaaattgggttgcaaatttatgattttggttacttgggtgtctaaggaagagtctgaaaggtttttgaaagaggttataaatttctttcctttgaatcattcagttaccttcaccttaaaaacttttttactatttcttagaaaattattttagttgtattgaaaaacataagctgtttatgggcatcaatttttttttttgtatttttagtagagatggggtttcatcatcttagccaggatggtctcgatctcctgacttcgtgatctgcccgcctcagcctctcaaagtgctgggattacaggcatgagccaccgcgcctagctgggcatcactatttttttttaaaggcaagcattagcgtctttaggatatattgggcagtattgcatgtgtgtgtggatgatacatgtacatatgcatacattttacatacacgtgtatgtgtttatatgggagagaacattaattgtatgtctagagtcttaagattcaaaggcagttcaaagacagctagcaatagaacaaaaagatttccatatgagtaagtatatagtttgtataacagatgtgtggatttttttaatttttaattttaattttaatttttttagagacagggtctcactctgtcacccaggctggagtgcagtggtacgttcacaactcactagagccttgacctcctaggctcaagcagtcctcctacctcagcctcccgagtagctgcaatagatgtttttttaaaaagctatgaataaattgaactttgcaatatcataatttaaatgtaccagggaaatgtcactgtttcaagatagtatgaaatagcattggtgactgtggcctgtaagttatttttatggttcaaaagagttttgaaatttacttttcttagctgctggcaaacttctctacttatctaatcttctacatattcttgacatggaaaggtcaccctattatatatatgtatattttggagacaaagtctcactctgtcgccctggctagagcgcaatggcacaatctcagctcactgcaacctccgcctcctggcttcaaccaattcttgtgcctcagactcccgagttgccgggattacagatgtgtgccaccatgcctggctaattttttctatttttagtagagacagggtttccccatgttgcccaggccggtctcaaacgcctgagctcaggcagtccgaccacctcggcctcccaaagtgctattacaggtgtgagccaccatgcctggcctcgcctataatattgccctagtattgctgtctttttattcattctgtgcctcagcttccttcagtaaagcgaattagagccagttgtcttgtaggatttggtgatatatataattctctttatagcaaattccactgactagaaaattattttgcttagtatctgaaaaagacattgaattataagattacattttaaaaatatgcaacatactatatgagatatctatgcattacattggagatgtcagcctaaattttcaaatgctagttatcatttttaagctcttattcatttttgacattacagatttattattcctaaataaggttaaaattattaaattttttaattgcagtattggcttttagttattttgaagactgtgttgcattaaagtgtaacttgatatggaagagggactattgctacaaataattgaattagaaagaaaactggaaatgctttcctctctggtttttctttcctctcttttcttcactacagatttatttttaaagaccagttgcgttttccctgttccactttcgcgcatttcattccttcattactacagactatcttctgcccatactacctcttccctgatatcccaacaagatcactatatcctcttaatttccatattcagtgaacagtttccagtagttctctttcttggcctttcggaagcaacttatactactgactattgattcatttcttttctaaaattctatatgcttttggcttctggtcagacagttctttcatgttgtttctttttggccttcctttggcctcctctttctcttgaggaggaatgaaaactataagatgtaatcgcttggttgatattccacctaaatttgacacaactacagtagtcaccccttatctgaggttttgcttctgtggtttcagttgcccacagtcaaccagggtccaaaaataggttagttacagtataataagatattttgagagaggccacattcacttaacttttattacagtatttattattaatataattgttttattgtattattaattgttgttattcttttgcagtgcctaaattataaatcagaccttatcataggtgtatttgtatgggaaaaaacatagtatatgtaggattcggtactatctgtagtttcaggcatccactgggggccttggaacatatttcccatcgatagataagggagcgtgactataaccagaagttatatatataaagtagttttgttgtctttataaaaaaatcaattcctttaaaaagatttcgtttactctcttgggttaggaaataatttttctttctaggcctattttctactattactttgacatgaatttgcattttctttccttttgagtagtttcagttagtttagaatttcaagtagtttgaattccaaggattcgtggaatatgtgaactgaaataactctgttaaggaaatttatgttggatctttaagtaaaatttagtgtaattcctaaaaaaagatctgtcattttatctaattgttagggatgattaaacttgttattttatatctttaacatatgtttcttttagcacagagcactttacttaaagtattgttcatcacttttcagtgtggaaatgcatctttttttcactcaaagctttgttttaagcattaagatgcttttttgagattttcttcaaatgtagaactttgaagtagctgagtactgtcacttttacttcacacacaggaattctttaaatggttctctacaaatgggcctcttttcttggccagaaaacttgtatttacctttattttaaagatggggataacaggaaatgctttatgaataagcattctacaataatcaacaaaacttgttcaaaccaaaaatagtgatctatttcccaaggagggtgagcttaataaatcagataactggagttgagaagggatagtggtgagtctgtttgtaaactttgggtttctgaatgttaattttaagcttcccttttaaaaggccagggtttgtagagcttatcctgtcagcaatatcctgtgtcaattgtcaggtcatgtttagcatgtggagatgtattaatctgccatagctagcattgtaagaggctgggataaagagagggctcaagcagatgaagagggattaactgtgtggattgagcaaactcctcaatcactgaaccagtgattttacaaaggattagctgctgcttttacaaatattgattactgatttgctactcagaatggagatgacataacttgtgcggttgctgtgtagtgcgctatgtgaagtgtacatcattcatattaatggatttgtcatagctattatagaaactgacagattgattatagcagcagttgctagagctgttatggttaaggttgtgtcagtatatctattaaaacttcaggattttagaagtttatagtatagccataaaattcatttccccaggtggaatttggaatactagttattacctggcacagttatttttatgcatatttttacatcagtttgaagacatttaagttgacatagagcaaaaatacattattgtgttatttttgtaatatcaacaaatttagattcatttcatttcggaaaatttgtcataaatgctagctttctaaacaagaacatgtctagttcatgtggacgtccaaaaatccgtttgtatttttcccagatcaggaattgttttgaagcctttggctatgtttctgtaagcacatggagatttttggaaaaggtagaaatatctgggtaattaaaagttaatggctattttattttcacttaggtaactttttattactctaaaaatttagtagcaagaattagaattatctatatcagagaaaatatgttcctttaatttttttaagaaatcatctgtcttgcaaatgttttctttatgtcacaacaggaaagcttttcagtgagttgagttgtatcttaaagggtaagctgaaagctttctaggcaatgatagtggtgaggagtgggtaagtggagaaaggtgagggaatagcacatttcaagcagagtgaaaacttgtgtgggtacatgagacttggactatttgaagaatagccaggtaggtgaacattctcaaagtagtaccttcatatatgttgggaatattgttttcaaattgtatcattgtactataaaactatacttgtattgattaaattaaattttatagatgaatgggtggcatttttctggctatgattttaataatataaatcgacttaaattacttaaaagcctattttttgttttacagttttaaaaattgtattatataaaattttaaatgtatagtacatgcttataacgaagttgttccctctctgcaaaaggaaaaaaaaaattccctacactccctagaagtaagaactgctaacagttctatgtgcccttccagacttttttcctgagttttaagaatacatatatgtgctagaaaaaacatggaaccagatatttcttaaattttaaaaaatagtgtatcatgctggatgcagtggcttacgcctgtaatcccagcactttgggaggccgaggtgggtggatcatgaggtcaggagatcgagaccatcctggctaacacggtgaaaccctgtctctattaaaaatacaaaaaattagccaggcgtggtggcacgtgcctgtagtcccagctacttgggaagctgaagcaggagaatcacttgaacctgggaggcagaggttgcagtgagccaagattgcaccactgcactccagcctgggtgacagagcaagactccatctcaaaaaatggccatactggcatttttaaaaatagattcaatgccatccccatcaagctaccaatgactttcttcacagaattggaaaaaactactttaaagttcatatggaaccaaaaaagagcccgcattgccaagtcaatcctaagccaaaagaacaaagctggaggcatcacgctacctgacttcaaactatactacaaggctacagtaaccaaaacagcatggtactggtaccaaaaacagagatatagaccaatggaacagaacagagcgctcagaaataataccacacatctgcaaccgtctgatctttgacaaacctgacaaaaacaagaaatggggaaaggattccctatttaataaatggtgctgggaaaactggccagccatatgtagaaagctgaaactggatcccttccttacaccttgtacaaaaattaattcaagatggagtaaagacttaaatgttagacctaaaaccataaaaaccctagaagaaaacctaggcaataccattcaggacataggcatgggcaaggacttcatgtctaaaacaccaaaagcaatggcaacaaaagacaaaattgacaaatgggatctaattaaactcaagagcttctgcacagcaaaagaaactaccatcagagtgaacaggcaacctacagaatgggagaaaatttttgcaatctgctcatccgacaaagggctaatatccagaatttacaaagaactcaaattcacaagaaaaaaacaaccccatcaaaaagtgggtgaagggtatgaacagacacttctcaaaagaagacatttatgcagccagcacacacatgaaaaaatgctcatcatcactggccatcagagaaatgcaaatcgaaaccacaatgagataccatctcacaccagttagaatggtgatcattaaaaagtcaggaaactacaggtgctggagaggatatggagaaataggaacacttttacactgttggtgggactgtaaactagttcaaccattgtggaagacagtgtggtgattcctcaaggatctagaactagaaataccatttgactcagccatcccattactgggtatatacccaaaggattataaatcatgctgctataaagacacatgcacgtgtatgtttattgcggcactactcacaatagcaaagacttggaaccaatgcaaatgtccatcgatgatagactggattaagaaaatgtggcacatatatataccatggaatactatgcagccataaaaaaggatgagttcatgtcctttgtagggacacggatgaagctggaaaccatcattctcagcaaactatcacaaggacaaaaaaccaaacaccacatgttctcactcataggtgagaattgaacaatgagaacacttggacacaggaaggggaacatcacacaccgggacctgttgtggggcgggaggaggtgggagggatagcattaggagatatacctaatgtaaatgatgagttaatgggtgcagcacaccagcatggcagatgtttacatatgtaacaaacctgcacgttgtgcacctgtacccgaacttaaagtataataaaaaaaattaacaaaaagtattaaaaaagtatatcactatatattagtataccacttgtgtttttcaaccaagtatcgtggacatctttctacattagtatatatctttccatattaatacacacagatctatagcattatttagaatggcttcataatgttcctcttgctgggcattttccatctttctgttgtcacaaatggtatatcagtgaatattctggcttatacaccatcatgtaacagcattttaatttgtagggtagattcttaggagttgaattatcagggtattgtcaaattttcatccacaaagctgtattaagctatactccccaaaacggggtgagtggagatgcgagtatctcttcttgccctcctccctgtttgatattcttaatctttgcagtttttgccagtcctataagttaaaaagtagtttttagtgaggtttattcatttgtttgttcattcagcaaatttaacaaacacttcctgtgtcccaggcactaatctaggccctagggatacagcagtgaagagaagacagttatggtctctgggctattggaacttatattctaatggaggtggggagagctcaggaaacactacaaatcaataaacactcatctcttttcatgtttattaacctttgtacttattccataaattactgggttcatatcctttacctgtttttctattgacctgttcacttttttcttattaatttgcagttcattatctattgtgacatccatgcaaatgttttctcctataaatacaccttgaataagtcatcatttgacaagttaatgactgtaccacttcttatccatgtatggaattataacagtatacctgacttctttggttggtgagaaagaattggactaagtcttaaatttccatatttcagcatcctctgaggaattcttaaaaattatttttgtatttgtaaaagtacattagaaccgtgagtcttgtgtgagacttgaagctatccaggtgaaggggacttaattgaattaatttaattgataacttgttatcaatattaaggtagataaaacatatttgtaaattttgtttttcagtgagaatgtacatcatggtctattcagacatgatttaattacagctgaattcttagagaaacatgtaataggatatcttattataagatcttaccatatctaaattgacttggaataacttgtgttatgccatttattcatatggaattttagcgggatgtgtatcttttggattttaagtctttttcatattttcaagaggtcattgtatatttcacatatttatgagcaaactacagattcagagttcagaccattttattgccctagcctcctctgaggtaacttccagtgccttacagggcaaatgagggagcactgaactgctcttgatgtgatgtttaagtgtggctgaacagcactggttgtttacatgaagttacatcagttgttgtgtgttgttagcaatcgttttgttctgctcaatattccatcagtttctttttcaaagtttaattttgacgtttctaatttgaactaaatcattaaaatttcttggtgaaattgttctggtaatgacaactcttagttgggagaaaaagagaccatgtacgattgggctatgtcagctctggcagatcctgcagtgagatagcccacacagtgaacatattaatgaattgccttttgatgtcttgcttatagtaaatatcagtttctatatttgtcagttgggttttttttttttttcacatcttgaatactttttgtgtgtgtgtgtgtgtgtgacggagtctcactgtgttgcccagactggagttctgtggtgtgatcttggctcgctgcaacgtctgcctcctgtattcaagcaattctcccacctcagcctccaaagtggctgggattgcaggtgtatgccaccacgccctgctaatttttgtattttcagtggagaaggggtttcaccatcttggctgggttggtctcaaactcttgacctcaagtgatccactcgcctcagcctcccaaagtgctggaatgacagacatgagccaccgtgcccggcttacttttttaaaaatatgctaaaatcacatagctaaataggcactttttatattatacgttctgtcccaattttcttcctttttattatgtttcttcatgttgatggttataaagtttagaactgaatgggagtgttagtaattgtgaaagtagatattaaggtgggatataaatataaggatgatctctttgttcttcatgtcttacggctatcttgcttctcattcttctgtctcctcattggtttcttgtatctctttattagtggggaattgcacctaatcatgagcttctcaaaggcaaggactgtagctgtacctcttgctccatcacagtgcctggcacataggggatgctcggtaactgcctgatgaatgaaccaacacatgcaggcaactggctgctcagtactgctttttattatgacagcctctctttctctctcaagactactgtgaaaggtgtattaaatgtttacaaaattattttaatgaccccaaaattaggtagttataaataaaaatcattagttgcactatcatttatattttggggattttccttctgttttcagtgtgtactgattgcagaactgtgttttatctatatattgatttttttattttgcagtgaacattagcttagaccatattttacaaatcctgtacacaaaacaaggtttttaaatataccattctgagccatatagatgattttgtttaaaattatacttctacatttgaaagaagtacccttggtgatttccatgtgcactcaaatttcagaacactgccttatgatccccttgctcaaattccagtgaaaaagacactcttgtgacacactattttagcctgatactgtaaataccacatgaatgtctatgtctgtctccctggccagtctcacaaatggctgtttacagttattcccctttgaaactaggtatcagaaaaaggattaagcatgtggtatgcttttatttccatagtaagaagaaaaactgctacacattaactgttctaatattgaaattgtagtatgaattctctagtaatttactcagttatatggataacaatgctttataatcctttcagttacccaggtgtacatatgattaccagttcatactgaagagtagactcaggcattttatcattctcagtaacatgttgttctgtggacattttgttgatacaaagtaggtatatgcttaaaatttcacaggctggaattgtcctggcactgagttagagctttataggccagttgctgatttgtttttgtgttaagatgatcttcatccaggtttatgtccctgcaaagtcattaaactttgtaaattgataaataagtgtattaattttacccccagcctggctgcttgttaaaggatatggctcttgacttaagcagcaacataaaaagagttgtgttaccttcttgcagagaatggagtttttcttgagatttaatatttaccagaagtctgatcaaggcaaacaggattttggaatgattgtctgaaaattgtgcagggtgtctgttcctatagatactctatgatcttatccttgagtttaacaaagcttttgggagttagctgtatacttgggcctcctcgttttgtattctgtagaattgcttttactgaatttcactttggcattaagcttttggctcaatatgaatgatgttatacaaaacagccctatgaaacttttattttatatactgtaaaaatgttattgaggacattgagaaccatgggagaaatttctttcccatttcagtaccaggagccagaaatagttgtgttttcttccctgaacaatgatatgtatttatcttatgggcaatggctcatataatttattgtatttcttgcttcatgttggttgttataaagcttataagtgaatttttggcccactcctcacaagtgtaaatgactttgtagttccaagttgtcttctgttccaccctgacttctaattttgccttgattttaaaaaatattgaaatagtgacacagaaaagttgcgagaataacacaaagagttcccatatacctttcaccccaattctcctaacattaacatttttctatacaggtatttgctttgtcactctgcctcctccctttccttacccttcctttcttctccatcttccatcctccccctccctcccaccctgtgtgtatacacactgatagctcctgtttgcttttaatttgcctctccaaatgtatctgtacaaatgcctgggaaatgctttttggggggagaaggaggcagtatattactaaattaacaataataatagataagaatgtatgaatttcatatctatattgaaaaaagagttatggaaaaacctcttgttttaggtggaaggaaaacaaattgtgtgtgtgtctgtaagagagaggggagaaagattgcatacacatgtgtttttaggaagatgcttataatactttaaaccagagtaggtactttgaatgacagaagagggaaaatgccaagacttcttgatttaaataaaaaattagatagtttccttcttaaatagaaacaggtatactatttacctatgaagactaaagcattaagaatgtttgggaacgtatttgcgttagtaatcaagctcaatttagtaatcaaataatcagagtaggactgtgaaatagagtgagagccttaattcagcaatttaccttctattaataagttagtcataaaataatttcatgtttgatagttttcaaactacacatttgtcacttatttttcttgtttatttattcatattaaccacccctcaataataaggttgttttgggagatgggaatagaatgacaactgtttatgtacctgttatttttcttaagacaaaaacaaaaatgtgttttattatactgtacaatgtagaagacattataactctgcatattcctatttcagatacttaagatataatcttatgttattaatgactctaaactttttgtatacagaataggaaaaataaattaataaaaatgagtttaaagaatatcacaaattataaaaatgttacttataatctgaaaataattttaaaaatttatacctcaaaatccacaacataaagctgttgcaaaagtaagtaaatcaatgaaagaattgtcctatggcctatgtaaagataaagcatagttgagtggaaagaagctaaagaattcaatctaaattatattcatttcttatttctatgcagtttgctagaggaatctgcatacaaaaggaacctccttttccttccataaacatcattttccccattactaatttgttccatgtttgtgtatatgtgtttttaaaccaaaatggaagtatttcaaatacattcttaagaagcaaaattgacccaaaatcttacagatgaaacaacaccccacaatttaaatgtatggtatattggccgtgtgcagtggctcacacctataatcctagcactttgggaggccaaggtgggtggatcagctgaggtcaggagtttgagaccagcctggccaacatggtgaaaccccatctctactacaaatacaaaaattagttgggcatggtagcgcatgcctgtaatcccagctacttgggagactgagacagggaaatcgttgaacctggtggttggaggttgcagcgagccaagatcacgccactgcactccatcctgggtgaaagagcaagactccatctcaaaaaaaaaaaaaaaaagtatggtatattaggtatatttattaggtatattaggtatatggtatatatggtatattaaaatatatcatgttacacttagggaactaaccttaaataatggtaattgctttaatgctatagaaaagtaattcagtgatgttgtctgacacggtttctatagatggcattcatttattccatcagcagtggaacatagcatttcagaaaatgggcttctgggcaagtagacttaaggtccttgctccacttattgtgtgttatcttgatttctgattggtaatatagagttagtaatacttaacctcttagggttatgtgatgatgacatgagatgatgactggtgtcatcatctttacctactcatggtaaaggctcaataaatgttaactgttgcagtgctgttatttgtaatcatgccactgatagtgcttaaaaaacatatttaagcttatagtgtggagataatagaaacagttgtgtttgatacagagatagcataggtaaggaagaaagaagtaggacctattattattattattattattattattattgttattatttgagacagggtctcactctgtcacccaggctggagtgcagtggcactatcatatgcagccttgaactcctggactcaaactatcctcctgccttctgagtagctaggactacaggtgtgagttaccatgcctgggtaattaatacattttttatagagatggggtgtttgctgtgttacctaggctgtctcgaacacctggcctcaagtgatccttctgcctcagcctcccaaagtgctagaattacaggtgtgaatcactacccccagccgaggacctattattgttattgtttaaattttatacataattgtttgacttttaagatgccttcaacaaattttcagtgaagttgagtttatgtttcctagttttctattttgggtaatatttagaaaagagcctggcgcataatatagactagtaaaatattgtttaatatatgagttaagaacgttccttttcatttatgctaatctttattatgtataatcttgtcaaatatgtgtttatgcatcagatttgtttttggccaaatatctgtaaccagaaagaaagtcgtatggttaaaaggtgtttaacattcatgtttttattctagtggtttatattttcagcctcctttttttgtatgtgtatggaacaatggacttgtggcaaatttgagttgccttttaaaaatactagtagtaataagagacaacatttcttaaagagttatcttaagtgctatcctactacatccccaccatagctctccatagtatgccctcctattatctacattgaaagatttgaaaactaaagcttaatgaaatcaagtgacttgctaagtcacagagctggtagctatcctgcaatctgaatgtaaatccagggttttgaacgtgattctaaaatgcagtatcagtttgggggcacttttgttgtggaaagagatgcattaaattaaaacccagttcataattgtatatatttaattttataatatttagagtctgaacattttgatatatttagaattatatttttaacttaaggagaatgtattccattttaagcttgcatctcattttctcaaagtatgtattatagactttttaaaaaggctattatttttcagaatttaatgttttacttgctacagagcagatgactaagatataggcagataaagagttgctgaggagttactttatgtggcaggcaaaatttgatttaaattttttatgtggaatctaaagatccctttactaaaatagaaaaacacagagggtgccctatattataaatatataaactagtagtcttgtctctaaagtaaaaccttacttttaaatgattgattcagtatattgatatgctatcttccccggaaataattgagagattcttataaggttttccacaaattaataactctagaatttttagataaaaaccatattttaaaattctataaggaacaagtttaatatattttaacaatgtgataactagtggtttattgttagaccaacgaatcagaaatcttaaagagatttttttcacatctacttttatgagaaagggacagcagttctatattaaagatttatctaaagaagcagtcttcagatatgtaataagatagttcagtttctggtcgtatacttaaatgtatgttaaagtaaaagaagcagttttaaatgagtggagaaggataattggactctgtgtcatataattcacatatactattcatctgtgactttttgagcattattttaatggatgttgatgaacacaattgatttcagatttcattattctggaatcttgccattagaatttttcatagtttggtagatttctatggaaattagtagcagcaagaaagaaaggaaggaagaaaaaaagggaaaggagaggagaagagaggagagggaggggaaaggggagcggaggggagggaagagggggaaaaggaaggtgagaagaagagaagggaggagcaggagaggagaggaggaaagaagagatgtaaaatagaagcttttgattggactctgaacaaatgcttaatcttttggattatattcatgagcatatcttacatgcatgtagctatgatattaatagttactgtcttcttttgttctaaatagacctattgaaggcatagtgaaaatttccaccctaactcctttagagttaataaaggcaaatttgaattatcctcatggttattccgtttttgcttggtagccttcaaaatggccactttacagaggagggaggagattagcagatgttaaacccttgagttgtaacctctgctttttccccagtgtagtcacataggctgctatatcagtttttaaagccttttccccaaagcataaccctcctgagaattctatggttctactaattgaaagttgaccatctttatgtcaaagcatggtgtgagcttttttgtttttgtttttcttaaaagaaatatcataataggcttagagatcgccagtactagtatattcattggtgaatctcttctgaagaaagtaatagtgctacgatgagaaaacaagctttttgaaaagactatgctaaagtaacacaattagtcctcttttagagttacggcagtgattattgtttgaggtgcctgttgaatatataatatcttccttttgctactaaaaatactgataaacagatttgaaattccaaatttcccacatggagggaagaattattcaaatatgaaaaatatttaatttatgtatttatttctctcatacatattccaggccaaggttctagctgaatattaaaccttttaaatgacataaaatagttctatgctagatgtaaaagaagttactagttgttctacaaaaaatatgttgtgagcaatttccacatttgatataattgaaacttcaatctaatcttggaccttggccatttgctactgaaagtacaagaaaaatagtagtgtggatatatttcatgaagtcctggaattaggagggctttggagatgattgaacctatttttttcaggttttaaaagaagaaattgagtccagagaggctcagtgacatgtttaaggtaaaaaaaaaaaaaaaaaaaggtatggaactgagatcacattacagacttctttaacctgtgccatggatttcgaagtcagtatcaatgtacagctaagcttctggatatgtgccacaccactaaaatattttatttaatatttatatccaagttaagtgtaggtttctctcctttgttggtgcatagtcttattttgttttggttctttgtttactttgcagatatgctagtgaatttttatacttaaaacctattagaataagaaacaaagtgtctgcatccctgcatctttgtatctattacataatttctagaaacagggaaaatagcttctaagtttatgtgtgcaattataaagtaaagtgtaattaaactgcacttgtggaatgatgagttctgagtcagtcacagctctgggaacggaggctttttaatggactatttcctaaagctaagtactaaatgtacccttcaaccaaaaatgtcactaagatagtggacctcaactggaaggatagtggaagcaaaacagaaagcatttctccacctttatacaaaattacagtgcattgggattatatcggtattatgacatactggcacctgaaaatgtatgttcattctgtttatcacttcttaagaaaaatgaactagaactggagaagctaatctagataataaaataaccactagtggataggtgagagtatcaccttcatgaaatgagataatatttttggagaatcaaagcctaatatatgtttcaaatataaagcaatcattaagtgggtaaatactttttttaaaaaatgggtctattatccaggcatggtggctcatgcctataataccagcactttgggaggccaaggcaggcagatcacttgatcccagtaatttgagatcagcctgggcaacatggcgaaaccttgcctctacagaacatacaaaaattagccaggcatggtgttgtgtacctataatcccagctactcaggaggctgaggtgggaggatcgcttgagcccagaaggcagaggctgcagtaacaaaatcatgccaccgcactccagcctgggctgcatttttggtagtttactacatgagtttagaagagataaaacgaagctctatctccccccaggaggtggccaatttatggaactcagtatcccaactattaggtgaaaatgaataattttaaaaggtttagataaacttgtagatgctttatttatatgaattgtcaggaaaaaagatatggttgtatggttgagaagtttattctttactttttggagttcagggaaaactcacatcatgtggtgacacagaatatttgactaaatggaccaacatcttgactcagagtgaaaattcttaggaataacaacagtcttttaaaaagtatctttcctttcttttccaatataagggaaaaggaaactttagtcgggtaggtggtaggaaaaattaccctatgtgaaagcttggtgttcatgttgaaaactatataaatgccaactagaaaagggaaaattgaagggggcaaaaggtgaagctcagaaacctagtcgtaattttgcataaagtctagattaaacaaccaaaaaagtgtgaacatattagtgtaatgaagccaataatatgatgatttattgatgataaaatagtaaaaataaggctttggattccttagaagtctagcatttaaattgatcaccaaagttgcatatcaaaaaataaaaatgataataaaaacatgtctattttgaaaatgtctctgagtcattgcactttggtaatgatgtcttatattgtcttagaaaaattaatgcatttaaagaggtatcagactgggatatagtgtgtgtgtgtgtttgtgtgtgtgtgtgtatgtgtaacatgtatcagggaggagtctattaggagacacatcaatgttagggaagaccctggaatatagtgtattgaggcacccaatactggacaaaattgtgaatcaacatttgttcatttagatttgagaaatctaaataaaaaagaaaggaccattagatctcccattctcctcaactctagctctttctctctctcccccaactctaactctctctcacccccattcccttgcctactcaagggacttgcgtgctgttctaggccttgtcttctgagtgaagcttctgtgatctagacacatttttctacttttctttgtcctaaatacagtaatgcaattgtctaccctgttaatgccaagactgggtttagacctgaccaacctaacacctgaaatgtcactaagtgatacttcctaccacagacttcatatttttctctgaaattgaagtaactactatttttcattttgaaataattatttttaattgttaacactttttaaaagataaaacttatttcttaagtatattacaggcatttaaacattccagtgtttttcatcctagattcaagaaaaaaaaagataaagtaatagtttaataaaatcaccaggagtgggtaataccttagttttaaggtaatttgttatcaatttgtatactttgtatctcttctctgcttttgaaattctagtatccatacttgaagcttgctgtactatgtctacaatatacaccatttgtttttaaagcaaaagctttaaggcacattctagaattcttgagttatcttttagaatcagttaccttatgaataaaatatcaacctaactatagggaaatttggatttcactattgcctttttccctgaattgctgggaatataggcacttgatacttgtttatttgaattcattgtgaccttgttaccattttgaatgcttcagattctcaaattgcatgctggaagaagacccattccttgcttagttgtccttgtagggtgtcgattttaatgtctaatattttgagctgctttagaaaagtaggtttatcatataagaaatacgtactcattttataaaaagaaaactagtctttctcagtatataccttactttttcgggcactgaaagtttgtggccacttaagcaagcccatataataaattcctgtagcatagtctagtccctaacatatgggttaatttttgttctccccttaggatatacttttttcattaaccactttcatttaagtaaagggaaatcttttaactgctttagaagtagctacaatgcttaacttgtatagttgctgaatcatgctttttcctgtatttcatttctgattaactttctctgagcaacatagtcttacgtttacattagcatccattcacttgaactagtagttacagttatagtaacatataacaatatttaactgtaataggtaatgaaagctaacgtttactgaatgcctactatgtgcaaaggactaagacccagtgcaaaacttttttttaggacaaggtttgaattttaatagtgaagctgagaatgtgattgtgaattcaccagaatgttgtataattgactgttccatagtgagataacgtaattgcggtgtatggcaaacatgtggcagctctttgttgttgcctggcagataggcttacattagccttaatttccttttcttcatgtatcattatgcatgtatttttatagtcttgtttctttgtaccaatctaaatcttcctaaatgtcaatagcgttaatcattgtaggtatagtgatatgaggtctaaatgatatgagaattcatatttttttaaaaggaaattactacttttttatatattataacagattttccatccctgccatcagaaagtattgtccatatgctcatgatgatatacaaaccaaatggttcttctgaaaatttaaaaatctaaagtgtttacagggattgctattagtgtacttttgtgttttaaagaattcatatggctattaagcaaatcctggatattggacaaacagcaataaaggtttagaaaaatgaaatttcagttaaaaaaaatgtactcccccactccccagggaagaaatcaaagattttatattagaaacatgaatttagaattcagaacaagtattgcttatgacatcaaattttattgtgatgtatcaggtggaaatttagtcaacacttttcttaaagcaaaagactcaggctatgtgtatattgaacgctagtaaattctaatttcccttctccttttccttttcccccacttcctctcccctctcccttcttcccatctctctctgtctcctttttgaccagtaacattttagagttgaaagctatgctaaaggtacccatttcttttcagaataatttaacttttcttaagattttgtgagcatccattccttatgtaaagagcatttattatgcccaatggaagtgagagggttgtgggactaccccttaatgagaccagatcattccacaattatccactttagattagtggttcaccaggacttgtttacagagataagatttctgtttgtaatttttgttttatgtacaaaatcctataataaataatttatacctttatatgtaccaagtttattttgaaaaaaactggatacatttattgaacagctattaaaatatgtacactgactttccctaaaatttcatatacatttcaaaatcagggctctattttaaatatgttttaatgatactgtgtggtgtttactgggtgaagttgatccaccaaggagctgaaattagtgctctaattttaagctttatttcttaagaaaaaatatccatgactttatcactactgtgatccccatggtattaaaaaaaaaaactggtaaaattaggtgatgagtttgtaaataataaacttcctatcaaacccattcttttttttaatttttaatttttgtgggtacacaataggcaaatttatgggcatattgtatgttttgatacaggcatacaatgcatgataatcacatcaggataaatgaggtatccatcacctcaaccatttattctttctctgttacaaagaatccaattatatttgtttagttatttcattttatttatttatttatttatttatttatttatttagagacagggtctcactctattacccaggctggagcgcagtggcacaatcatggctcactgcagccttgacctcttgggggatcctcccacctcagacccccttccccccacctctaccctcctcctccactggctgggactgcaggcgcgtataccactacacccagttatttttaaatttttcgtagagatgggggtctcactgtgttacccaagctggtgtcaaactcctgggctcaagcgaccctccttccttagcctcccaaagtgctgggattgtaggcatgagccattgcacccggccacttagttattttaaaatgtacaataagttattgttgactatagtcactctgttgtgctatcaaatactagatcttattcattctaattacatgtttgtactcaaacacattttctatcctaagttgtactgaaactatttccactggatgtattccatacaaactttcttttgattggttgttttcacttgctagagttctagtaaaatgctgaggataactattatatttcttttcttttctgttttcttttttttctcttttttttcccaggctggattgcaatggcgtgatcttggctcactgcaacctctgcctcctgggttcgagtgattctcctgcgtcagctcccaagtagctgggattacaggcacccgccaccatgcctggctaatttcttttgtagttttagtagagaccaggtttcactgtgttggccaggctggtctcgaactcctgtcctcaagtgatccacccgcctcggcctccaaaagtgctgggattacaagcgtgagccactgtgcccggcagataactattatatttctaatgaagtttataaaaatattgaacacttgtaaaattgagtaacctataatccatgaccgtgaatatacaatttctaatcaacttaacttttgcttgatttaaaagctttttttagggatccagtatttgtttataatagttttatcagatctgtctagttttagactcttaaatgccctataaaaacctaaagcatactcactcagtggaatgtccataacatttctctgaatacaaacacagagaatatttgctgtgggctcagagaaacaagtttcagcatttgattcggaaaagcattttatgttttacttggtaggaatagggattatgcaggaaagagtcaatatgtattgaaatttttaaagagttaattcaatataaatataacgaagctatgatttatttgaaattcttaacctctctttcagggatttattgcatttatttataatagtttctcagtcctgtattttgggaggctataataacatataggagtacagaactttttttttttttttttacttttgagacttttaggaggaatagaggggattaatctagggaatggatctgaaacaaagctaatagacttagatttaaacaatttcagtaattaaaagcacactgaatctaatgagatctggcacttgtttattctgaaatggattacccactgcttttttttttctctccccaacttctcataggagcccagtttcctccaattgcagcacaagaccttccttttgttctaaaggctggctaccttgaaaaacgcagaaaaggtaaactgaaggttctaatgaaaaatgtaaaaataatttcatccttagatagaacatgtttgtagtatacatgtggaggcagtattcgttttaggtgattaaagagtttaaagattgtaagaaaatctggatgacattatccaaaccacaaaatatagctcttagctttaaataatttttaataagaaaacattaggttaggtttttagttgtcaaccttggttatttgtaaatgattcaggagctgtttcctgcctctcaaaggaaagctgcaggccatgactgtattctcaaaggtgggatttctcaccagtatctcaatgggctgagcagcaggttctcctatgcccaaactggcatgcaccatggttcagatcaagcctggagttttgtctgccattgtctattattcatttcagtgttcctctccattggctatgataattgggagttgaccatatggtctcactctttcaacaccaatatttaatggaaatgaaatatggaggtggttttataatatgagaaatgaaaagcagacagtcttttcattaccattctgcttatctctcttgtagtccctttaggcctttctatttatatttcattttgcttttcttagctttcttagctgaattttaaaactgaaagagataacagaaataatctaggttagctcctccccttctttttataacagatgagaaaatgagacccagatggatcaattatctcaagactgtatagtcagatacctttttgactgtccctgttagaaaactttgttagccatgctgttgatcccataagtatggcagccccatagctactttactttattccctttagctgtgttggtttgttgttgtttggttttttgtctcttggaaaagaagatacaaattagtcacacaatgttagagctcagaggaatcttagaaatcatattaattaactttttcttttacagtaaggaaatggccttacattttcccctctttattgcagatcacagctttctgggatttgaatggcagaaacggtggtgtgctctcagtaaaacggtattctattattatggaagtgataaaggtaatgtcggtgttcaattatatcaactactattgcaaaagaatttttggccatcccttccccctcttttgagtacagagtaaactgaagacaaactaataataactgagaattataacaattataatctgactaatttatgattcatttcattatttgacaaatgctccaaataccagaataccctcagagctaaaacaattgtgttgtattgaattagaaaagagagtaaaataactttaatctgtgtggcctttcaccttagggaatatttattatccagcctactgttgtagaatttctggaaaagttaagaacatagggttgtgagagtttcaatggcagaaaatagattatttttcttaaatattttaaaataaaattagataaaattaaatacgaacagcacctttctgagctccctttacagatttaaggaataacagcaaacgtgtacatagaatttactatatactgggcaccgttctaagcactttgtctaagtacgttagctatgttaacttgtttagctcacaacaactctgtaagtactattattagcaccattaatttgacttttaggaaaactgagaacagagaggttaagtgacttgttcaaggtcacagagttggaaaatggcagatctaggaatttgtttttcctttgtttttagaaacagggtcttgtctcggtgcctaggctggagagctgtgactgttcacaggtgtagtcatcacaccctgcagcctcaaactcctgggctcaagtgatcttcctgtctcagtctcccaggtagctgggattacaggtgcacaccgctgtacccagctcaaatttgggattttaacctagagaatatggttagagtccatgttctcaaccactattgtcactacattaatttagaaataataggatacattttataacttcattgttaattaataaatctctcagttgtagttcacataattttaagattgttatttgaacaaataaagccaccaaataatgaaatttaaagattgtaagctttctgagttttgttttattctggggaaaacaggctaggagttgaatattataaagtaaaggttgtatcaaaatagataatgttcatttccagaaaggacactttaagaagaaaaaggcaaaagtatcactgaatgtaagctttcctatggaattgttatcagtgttgtttggaaatttatgttttatttgacattatttatagtttttagagttttttcccccattctaaaaacatacaggtaagattgtcatatttcagataagtctgaaatacttacataatgctggaagttgttcttaccttttggctaatgagattaacaaattaattaatttagtagctagtttgcattccatcactaatttacagtatgttcaaatgtagtaatggcatcagtgaagtgtaaactgtaaacagctataaacaagcatctttcttctgctaagggtcagtagtgaagtaggtcagaaaatttagagtccaagttcagttacgattatcatagatcatagaaatatagttttgtatgatattgtgaatttagatcgagatactaccttccacaaaatatcctctttttcaccagaccaggggagggaggtttcagatccttgtgactttgattcaattaggcttctcatttctaatttctttaagaatcaatgaatactaatgtcagtgtttcctccatttctagtcctgactggcatataacaatggttaggtcaaagattagcaagagtttccccaaaacccaaagcgtgttaatatttacttcaaacactaatatattcaatgaaaacattttagttagagttatttagatattagttacattcctttttttttttttctttttagagatgcgggggcctcactctgtcacccaagctggagtgcagtggtgccatcatagcttactgcaatcttgaattcctgagttcatttttattcttatttgatgagacctaatggtagtaacattgtttgtaatttgcattttaactactttgtgatccatttagccctttctgtcatttctgttactggaagggggtcttgatccagaccccaggagagggttcttggatctcatgcaagaaagaatttgaggccaatccgtagagggaagtgaaagcaagtttattaagaaagtaaagaaacaaaagaatcactactccataggcaaagcagagcataggctgctcagctgcttacacttattgttacttcttgattatatgctaaacaggcagtggattattcatgagttttcctgaactggggttggcaattctcagaactgagggtttctcccctttttaagccatatagggtaacttcctgatgttgccatggcatttgtaaactatcatggcactggtaggagtgtcttttagcatgctaatgcgttataattagcatataatgagcagtgaggaaaaccaaaggtcattttcatcaccatcttgattttggtgggttttggccagttgctttcctgcatccttttatcagcaaggtctttgtgatctgtaccttgtgccaacctcctatctcatcatgtgactaagaatgcctaacctcctgggaatgcagcccccataggtcaaagccttattttactcagcccctattcaagacggagttgctctggtttaaaagcctctgacgcttccactttaaaaaaattaccattttagcattcctttttcatgttgatgtctgaagatgtggcttgtgtttccttaaatttttcccttttactttgcagcctcctgtttccagtgaaattttagatttgtttcttgtggttcttttttctattggcggtttcattcgaaatttttagccagttcctctcttttaagggactccaaaaaaagatctgtctttagacagtttttaattacttgtttggcatgatcccgatttccttcctttatatctttttcttaccaggaaaatatgtcaaataatttttttcttttgtgaaattagatatgattttttatagccttgtttactgtatgtgtgaaccatttacctaatgggaagaactcatatctagctatatgagaactataatcctccaactaagtaggatttagataaatggattatagaggcacagaaggagttgacaccacttactaggttaaactgtgctttgttactgtttgacagatacatagttcacattttctaccatattgcgtgtgccaaaaaacatattgacctatcaagataggagtggcttagaaagagtagttccaacctgttgggtaaataatgcacttaccattgtaccaataaatattgtctgtatttattatttatagccatttgggacccttaagtaacaaatacatatagtatgtattttaacaccttatgaaatcttatccatcctttcatatccttccttttcctttgattgtcgtgagtcttattcatcaaaattcttaggtcctagatgttcagatgtccttcaagtcattcattcattcattcacttactcattctttttctaaatttgataaatattttttcaggcacttgttagctagtaggcactgaggatccaaagatccttagaggtgctcacagtttgggttttgtggatatcagtgagagagggaaggatgctgtggggttggaggagggagctgggcaggtaaactgaccatttcaatgcagtacagtaagtaatttaaataaggtatctttggatcacaaaggagggaaactaattgcctagggaagttagggaagatgtcctggtggagagaacacttcattgggcctgaaagaatgagtaggagtttgttggttgaatgctatggtgtgaatgtatgtgtacctccaaaattcatatgttggaaattaactcccaaggatattgtattaagagctggggcttttgggaggtgattaaggcatgagggctttaccctcaagaatgggatatgtctctataaaaaaggctagagagagctgtggaacccctctcttgcctttccgccatgtgacggtacagcattcaacttttctgggggatgcagcaacaaggtggcatcttgaagcagagagcagccctcactaggcactgaccctgctggtgccttgatcttggacttcccagctcccagaactgtgagaaataaatttctattgtttataaatttcccagttttgggtattatagcagcataaacagactaagacagggaagaagggtaaaatgggctttccaggtaagggaatagcagagattctgagttgtgaaagactgtggatgggatcaaaaatggaatgaaggctggagcttagaatgagtgaggggagggagcacgtaaggctaaataagtggattagaccaggttggtaagaaccttctgagaataagggccttgctaaagattttattttgaatatgacctttaagcagaggattgtatgaccagatttggtttttaggaagtaattgtaataggatgatggagaatggattgggatggatagagtctgggtcaacaggaccatttagcaggacttcgaagtagtctaaacaagagaggtcaacacagggctgttgagaggcagagcgaggatttaatgcagatctctctgcctccaaagttatgctttttctacaacttgatgattattaccaacccctccaaggtgcccataagtggtggaccatttaggaacctgttctaaactattgtgtgttttttcccttttttctgtttatcttctatatgatcttgaatcaacattatgatatgaacctagtctctccccatttttaaggaggggattgtcagttcttagtacctcctctcagggcttttgctgaaacctgattaaagaatacactagcaccgtctagtaaatgggagctacaagtagccctgatctacaaagtcattcaaaggttatttcttacatcatatggttttaattttttcattgtaatatcttttcaatatataataaaagtcagtagaaaattgggcttaatatggagaatttaagataacaaaatttcagaacttggcagagaaataaaatttttcattgaaatttacctccctgctctccccttctccacaacttcaccgttgataggaaaaaaagaggacatatatgttctctttgaagtttgaaaattataaaatatattttgatgttgaaaaagcatcatatttctcttttaatattgttttgaatatgttaaagtgacagtacttatatttgtataattaaaagttctgttgttttgtaacaacaacttaatagaaagccataaaagcttaccttttttcttctgattcatttgacagaaacaaattctgtcattttataattgtaattatataattttataattatatcaagatgatatatattaaatgtgtaagtgaattctgatatttaaaaaatttaaattgcaattctgtttccatctggtatgtgaaggatatctttattccttaagaaataggaaccattaattctacttttatcagaaattattacaattttatagacttttgggtctttgatatgaaagtattaactttaaaacttatcacaataaacttttttttttttttgagacggggtctcgctctgttgcccaggccagagtgcagtggcatgatctcagcacactgcaacctccgcctcccgggttcaagcgattcttctgcctcagcctcctgagtagctgggattacaaacattaaattaaagctatgcctttattttctgcctttatggctaagagactctctaacagtatatagaagttaaaatgtacatctgatgtttagtaggatttcatcaacatgcagaaatagtcaggtacaaactaagttttactaagggtctgatgaccacgaatgttgttggtttgatatctagtctcacttctacacaaaaccccagagatatatttcaagtggctgatttagcattggcatctgcaagctgtataaaccaaaggagaatgttcatatatctttaactgaggagctggaacatcttgctagtcagtttgataaaatttagtggcaaggtctagtattgatgggcatatttttcttttccctactaatgagtactaatacttgtggaaataacgtaagttattcactgaagggaaaaggccttcttaaatataagtagtagatattgctgaacacatttcatatttttgtttgctagccatttgtgccaagttagtgttcttggtataagcatcggaaaccaactttgtttatgcagaaagggaaattattaggaaaatatcagctctcagaattgctaagaatgctacacacaggctcagcaagcaagcaagaactaaggtaggtaagggggctggatcttgagcataatccatgaaaaatcttattgggacacactgctggcttgggccttgccaagccaggacatgtgatgttgccactgtgcactgccatcaatcagtgagtgccattgccaccagaatggattctgaaccctctcttgatccttttgttacttactggagatttaggttccagtctggagcatccactttgattaagttggaacagggaaaatccatctctctccagcttctgtgatggaaaactaagccctatccctgacaatcttggaattaaaataggaaagatgcatggatgctggggagccccaaataataaatgtccataacttgtagggatgctaaaggatttggaattatttggttgcaatatttatgctgtatttaaaatggtatgagagtggttggtgttttaagcatatttttctgagagccaatgaagaagagaaaaaacaagtatatttgccagaaaaatagaaggtctgtttagattttggtaggtggcattggagtgtagggggtaacgtcggggcagttggtgaaggtaagggcaaaataaaaaatggtgcccagttttctggtttgggagcttgaattaatggaggtgccatttattgagatgggggatacaacaagaaatatcacagttgttggcatcacaagtgttgggagtggggataagatgatctccattgtgggcactttctattcaatgagcctataggacatttgagaaatgaaacatatttagtgagcagatgaagatttggataaacagttttgaaaatgaactaaaagtagagaatcatgagtcacaagtatattgataggaatttaattcttggaattagatgagattgcccagggagagtgtaatgtaagaagagagcaagacttagaacaacgcatcatagctttttaagagataggcagaggtagaggaacccataaagaaagctgagaaagtttgacctaagttgtaggacgaaatgcaaaataacatttatcttctctaccgtgattttgtatatttcacattgtattgaggacagtggttgtagtgtgtatcaaaatcacctggggtgcttgctaaaaatttggtttcctagactcacccacagagattcctatatagcaagtgcagagtggtagccaattctgtgttaacaggcgtccaagttgattctaacataggtgattcttaaaatatactttgagaaacacctttttagaaaacagtgtgaaatggctgaaaaagcaaggctttagaaccagactttcctagggtcctggcttttactgtttactatttgtgtgaccgtgagcaaattggttaaagtttgttttcccatcagtgctgggaatataatatgtctcctctattgcttagaattattaccaggtgtatatgagatatgttctattaagttcttgacatgtagaagctcagtaaatgtgagttgtctttttgacagcttaaaaaacccccagaacacagctgtaaacctaaaagccagtgaaaaagtagaaggaaattgctcttattagccttatgcattttgttttgtaggaaatcggagccaactgctttttaccttgaacctgctgaattaggattgtgtaaaattaagttactgatataatagatttcattatctagtttttcctggcagccttcagttctgtagacattacattcaaacagcatgatagaggttaggttaaagtgtgaaacagaagctgagagaaatgtaatagaggaacaaacacctcaaaaattctgaaggcatcaatgtgttataaaaactaatactcaaaatgatactatgttaagaaaaaaatgttatgtttaaaagatttgtttgagaagttaggcaagtatatattttagaaagctttccatcacaatgattaacatttttaaaagttttggcacttaaaggaataagcttttgctatttgtgaagttcacctagataaaatattagtctttcacagtgctgggtaaatggactttatagctttatttcctatttgattggcattttactatttttgataattttgttaacaggtatccttgaaactatcccaaaaagcaattgtggaactaatctatatgtaaattcttatgacttaccacataatggtgaagtttctctctccagaagagaaactaatgtgaaaggaggagaacagtgttgtcttatagccatgtctgcccatttcacgtcttgaacttcctgtcctgtattggctaattggagatatggctacttcatggttatggttctgcaaaagctattagaaagagttgtgagtttcctctgttcaacctttctgggcccatatccctacccgacttggatgtttatataattgtttatcctcaaatacaaacaatcagttggataggtctagatattagtttctttttattatttttacttggttaaacaacagcacattttgttctgcaaagttaggtctttctttgatggaatgaagttttcttttgctatattatgtctttggttattggcatttatttattactcttcttccagaaaacccatttttcttatgttgtatttttgtcagccctccatatttatcatactcccttttgtcccttccccatccccttattcttattttctatctgctgagtgagcttttcaaggtatatctgatctgattttccacaatgttagttctactttttatcacttctaatacatcatttgttttgctgctgcattttccacttccttatacagcatatttgttccttattttgccagtttcattttaatttctacttgtctcagcctttcctctttttattttatattacattgtttcatctttcatctctttcagaatctgtttacttttataaaatatgcaaagcagttggctaaagtttaccttcatttctcctacttcgcttgtgctttctacttctcaagtgctatgttatgtttctgttttacataatatttttatggcatctgtatttgctgttcctcttttcttatcctcgaacaagtacatgtctatgaaatctgagatgcttacctataaattggatttgtggcttctctctggttcatctcagtagaggctgatactgtcctcctcttggactgtatcagaagttctgatacatagccccatagcatatttctagggggtttggctaaaatgaatctgctagtctgagttggggttgcctaattttgctgcctaattgtcttatttctagattattagataatctggcccagaaagatctgttcccctcagctcttccaaactaaatctttatagtgctgattttatatctccaggtgtagactcccactcctcatgcatttccacctgcattcaagttacattgatgagaattttagaccgaaattggaggtagaaggcataggttttaggtcagatggacctggtgagtggagcgattgaacccttgcacagcaagggagcagctttcctctaaatctggtccctgaaatttctctttcttctggagagtttaaggaactctctcaaaattgtccaatatggctttgatattttgcctcacattacttccacttttcgtagtgaacattaagttccttttgcaatttagtagatcattgggaaggtggcgcgaaagatctgataaggtgttctagcttttatctcggcaaacctataatgctgcgtgctggttttaagtgcttggtatcaatttgtcaaatgagtgagtgaatgatttagtctttttttgagaatttacaagaaccaaccatgcttaaccatttatcattttaatacttttttcccaatagtttcctagttaggtgtcttacgaaatatatcctgggagtaccataaaatattctgtgaaaaatgattccgcggacaaataatttttggaaatgctgcatactaaatttttcttatagaagtttaattactatgtaaatgtactaagggctccaagaaggcctgaactaacaaaactgcttaactcttgtttaattcggcaaaacgtttcccaaattgatttgatcacagaaacctattaatatctttgggaaatgcttctctaatctttaaagtactgtatcgtttttgtgaaaaacatagagtttattgtagaattttttcatgaaataaactttgattgtttctttagacattcagagagatgtaaattatgactaaatgtgattagagtttcccaggaactgagattttttttctcatttgatattttgaacaagatataatctctatgacctaacatatgttagttactttaggcatttaacttgtgtatttaagaaaaggagatgtatcttttattggtacactgaactgagaaagcacaccccacaacacgaaagcatttctgtatttgccccgagctcagtaaaagagtttgtccctactcatggttttaatattgtttgttaatctaggaaataaacctatagctgtatagtttttctatcaaaatggtgtaactgggtgaagtaggaaggttgactaattttattttcagtttcagaatattaagtcctttgttatattcgcactttacttgtctttaaaataatatctgaccaaagctgtaatcatcttttgcctctttatcatgtgagattcaaatgtgctttactagtttaactgttcactgactggataagaaactttccctctatttttggtaactaatgcttctgtacttgctttaccactcttctttatccacatagtttttttttccttcacatctttttcgtcatgagtagtttagtttagttttggtttgctttgtaaggttagagataaatttgtaccaagttaggagaccttttttaaagaaaacttttgttttagaagcttctttttggtggtggtgctggggagggataggtgaaaggagataacagtagataaagcccgacaagttttcagctggacagatcttcccactggcctactaaatctgaaagagccaaaggtttgtggtgggtttgtctagcaagttctatgttctagttcctgaattttccctaccctagagtgtcatgtttccatacttccttccgaataagaccatgatctgcagacctccttgtaagtccaatcatccctaatacttccatgtttcagaattaaaaatgatttctaaaaacattacctaagcattatattactaaagcaatatgaccaaaaaatgttatttccaagaattgatgaagaaattttacataaaagataattgagcattaatacttagtaaatgaaattctaactggttttatcttcaacagacaaacaacagaaaggtgaatttgcaatagatggctacagtgtcagaatgaataacactctaagaaaggatggaaagaaagattgctgttttgaaatctctgctcctgataaacgtatatatcaggttgtagtttttatgttgccttgaaattaagttgataaaatgttttgatttcatttatagagacattaacatttgattaatactttccttgacatgttaacaataataaaaatactgatgtttaaatatattatgcattgaacattcatataagaggaaatttttaaaaatttcagattaattcacacactatcttcttgaaaaagataaagagaatatataatttatcaattacttcacatgttgcacacatgttgcatagaacataggtgatcacatgttgcatagcactaggtgatcttccaaaagaattacatagcagaaagagtaaaattattaaaacaaaaatatcagagtgataatacatattgtattgcttaggagtgtgggagaaaatgaaggtaaaagtacacatcagctctgcaattcaatagctatcagctaggcatcaatatggaatgtatgtttaataagttttaaatatctgagattgcagttgaaagccagttaattaagttgtcaggtagtgtgttggaatctgacaagaacatttttaagaaaactgtgtgcagcagtctaaagaaattcatgggtgtcttctaattgtcaagggcaaattttgttcatcagttctgtctttgacattgatgaaagagaagcagctttttttcctgcacagctgccagctgctgatcagcgtttgaaattcatcatcctctgcttcaattgcataaatttgtcaaaattaactgtacattataagaagcatccttgcaagaaaagttccactagacatgaaaagaattactaatagtcttaaagaaatggtaagaatacaacatacctttcattcctactatggtgattttcgttcttactgtttgttttatattagtttacagcagcttctcccaaagatgctgaagaatgggtacagcagctgaaatttgtattgcaaggtaagataaatcaatcgaacaagttatcacagtctttaaatactaaataacagagtagtttgggttttcatatacaaaagcttattgacttctgtgagaatgaccaacttgaatgtgactgttattaatacagaccactcacttcagattttaaacagcatcttttctataagtaccaattggcttactttaaaattcacatatttacaaaacaatttttaaacatgtttttagttaaggacataacatataacaatattgttgttgctttgtagggctgcatttatttataaagtatagttttaaaaatatcttctgcattcttttaaaatttacttcatgaaatgtgttttatagatatggaatctgatattattcctgaggattatgatgagagaggagaattatatgatgatgttgatcatcctctaccaataagcaatccactaacaagcagtcaaccaatagatgatgaaatttatgaagaacttccaggtatttactttctggtgattcatttaaagattttagggctgtgtgtgtgtgtgtgagtgtgtgtgtgtgtttgtgtgtgtgatttgtcctcgacagcttgagtagaaaatggtgacctattgagaacaaggacaaagaatatcttcaaaactctattttacaaaaagggttctgcttgagatatttcaagtgagtagatgtaacttacgaaaagtgaatgaaacattaaaatgaagcagatacaatactaatctcttgggacttgtggctcattagcattgtttatgctacataattttttaattaaaaaattgacttgccttacagttttttccaccaactcacacatcgttttttatttatacatcttggaacttccattaaccagaagttctatgcacaccccagatgttaccaacttctgcctcatatttctccttgcttgtagtatattgcactgtctcagaggaatgttgttgaactataaacaaaggccttttgaggcttcaagtcttcctgttgatattttagcatcaatatggaataaaaaagttttcttattccaaatgctcagacctagtttagtgtttacatgcctgtctgttatgtaacataaaattaattatctattagctacttgacttgcggccatgaggatcaatctaaaataaaaagacatctgaaatttaggaaacatatgaaaacatttaggaaattgtattactaatactctaggctgaaatgagcttttttggctattaaaaaatcagtagttagagaagaaaaaggtatcataagcaatataagcaagatttaactagtacatctcatgtagagaggccattttgctctgaatataacaatttaatgatgtaatgttaaacctttaaaattgatttcaaaaatacttaaaatgttccaaattaatgtacaaatgtcattttcaagacaatacagcataataccaagagtatggactttagaagaaaaaaatttaaattctggctgtaccattgactagcttagtgactttataagttaatttcttcatttataaaatggaaataatgtcattgggaggggtaggtgaagtgatttatggaaggctttcagcatagtgcttgatcccacaattaattgtaacatcaccatcatttttgttttattattgtatctggtgaattcttgcaagtgcttatgtggtggtacagtaatggttttctaaccaagtaaaaagtaataattttaacaatattataaatttaaggtataaaaactatgtatgcatctacatattgtattttactaccccagaagattagtataaaagtataattttatggggaatagtgatctgtgtatttcagttgtttagtggagctacatgtttattaaccccttcctttctggtttaccctaaggaaatggcatctgctgtagcatcagttatcctcaagtagggaagaatattccctggctgcttgtttttggtcacaccatatcattaatacaattattttagtatttaaaaatgtttaaaagaacttgtgagaatgtatactcataaaatggaagagtggaatacatttaaacacgatattactgccattacatccttttaaaaccctgcaatgaatgtgttacattacaattgttgaaataactgttaagttctgtattttttcaacttggctgttctctccccacccctaaagaaaaaaaaaattgatcaggaataaagaccagatattcatagttattttcataacaaagacctaaggaaggtctgagtagcttgaaattttaaaaatatgaaacatcttttattttttcttactggagatattattcttcattcttccttgcccccctcctcacccaccctcacacataattgttggaagtaactggttactttttaagtagtgttacttcttgctgtggtactgggagaaatttaagctgccctggaatttcttttcccctgcttgggatccccagttgctctgcaaagtgatcgagcttgatggagcctgcacctgtgccccgggaaggaagccgttctaggcagctgtggaatgtctagttcccttcttccccagtgtaactgagagctgcttcaacatctgcacggttcagcaagtttgtcaagtttgtgccaacggctacagaggggatttttctagtaaaggccctaaaggtgtctcagagttagaggttttgtttgattaaatgtctgaaactaggaaggtaacttttttaattaaaacaattgtctctctttcaggacaagaattaagcttattgctttcacttctgtgaaatttgaatataattttgatagaggagttagaacaatggaagagcagtaagcacatttacatactgttgatatttttccagttctgtgcaaagaactatgtatctctgatatctgactggctaaattcccagaattaaataatactacaatttcaacacaattttctgtcaattatgcattgttgaaaactaatcctcttagttgaaagatgaggtatacaaatgtatttgaagagaaatctaagcatttattatgctactttaaatcacaacgctctttttctgagaaacgaaagctcttactctaataagtgtattttttaaaaactatgaaataaacctgcagtgttttgagtttcaagagtaagaagaaaacgtggttttaaaaattgcaatgggctgggcgcagtggctcacgcctgtaatcctagcactttgggaggccgagttaggtggatcacttgaggtcaggagttcgaagcgagcctggccaacatggtgaaaccccgtctctactaaaaataaaaaaataaaaataaataaaaaattagccgggcatggtggcaggtgcctgtaatccaagctattcaggaggctgaggcaggagaatcacttgaatccgggaggcggaggctgcagtgagccaagattgaggcactacactccagcctgggcaacagagtgagactgtgtctcaaaaaaaaaaaaaaaaaaaaaaaattgcattgcataatatcccttgaaaaatgtttataattctacaggaatctaaattgtttcattgtaattgtttttcagttagaatattctaacttcattacagtaccttctgtttaatttcttgttcatttatttttaactaacttcgtaaaggaataggaataaatttgtaagacttctttgtgtttaagggatttatacatatgtacaaaagagttgcgagaatgccatttctggggagtattaaaggtatttggcttttcttcaaatatcctaatccttttacatcttttatgtcttattgcttattagcataggccagtcaggtttgtttacattgtaataatactatagcatatttgtgtttgtgcagctaatatattgatcaaaatgtgttaaactgtttaacatggtaatgagttcatttggctcagcacaggtttgtaaatttattgctcactttttcattagaaatacagaggagtgtctttgtctcattttgaatctcaaaaggggaaaataatactcgtgaaattgctgcagaaaccaaccctgtttgctcttctcttctattcactatgtcacttgattttttttctttaatggcaggaaattgtacagaaacaacaacaacaaaaagatttttctagatctaaactgaatagaatcagcctagtaatgagaatggtaaccatccattaacttattaaatctgtagctttcagagggattgcacttgaaatgtcttctggcaagtggactggaggagagagggcaacataaaacaggaagacaaatttctattccattaacctattttttttaagtgtgaattcatttttttttaaattacaatgacagattgaactattctgagtcagaaaaggatatttttatcctttggccattcaattacattttaaatgtattcagtccaactatctgcatctaaaatagaacataaagtaaaatgcagctataatttttttccatgagactattatatatacataaaaaagaacagtgtttgggtactttaatttgaagtagtttacagcaaatggacacaaatgctaatttagtcaataagtggttataggcccccaaaatacattttggctttattttcctcctgaataattatcactcatattactaagttaatatcagggttacaggggaccctgcagtctgtggtattaacattgttttaagtgatagtagatcctgacttcaccaaacaatttttctcctttcttctttggaatgcaatggaaagatgtcaattaattttcatagaaccacatatattcagtattttaatattgttagtctaggcagcctgctaacattattttttcttaaactaggtactgaatggtgaagttatcaatgtggtgatattgtgggaatagtttttcccaagtagataactagattagggttgaatttttggatggtgatatggtttggctgtgtccccacccaaatttcatcttgaattgtagtacccataaaatccccatgtgtcctgggagggaccaggtggagataattgaatgatgggggcagtgtcccctatccagttctcgtgatagtgagtgagttctcatgagatctgatggttttataaggggctcacccctttgctgggcactcattcttctcgatgctgccatgtgaagaaggacatgtttgcttccccttccgccatgattgtaagtttcctcaggcctccctaaccatgctaaactgtgagtcaattaaacctctttcctttataaatttgccagtcttgggtatgtctttattagcagagtcagaacagactaatacagatggtttcagctctaaaatctgcttagagggttatccgaagttataaaaaaaaatgaaatcattcataaaatagggtcactacacacatataatatttattatttttatctttgctgaatataaatgtgtctttgctgaatatttgttcatagtattctttatgttgtttcataatatagtatgaagctttggaatacagttctgcctgtcttgtagcttttctctatgttgccattggcattgcaaattcctttcattacaagggatggcttaacacatactaaaccgaaaatatctgtgtgcacacaaaacatatatttccactggtggtgagataaaatgactcatttttgcaaattggagctacatcagtggttcccagccagggaagatattgaccccagagtatgtttggcaatgcctggagacacttttggttatcataactgggatgtgtgtgtgtgtgtgtgtgtgtgtgtgtgtgtgtgtgtgttacagatatgtggtgggtaagggccaaggatgctgttaaacgacctacaatgcacagggcaacccccacaacaaagaattgtctggcccaaacgtcaatagtgctgaggttgaaaaaccctggccacagggatgtaatagacaacttttggtttatcacctttttattcttatcacttgaattaataaagattcataacctaagctccatatgagttaattcatttttatggacacaggttttcttacatacatgaaactaggattacatagaatgtttctaggttttaagagatcagctggacttgcctatcacgtttccttcaaggagtagtattgaaattctatccatcttgtagaaatgagcaagccaggaagataaaaaatgaaggaagcattttctctattttcatgagctactatcttggaaggaagaggtttctaaaaataccttgtagatgtgtgaatacttgatttatcctattctgatagggttgttcttttgaggctgaaggaaaagaccggtgggtgtgggattggactgtctgtaaagggagtcaggcatcctgggggaatgcaaggctgagcaattccagggctgtctggaatttgacgagtggctttaggagaagtggaaacccttttatgtgacttctctatctttttggacctggactttgaagaggctagtaggattgagatgatctctgcccctggagttagacgggaagtcttggaggcagccctccaaggggatccgtgaagaggagctcactttaatgtacttcacaacaagccatactgtgtgattattttatattatttgttcacttccctttcattattgctaaatcttagatttcttttttttctttttaaagatagggtcttgctctgttgcccaggctggagtgcagtggtgcattcatggctcactgcagcttcaaactcctcaagtgtttctcctgccttagcctcttaagtagctgggactacaggcatgcgctgccatgcctaattttttagtttttaattttgtagaaatggagtcttactatgctgaccaggctggttttgaactcccagcttcaagtgatccttctgcctcatcctcccaaagtgctgggattacaggcatgagccatttcactagctactaagtcttaatttttaaatccttatttacaaacaatacatgcttgctggaataagcttaaatattcctgatgtgcataaaataaaaaagtggggctgggtgcagtggcgcatgcctgtaatcccagcactttgggaggccgaggtgggcagatcacaaggtcaagagattgacatcatcctggccaacgtggtgaaaccccgtctctactaaaaatacaaaaattagctgggcgtggtggcacgtgcctgtagtcccggctactcggggtgctgaggcaggagaattgcttgaatctgggaggtggaggtgagatcgagatctcaccactgcactccagcctggtgacagagcgagacttcatcttaaaaataaaataaaataaaataaaataaattaaaataaaataaaaaagtggaagtcactccctaccctacgtaaactttgttaacagtttgatgtgaatctttttgttccttttttgcctatttttaaatatacatatacatataaaagttttaaaacaaaaaagagatcctttttatttactttcttctggccttttgtaaaattttcttcctttcattttcttcctatttcatttttaccttcctcctttctcatgcttttattttctcattcctctcccctattttcatttccatcctttctcttcttccttgctttcatttctttcatttcataagtattcttgagtacctgttatgtgccaggcactgtgcctaagtgttgggaatcccccagcatccttacacaggcctcaaaggagtgccctttttggcctaagcctagacttactaccatacctccatgtttatttatgtcttatgtatgtatgtatgtatgtatgtatatatatataatatcctcatcgcatgagttttctgtttttgcttttctgatatagaaattctgtctccaatgggcagagtcttccagcagatagtgtcaaaagtagctttgtgtctttatatcttgacacttttaaaaaaatattttttaattttttaaaaatttaattatttttatttttttattttttttgagacagggtcttgctctgtcacccattctggagtgcagcggcatgatctcaactccctgcaacctctacccccgaggttcaagtgattttcctgcctcagcctcccaagtacctggattacaggcatgcgccaccacgcccagctaattttttgtatttttttttttagtagagacagggttttgccatgttggccaggctggtcttgaacttttgacctcaggtgattcgcccaccttggcctctcaaagtgctgggattataggtatgagccacagcatctggccctttttttttttttttttttttttttttttttttgagatggggtcttgctctgtcacccaggctagaatgcaatgatgtgatcttggctcactgcaacctccacctcctgggttcaagctgtcctctcacctcagcctcctaagtagctggaactacaggtgcatgccaccacgcctggctaatttttaatttttttgtagagacggtgttttgccatgtcgtcaagatggtctccaacttctgagttcaagcgatctgcccacttcagcctcccaaactgttgggattacagacatgagccactgtgccaggccaatgcctgcttagaagccatcctccacttcccctgtttctctccatctgtctcttgtctggctctacgccttgctgcagacacccagagtaccttcctctgtatctgtgactagtagattgttgtggttgtgagaaggggctctggaaggaaacacacatcactttgaatcccagctctgcccgttatatgtgcttcagccagaaaaggagtgaacacaggaaagatggagaatacacaggaaagatggagcatggaaatgggcaaaatgtgtcagtaactttattgattattttaaaataagctttgttttaatctaaaaaagaggcaaaactaaatttaggcaataatttaaaagttagctggggcaagatggagatggggggtagtgaaagcatgccagatgttgtcctgttcagaaggacggaggagaggaatactaattttaatttttgttaggaaatgtatgttaaaattttagagttaagtactaaggaaatagaatgcaatcttgcgttgctcaaagaagcagagggtaaataaaaggtgaccacgtaaaacaatgtaaacacaaaagaaggcaacaaacaagaaatcaaagagaaaatatggtaaaattaagccataatataaaagtaagaatgataaatataacttagtctattaaaataaatgtttgcattagatatttttaaaagtctagcactattcttcttggagatacacctgaaacaaaaccacatagaaagtttcaaagtaaggaaatggaaataaatacaccatgcatttctatccaaagaaagctactatagctatgttaacatcagataatatggaatttaaggcataaagcaataataggactacagaatgacactacataacaaaaatgaaagaagataaagctcaaattcatctaactatataaccctaatatctataacacgaaaacatataagactaatttgacaagttcttaatcatagtgggaaattttaagatacccctttcaaaaactgatagaccaaggaggcaaaaaataagtaaggatataaagatttaaccacaaaattaataatctatcaaaaagatataaagtaacattgcatagtagagaatatttgttcattcagtacacatagaataatcatagaaattgactacatatgtgttcacagttaaactctcaacaaattacactgaatctgtgttatacagactatggtctttaactacaattaaatttaattaagagccaactctgaaaaggtagttgaaaatacccaaacccatgtgtttggaagctgaaaaaataatagttcatgagttaaaagaggaaattacaatggaaatgacaaaatatgtagttttccatatgaaatacactgaaattagtacaaataacaacttgtagcattgtagcattgttgttaactctttttttgggggagggaacagagttttgttcttgtcacccaggctggagtgcaatggcatgatctcggctcactgcactctccacctcctgggttcaagtgattttcctgccttagccttccgaatagctgggattataggtgtgcaccaccatgcctggccaatattttagtatttttagtagagacggggtttcaccatgttagccaggctggtcttgaactcctgacgtcaggtgatccacccgcctcggctttccaaagtgctgcgattacaggcttgagccactgtgcttggccatgttattaattctttggggagaattaatccccaaagaactggagatgacagaactataaaggctataaaatcaacattatttacaatgattcaaggataaaataaggaaaagaaactttaacaagagaaaaagatcctgtaaaaaaaagatcagatttttttaaagaaccaaatagaatcactagaaattattgatggtttggatcacttagccattgaattcaaaacttttagagtcacatacatatgtttacattgctgagggaaccaatagaatacatattaaaattctgaaccagaagataagcaaatgtcaaccactttaatcaaattaaaatgctaatatttgtaaagaaaaaagaaaaattatgttaatggggctaggcttttatgttttttctgtgaatcctggatgaaaaatcctaacactgtaccagaaggtcagatattcacacgataggatttgtatctgaacataatcaagtgttttatcctttgccaccaagaaatctcaacaagtaaagacatagcttctaacagtcttcatatcagacttttaaactggagtcttcattcttcagatatgatttgtctcccatatagaatataaacagatcacagcctgcttttgtttttaattcatccattctttcagaagatagaatatgataaagtttgtagtagcttcacgaaaatgtatttgcttctttaatcccagaaaaagaaatacacacatatgtacacatagccacacgaacacatacatctatagagacagactgcagcaagagagtatcaagcttcactatttttgcagataggtcagctgggaatatcaacttcctaagagtactcagctgcttactttaaagcagtgattaataagaatgaacaagttcaacaaaatgtcagtgataaatataagcactcttcatatctggcctcggcaagtgctacagctgagtaatgtaaaactttcaacaaaatgggaaaaaatccaatttaacttaatcaagcttaagtgaaattttaccttaattttgtttcaaataaaacattcgtttatagatgttttcctctttattagaacttcattagaatttttacgaagaaataacaactgcttatagccacttatccattagcccctttgttccttattaaagaagttaagatggggcagtttttttaatatatataataaggacattcagttgcaaggtctgagttttttggactagatcccaaatctgcctcctgcatgggcctcttttcacatcctggttcaaggaactacaacctaatcgtgcttctcttaagcacacaaattcttggaagagctccctttgttcctgttgtctcttcacctgcttactctttatcctcaggcagtttggttttctatcctcattccttaactaaaccagcttcttcagagtcaccagtactctcctaatcatcagtcttggtcctcaaattcatctctagaaatttgattttacttaccaccgcttttgtcttgaaactgtctccacctttgcccttctccagtttgttttcttgtttacatattatatttacaaataagcatcttaggtcgggcgcgatggctcatgcctgtaatcccagcactttgggaggccgaggcaggtggatcacgaggtcaggagatagagaccatcctggctaacacagtgaaaccccgtctctactaaaaatacaaaaaatgagctgggcgtggtggtgggcacctgtagtcccagctactcgggaggctgaggcaggagaatggtgtgaacccaggaggcggagcttgcagtgagccgagatcgcgccactgcactccagcctgggcgacagagcgagactccatctaaaaacaaaaaaaaaaacaaaaaagaacaaataagcatcttagcactgtattacatttccacatttcctgttgctttttactgattgtttcaaattattttccagtctatcctttcctaatactgaagctttttgtttttatcttgtcttaccttctcctcatatcatcttattattattcacttaattaactcatccagcaaatatttattgaaagcccattgcatgtcagattctgttctaggtgctgggagtttaggcatgaaaaaggcagacctagtccctattaagatagttacagattgtagtaggtgacacaagataagaggataatgtgagagggagtaaatgatgtgtattctatggttaaagaagagatgacatttaaactgaagccttttggataaatgcaaaaagccaaacgaagcactttccaggcacagtgaacaccaaattcaaaggctctgagcatggacaatcctggggtgttcaagaaccagaaaggagggccatatgtagccaggcagagaggttaaaatgagattggagagaagggcaacagccaggttaagcagggccttcctagaacagaatcacagccccatgtgcataaatgacacttgaaaaatgtgtcctgaattactttagtgaggctgacatgtataattatataagattgcccacacaaatcagatgctgtttatgagatgaacaatttggattggaagagacctttttctctttactccttctccctggacaactttataccttccacatcactacacagaggtgcatatggtcagagcaaagtaaaacatcttcactgggtagctagctcatcaaaagaatgtagaagatatgatgataattatactaataatggttaacacttagcatatgccaggtactttcctaagtattatttaataagcataagtggttgatggtataggtattattactatctctgttttatagacaaggaaactaaggcacagaaagattcagtaacttgtttagaggcacaagctaggagatagcagagttgggatttgaacctaggcattctgactctggaggttaagcttttagccaataactgtactgtctctcaacaaaaatatgttaagaattgccttgtccttagttatcagataagcatttactgcacacatataaaaaagacaccagaagagagaacgtaccaaccaaatctcatcttcataaatgttctctcctctgagctctggctttatttcagataatttttggccatcatatcaaacttgtatttaagatcaaattacagattgaatattcctaatttgaaatctgaaatgttccaaaatctgaaactttttgacactcaaaggaaatgctcattggagtatttcagatttcagattttcagattagggatgctcaaccagtataatgcaagtgttccaaaattcaaaaaaatctgaaatttgaaacgcttctagtcccaagcatttcagatgaggaatattcaacctatactgctctacctcctttcttttctatttctactaacggtatcaattgttactcaagtttaaaaaaagaaccctcaaacccatcattgacttctttcttggtctccccacctctcctaatttggtcagttgccagttactcctgattctgccactaaaacatcatccatccctggctctctgctcactcaggctttaataatttctcacctggatcattacaaaagctcctaagtggtctccccacttcctgtgtgtgtatctctttctctaaccagcctgatatagcctattctacgtggtgccaacagattgatttcctaaaatataacatggtcaaattaatcccttgctcattaacctttatgagttcccaacccctagtaaaccaagttcaaactaactggccaggccctgagccatggtcccacacaaatccacctttccaatcccatttctgctgctcagacttatgctccagacagactgaactcttcactaacccttagcccttccctggactgccttcatcaactgtgtagctctagatgccttaaacaaaatcaatatattgagttaattaattcagtgacaaaaatccagccaaatagcacacagatcaaactttagttgatgtggcttttcatttttttgtccacaaagtcgctgatgaactctaccatattttctaacatatctcactatctgcaaggtatagggtgggtactcagatgatcaataaatagcccctgttctcaaatataccataatttaataagaggaacagatatatgaaatctaactatagaaaaaaaacaattaaaagacatatgctctcaccaattccaaagcctggtatgtattactatatatcttggccattatttcctctatccacacctttgtggaacctttatagtcactgcttcagaaacaatgaaaatacccttgttgattctatatatttattacaccattatatagcattggtataaatatagtattttcgttaaacctgctcaggtggaaccttcgtggtcattccactagaaacaaaatacccttgaaattctctatatttattgggcataatacagtatttttataagtatagggtgagttaataaacacagtatagtatcatggtataatagtaaatatagtattataatatcattatcctccagcattctggaaattaacacatattcagaacatctcatctgatgctgagacaacgtatataaaagaattcaaaacctcctttataaaccggttaataatttttcatttagtggggaaaatgttttcaagaaaaaaagacttcagaagtttcttaagtcctatctttctgctgctccaaagtgttgaatggctcaccacagaccataggataaaatgcgtatttgttaccttggcattcaaaggtcttccacagtcttgctgaaatctcacagtctagcctaatcactgctataatgcaacacttctccaattttaacaagctgacttgctctttattttccccacgcatatcccatacatttccaacctcacatttgtgttcttacacttctgtctttatagaatgctgtcccgtttgttcagtttctaaccatatcctccctgctctctaggcccagatcaaatcccatctccccaaaagagccatcccagcatgaagtgacctctgcttctctgagcttctctaaacttttctaacaccattcatttgaatattaattacaacttcgtgacattttaaatgttgatatgtgctattctgtaaatcttaacacttttcatgtgattatttggcaaacaagcaaatggatggttccttatagctttattatatttgcaaactcctctagtgcaaggatcaaaccttatatttcctggcacccccagagtacttgaccaagtgccttcctcataagaattcaataaataatacctgaatagtgcaaagtctttagttaaaggggtctattaggtaaattaagagaaactttctctttatgatgattattttcctgacatgaattactgcagaatcctaaaagaatgattaccaaacagtatactatcagtggtatattgaagcatggctgatcccccataacttcattaaaatctaacattactattccaatgggcagagtctcaaataaacttaggaaatgtaatacattgagtgatgaaaagctcttatatcatcaatcctttgggccattaaagataaatcatctactatgagcaacagaaccaacttgagttaccagttccctatggcaggctagtcatctcgagcaagacatttcccaggaaatgacattctcctttgcttccactcattcattaacacaggtaaagtagatctaaagagcacaggatcatagttaggatttttaaaacctgccttctctaaggacttaatgtgactagtaagcaaatggtacattttatatttaaaagtaaactcagatatggaaatctgcacaagcaacttaaaggatggtgaaacaaggtttaagaatcaatgattagataagtccttggggaaaatgtttaaacattatctttcaggcaattactttgattcagtgggcagagaggaatcattggagggcctcaaaaagaggaaggctgaggttaagattcaggctgctcactcctagtactagctctgacatactttaagccctttgtttcccttttccactccacaccctttgcttctattaagctagttccttttctcagaccactgcttatgagtcctgctcccaatttcacattgcctattacactctctcatataccagatagcctcatttcacttctgttagcagcctgtgttttctttcagaaactaccttacttctcagttcttcctggaaacctagcctgataaggtgaaggtcatctgtacccataataaaatatcccatctccctatgttttatacttataagtataaaagacagtaacccaacacatgtagatatacatgtctagacactttgtgaatttgagcctaggtttttattttatactttctaagagctcagcattaatttaaaagtattctgcagagatcatctaatattctaataaatcaactgaaaaagaatactaaagaaaatgaaacatgaaatgagaaaagcaaaaagaaaacacccaatttttatgtaagcaattcaattattcatgcaacaaatatttattaggcagctattacatgtcaggcactgtgctagacactggagatacagtgttgaccaatatgactcagaatttattaattagaaataaatataacaaatgataagaaatggttatgaaaagaggccgaagagagactgataaagaacaaagatccaagccaagtctatggcagtaaatgagatacctaaaagggcttgtctgttcagtgctactcatacccagtaagaaatatgtggttctgaacaccacctatagaacatactgaagatgaaagtaaaaggattaaggttggggagtttactaaatggagatccttttgaaaaatgtttaggtggggtaactattggtatatacggaagagaccagattatagcacattcaatgttatagggaaacgggagttcatattcatgaagagatttaagaaagagttaataagaaaaagactttgaaaaacaccccccaaatcccttcaacatttaaacccattttttttgcccctacaataataaaaaaagacttcccaaaggaagtggtggaagaaaccccattgctcaagacattaaaaaccagatggtccaaagccccagcaaacattcacgtgggatcaatccttcacccagtgaaagcaaagagatgggaccagtgtaataatgtgttttgaatctctagcttagaaatgctatgaaaataacaattcacattgccttggacttttccttaatgtcttagctcttctctgtgctccttcagctttcagggttgacttctgttagagctggccacacaggaatttgcctgtttacttggaagtctcttctgctaggtccatgtattgtgagcttatcaggttttctccttacctctatgagagtgctgtatgccctgggttctggaagtgtttttcttaagtgcttctcctaaggatggttttatgtttgcttctgctagaaccccaggagttttgaaatttttatgttaaatttcttggcttgggaataccatgcttgaggatggtataaacttggatctcacattggacaggcttgggggtttgatttctcacaggaagccccatgacctccagccctggaaaaacagaaagcttccttgtttcttccctgggctgttgggggtctcatttgtatctctgtgcttctcacaggcccaaagccttgtctcctgtgtccatgaagatgttaaaactccagcctcaaccccaccatgcaaatgatcagtatgttgctttgagcaagtggggaaggacaggtctgtttcagcttggttgaccatattgctagaggttgaattcctaagccataagttatgaattaacactgcagtgaagacttaattataagtgcttgatttagaaactttatttcaagtcaaacaaaattttgtgtatgtgctataggcaagattctgtgctaggtgtctaatattctgtctcctatgtactaaggggctttataattataatattaattacttctttttttttttctgaaatggtatctcactctgtcacccaggctggagtgcagtggtgtgatcttggctcactgcagcgtcgacttcctgggctcaagcagtcctcccacctaagcctaccgaatagctgggactacaggtgtgcaccaccatgcccagctaatttttgtatttttagtagagacaagatttcactatgttgcccaggctggtctcaaactcctgggctcaagcaatccacctgccttggcctctcaaagtgctaagattacaggtgtgacccactgtgcctggctttaattacttcttgacaagaagaaatttttgttaaatttatgaaggaagagattttaaatggccgctgaatttatgaagcaaattatcccaattagctgcttaatgctatttaggataaaaattacatttgtatatacaaagaattactcaaaaattaaatcaaatagagatccatccagacccaaatgtacactttggttttataagctaagactaatacatatttgcatttgaagtcatgttaaattaggttaatgtggttactttagaatatatctttaaaatggggctggcatttcaatcagctgaagtcctaatttaaataacctattttattctgtgtgctgatcaatcattttctcccctagaaagtcaaaccagtttttgcactattcatttgtagaacttacatgacataaacattatgtgacagaagttgcttgttattaagagagagaatatcatctcaaagaaacttgtcatctggaaacaggaaaaatcacatgaagtaattttatttgtatcatggctttttcactgttcgctacatttgtgacagctgattttatattaaatattaacaatattctgtttatacttgaatctgctgcagtaggatatagattttactcagaatattcctggttggaaagaagactgttcagttaaatgagacacgtgagggctagttataaaaaaaacatagatattatataactaagaaaataaagctaccactttgatgtcaaaatttggtgccaaaagtttgaagttttactttacccttgactcttataaaattttgttttgggaggtcaaaattaggaaaatattggcaatttcattttattcaaactaataaaaacacttgttagctatgggtacatgtgttagagagtcatggatattaatataaatagtatgattataatgaatgagttatggagacagttaatctatttgttagaaagagttattgttggactttggtaaccaaatagggttatatttctcacttttaataacacttatacaataaaaaacattgatatattttgagtttctagcagcagaatgtcttatttgttaattttaaaataattttggcaacatctactttaaaaaaagcctaactgaattgtgttgaatcttttgtgaagtgtgtatgtatgtccctatgatttgttttgttttgattttaacttttcaatatatgaaaatacccatgagacaggctcctgctaaatttttggccactttgtcatcagagctatgagtgtacgttgtcagttgtttaaacattgttgaatccactgtgggttggcaagaagcatctgggagccagacttttcctgtggacacatgccaagtagtgtattgtatttcctcactaaattgaactatactgagataatttttctagttgagtttttttaatccagaaattattttccaaagctaagtaaagggtcatatgataaagttgtttataataaaaccgcctgaattctttaatcactgcttgataactacttttatttagctagaataggtgtaaataagtcatgcagttaaactacattcagatagttaacattatgctcttaagtagactgttcaggaaagtgcatatgtcattttgtgtattctctttaaatcaatgatttactctaagcaaggacaataaacattgaatgatcccttaattaagtactatggttgggcttgccattaaatttacatgtttgattgcattatttaattagatggaaataaaatcccaaattgcattttaatatacataattatggcataacatttattttaactaaaagtgctaggaaaagtttataaaatctcatatttaactttaaaaaaaatcagttgttatttggggatgagaaaacaagaaagtttcgtcatactggaaaataggctagaggctagttttggagctctggcactgcctagaccctaggcccctaaggtggcagggatttgtcctcccagagtggataaatttacttcatctgctactctgggacactgtgggtgagaccttaaaaaagtaagatctggtttgcctgccatgtacagtaaaaatattctggctcttttacataagagcagacattttgttgatgttggctttatttctggaatccaagtaagagaaactttgtaaatgagagttcaacctatccctttagggggccaaaactgagcaagtgtgttggtttttgagctcaaatttttattcttacgtactttgaaggacagcaaatgctattttgcaagaatgagcatcaagacctccatcagatgagttttacatgcctaacctccccttcttccccctgcaggttctaccttgcttcttttggcagcccctttctacagaaatatactagttctagcacatcttttctcttcagccattataacctattttatcataaattagtctgtatgtcaagaagatatctcttacattagaattgaaaacttcttaaaaacaattctgaaagtctgtgcacagccactcataggtacgtggaaattcatattttgagagtgccattctttcgtattacaaaaagtgctttaatttgctgtatttttcatgtcttactgcagtcatatctggtaagaaactatagctatcttattcaggattaatcaatcttcttaggctcctggctaggattgaagctgctctcagccctgcttgcttcagggcttagcctaactctgttttttcatcacatttagtctctgggagggaggtgatgggagatgatttttccatttgcaagctgcctttcaactggaagaaaaatggaaggggcaaatgccaagtttttcactttctgtggccattacaaacatgacttgtctcctgttttttcagcagtgtacactatttttcaaaggagcatttttttaaacgattgtcagttagccaaattattttatcattgaagagtgttaaaaataagaatatatgtcaatatgacatcatgatattaactttctcataagttgcatgttgtgacaataggttaaaatgctgtttaattaattaacaaacaggagcaagtaatatatgcaaggttttacacccaaagggaagaaaaactgtagtgcttcagaacctgggctctggaggcagactgcctgggtgtaaatcctgacactaattattattatagctgtgttatgctgaacaagttacttaagtgtttctatgccttcgtttcattatctgtaaaatgttaatgatgggttttgaatgagatttatgtatatagtacctagtggtgtttagtacacagtaaacagattattataatcactgttacaaatctgctatgcagatttgtgttgaccactttaccttatttcatcctcataataattatctaaagcagattttatagttctgttgtccagatgaaaaaactgaggttcagagagtttaattaacttgtctaagtttgtatagctagtgaaagagggtaatataaacttctggactacaaattatattgcatttatatagttatgttgtatctttcaaatgcatatatgggattaactcctgttttgctaattccattatataattaattttactttggtattatttagtgacatatatctgtattttgaagcttaaaatgtacttaccttcaaataatgatagaacactgaaaccttagagaccttatgcaaaagaaagccttaggacaaccatgtccaatcctttgaatgcagggagttttttgcttatttgtggtggtggatatcatgaaaattatgcatggaatttttttttttaaagctcatcaggtattgttagtgttagtttatcttatgtgtggcccaagacaattcttcttcttctggggtggcccagagaagccaaaaggttggacacctgtgccttcgaagatacggctctgagccatggttctcaaaagtactgtcctgggaccagcagcatgggctggaaacttgttagaaatgcaccttctccagctcagccaaaatatactgaatcagaaactctgtgcatggggcacagcaatctgggttttaaaaagcccaccaggtgattctgatgctgctgaagtttgataaccactgctcaagataaataccacatcgtggtggtatgccgagatgttgatgtgtctcataatctctattcgcaaattagaagttacctcatattgcagaggggaaatgtggtgatagtagaaaaatacaagtgaggctattatttgataattgccctataaatattaaatattcaacactatgtgcttgatccctttcattccttggattgaggccttctaagcaggtagaagctattactgtagggcacagcaaactaagcacaagggagtaagactgagtgtgactctctccccaccctcagtttcttactgactgggacacacagaaccagggatcaggatggttagtttttctagtatgcagcaactaggaatcttcaaacaagaagaactgacgaactgacactaagaatatagagaaggggagagagagcaataaacaatcattatcatcatatctttttctttcttgagatacggttcaaacatggctgggcgcagtggctcatgcctgtaaccccaagcactttgggaagccgaggcaggtggattgcttgagcccaggagttcaagaccagcctgggcaacatggcaaaaccctgtctctacaaaaaatacaaaaatcagccggatgtagtagtgtgcgcctgcagtctcagctacttgggaggatcacatgagcctgggaggtagaggtttcagtgtgctgagatcatgccactgcactccaacttgggtgacagtgtgagaccctgcctcaaaaaaacaaaaaacaaaaaatatagttcaaacatggaagtggcatattttaaaatgagtgagacagaaggatgtaggaaataaataaggaaactgatacggtgtccacttttaattgtggaaaaaattggacaaaagcagatatcatcttagaatccatgatagccaccgaagaaaaggctgcccattacccacacacatttgctaagactgtaggaaggcagatttcagaaaattcagggaaagaataagcaaaaatattgtggtattttgtggtattaatgacaaacaagtatttttaaatgccatttgaattttaattgtaaatgatcttaatgagggaaaaaaagagaagttaaaataatatccttgtgctagaatctattcaatgatgcaagttttatttatttatttatttatttatgtatttatttatttttgagacgaagtcttgttctgtcgcccaggccagagtgcagtggggcaatctcagctcactgcaacctccacctcccgggttcaagcagtcctcctgcctcagcctcctgggtttacaggtgcccaccaccacacctggctaatttttgtatttttagtagagatggggtttcaccatattggtcaggctggtttcaaactcctgactgcaggtgatctacctgccttggcctcccaaagtgctgggattacaggtgtgagccactgcgcccagcctgaatgcgaattttaaagggggtatccatcaacaattgaaatagctgaataaccaaagaaaatatgaaaatagcttacatttataaattatgataagcacaaccaaaaatgtatgacagttgtgtgtttttgttttcaaaacttattagagacagtggttcagagaaaacagctcagtttctatttgctccttttctgttaagaatcttcctccaagtaataagattggtaagagggaacagaagcccaggattgacaaagattcaaataaaatacctagctagccaaaacaaactccttctttgttccaggcttgtttaggtaatataaataagtcactggggagtccacacctggagtaaaagtggacagtagaggaatgtttgcagtaccttatgagtggaataatagaggcctggaccaagtctgtgagaacacaaaggggagagaggccagctgcttcccagagtggggattgagctttgctttaaagataagtaggacttgggtttgtcttctggcccaggtaaaactgtcatacattacaagagaaattgtaaatgaagtcattgagctgctgtcactcattttgagggaaacatgaaggaagagaaagactttagaggtctggagtctagcaattgtattataaacttcaaaaacagtagaaagtgtctcaagttgggttccctgaaacagactctaagacagttttatgtagaaggtttatggatgagtgatcttaggacatacgccggatgaaagtgaagaaggccagactaggctaggcggactcttcaggattgtgccaaattgaggcataggggcttgtctttgtattcctgcattagctattcattggctccaagccattctctgggaggccctataaccttgagtgaagcaattccctgcagttgagggcaatttctagtgagagacgcagttatgaaccaactgcagcttgagtcccagcagttggggatggctgtgttggttctgaaaagcgtatctggtatcccttttcagatgaattctgaaaattctagatagttaatgggctataaagaggactccagaaactgctaacatagagtatcaaagagagtcttttatgttaactagaagatgaaacactaattactggaacccagtatgagttccaggaattggtggacatataactggacttcagtaagacatgtggtcaggattctcatgaaatctttatagatatagagaccaccagataactgactctacagctgtgtccaaagagtgctaattaattgattttatgaataccttagggctttattttcaatattatcatatccaacctattcatcattgttttggatacaggcttgctctcaatagaacaaaatcatgggtcaaatccaacaagatgaaatatgatagaatattccacttgctccaaaaatctagttgcacaagtacaagaaaggaaagacttggcttcacagaaaatgggaaaaacacatacggactttggtcaatagctcaatatgagtcaacagtttaatgtgattcaatcctgagattgtgtgctttgggaacataaaataattatcaaatagtgttctaggttagcaggatatcattttttttcatgtggtggatgaacaatgtttagatatttaactaaaactaccctagaaagtacagggtagccattcttaaacttattgatctcaggatccctttacaatcttaaaaattatcaaggacccttaaaagcttttgtttatgttttgaatttttttctagaaagtaaagtatttcatctcaatgtagatttttttggtttgttttaaattttattagattaaaaaatactatctaatgataaataggttggtaaatagttaaatctcaatatttaccctattggaaattaaaacagatctttaaagaatgttgatttattaatgaatttaaaagtcatgatgataaacctgttacatctgtacataacctatttttaggaaaaataactatatttccccctaaaattagaagaatatggcattgtttacatttttacagctttcttgaatgtctatcttggtagaagacaatagagtttcatatctgcttctacattcagtttattgtgatatattgtttaagtacagttaacttataaagaaaatccacctcatacagatatgtaggaaggaaaagggaggtactttacttgcaggtaattgtaggtattcttttttgatattgtacccagacgcgacaagtagtagttaaaagctggtacaatgtggaatctgaaaccataccaatgaacttttcatactcttttacattaaaattcataggcctgtcttgcactttgttgaatggatcttttacccatgcttgattttgtaacatgctttggtcagttggaaaatactagttcattacattatgcagaacctacaaatattgacacaactatgacacaacctaagaaaaacccacattttgtttatatcaccatccatctcattggaaaagtctttaaatagtggggagctgtcaagctaacagtggcagatacaagtttctaaaatcctaatttttgcttgaaagctcaaattttatcattggcaataaataccgtcagttgtttcccttgaaatgacaagcttatttcatttacttttgagaaaatgtctgccagattcccaagtctaaataaccagtttgtcagtcattcaagtaaaaatggtgttccatgaataaaaaaatggctaattcagctcaacactcagattcttacgcatctggtggtgtagcagaaatgctttatacattcttctgattttgtcacatagaatattaaagttacgtactcaaggttgatattaggtgaaaataattattactgcttcatcaaggacattctttagtgcaactgacttctttcatttttttacttttatgccagtgcagggcagtctaagttgatttatgctaaggtgtcagcagttttacccatcattgctctgcaacatcagtgcaaatgttaacatagtgaaaaagacacataatgtcttagtattattatgaaaatagctttgaccccacagaccctccaccctgcaaacagatcttggaaagcactgctggtataagggatgtggagccagtaagtctaatggtgatggttctttctatgaaactgtgctttttctttcttgggctcttgaaaatgaggttaagatgcactgcatatgatgagaaagggtatatttgcataggcaagcagaggaaacagagcaaaagcctataacaaatgagctctgcatccatatatcagctgtttttccagaggttatagtaggcagttgtagaccctgataagacagccacattacaatcaaataatcataacatcagcctatttgtcactagatagtattttttaatctaataaaatttaaagcaagccaaaaaaatctaaattgagttgatgtattttactttctaaaaaaggattcaaaacagtttacaatgaaatgcatatatacttttgggataagaaatgtatggggacaatgaatacatatgcatttggggtattttatttaaaataagaattaagaaaaaccagtagctgaataaaggtagcctagaagaaggtgttaatagtggttatgcttggatcatggatgatttatttatttattttgcttatctctattttctgactttcagcaatgagtagatactgcttttgtaacaagaataataagaaaaaggttactttaaatgaaaaaaaaaatgagctgtaattgtatcagaaatccagagccagatagaggttactgtaagtgaaaaataaatgaattcagactttcctggactaaaagaattttagaattacacaatttgttataaactttaataaaaagccaagaatttgggttgtaaaggagaatttttatcatacagtgaataattcaatgggacaagaaggagctccatttcataacttcctaatacctagtactctttaggagtaggatcattttctaattcacagtcgcttctgaccaaccgaatctgacctatgaaaactttgtttttaacctatatacattcccttttgccataattgcctaattgcctgtaggtgatcgagtgtatacaagactgctcctgaaacaaaggagtgcttctcgagcagcagataacttttcagaaatgtctgcggtgcacagaaggcagtttcagggagaagggtacagtgtgcaagctgtgtgccctcggtccagtcattcagcacccacagtttacctcatcttctgtgaaatgaggaaactgaacaagattctatctaaggtttctttcccttctaagattttttttcctgactctatcaaatgagatctttgcttgagttcaagttttttcctcaacatcccaatcatgatattaacaaatatgtctatgtgaaaaattattttcacattttctgatttgtgtgtgtatgggtatttttttgtttttgtttttgttagagacagcgtcttgctctgtcacccaggccaggatgcagtggcatgatctttgctcactataaactcaaactgttaagcgatcctcctgccttggcctcccaaagcagatttgtgtttaaattattaattttaatgtcatagtacagaaatttactacaatccaatggtatttccttttgcttttgaagggtagtgataaccttttcatattaaaccttagaataatagaatgtcaaaggtgaaaattagattttgtggttgaacaactattgcttattttcttgcctttatatcacattaaccttcctggttgcttaattaataaattgttgcaaaactcccagttcctaaggtaataaacttgatacagcatactaatttttcattttttcccctgagaaatctggttatctcattgtcttccccaaatccttcttcaaagtgctatgggatagacttactcttcctactttgaaatacagagatgacactaagaattagaagcagtgtccagtttatgtgagtaacagagctgtaacaataggccccactttgccaaatttccataagagtaaacatgactctaactatgctatttcagtcatctttatcctgccattcattctgaagtttgtataatgctaaaaggcacatgcttatatctttttaaaaatatgtattttattgctgtaaaataatagtctattgaatagacagaacagtcctttagaagtataataaaatatagtaatataaaaatccttcatattaccagtagttctagatttataggcccctggggagctcactttcccttgctgtcataattgtgaatcttttgcccataccccttagattcgactctaacttttccaacccttcttccagcctttgtgacttgccacaggtcatgggagagaagagcgggtggggttccatttgtatgtatcctcccagtacttctatcttttacattttaccactaggactagccggtggtgtcctctgttcccccatgtcacctcttccatctcccactcgggcatcttgtgtgcaatgcccaaatagtgtgtaactttaggaacagaggagtgtgttaaaagctagaggtgaggaaggggaactgggagaggagaaagaagaccatatattttgggcagccctggttgcaattgtttctaaatcagcactaaaaagtttgcttaagatgttcttcagatacgatgctatgatagtgtagaacctactattctatgtgaaaatgttttcaaagtccacaaacagacagtattttaagtaaaattttagaaagcaatccacctgtaaattgaagattttaatgaaaataaaggaggagacactgtggcttagagttaaggcatatgcctaaagttaaaatcccagcttatgtactaactggatgtatgaaccttgacaagttattcaagctccataaattcatttttcatattcataaaatggtgatgataaaagtacttataattacctcatagaattgttggaggatttagttacataatggatataaatgcatataatgtgaacatttaagcaataaatattcacatttcctgagaaaaatatataatattaaataatgcctggacaggtggagatctaaatccaaactttatttcagagcttaacttttgattctgtgttttatattttaaagtacattataatttagtaaagctgttttctgagggtatttagtgagaaaggtgatcattatgtaagtgaaagattttttatatcatcttcctcttctccctggaagagatgataaaatcagtcctcggccttgatgtgaacatcgcataccttgagttggtgttaacaaattttcttcaaccttttttcaagcagtgtcagctaaatggtgccatttgcttatcactcttctttttggttatttatcctaaagataagaacattagtaagccgtaaatgcccattttgtaaaaactgcatagctagacagatttgcaatccctattagggtaataatccatctgttatggaactggatcaattttgtaaattaaatagattaaaaagggggaaaaagggccatgacttttcccacagtaagccttttctcaaatgctaaaaagatttgggaagactcaaactatttgccattcttcctctctttgcttaactcagagagaaggccaaatatctattaaaaagaggggtgggtgcagttgtttttttttttaattcttcagggtctgattgctcctggaagtttcatatttttgacagagtttattgttaaaaccttttgatgactaccagaacatttctgctgttctcactgatcagtttagtaaatgtgtgactatgtttgaattttcttctgcacttagctcactttactgttactttcatcctgtctgttcaaaaaaaaaaaaaaaaatctcctgatgattcttctaacaatgtgtgattggaataataacttcacatgttgaagagttttgtgctgcagctgagaggcatgtaaatacaagctgcttatttgcaagaagcttccaggtttgcaatatgattgctatggaaaccacataatgaaaaccttataaccatctgtgtggtttgatggattttactgcatagctgagctgtttttgtttactgttattaaaatgttgaatggaatatattaactcacaaacattgactacttgaggtattaattagtattgtacaatgacattgtgcctcaacaccaaaataatacatatttaataataaacctaaataaaaaaatatgtgaatgtatatatttctaatatattgtgaaggtgattattgcctagaattttggtcacttgttcttacatatttttaagagctttattctattaataaatgaatatgttaagatttatttgtatgatttttttaatccatttgtttattctgtatttatcgaacatctcctttgtgccaagttctattcaaggttcagtctgaggtttttttccctgcctaagattcaaaaacatacaccatatttgattttgttatcttttatatggaagctatttgtattgttagccaagataaaatgagttgtttaaatattgttaagaaaaattgatatattaaatgcataaagctttggtttaaaaatatcgctaccaggtttaaaatggaaaaaggaagtgtccttaatgagcatctcatcctctaaaatctgcttattaaatggcatcttacatggatttcaatttggatattttatagtaaacattaattcttaagtaaatacttttaatatcattattctgataatttaagagtgcatatttctaagaacaaagctctctgacaccaatatacaatccagagcacatgttactggcacttaagttttaataaaataaaaaattcatagtaacaaatacttctaaattcattgttaactttgtcaaagagcagagttttttcattaagtcttgtaatgaatttttatatgttcatgctgatttgggtggtgaaatctaaatcccacagtctcttttttttttttttttttttgagatggagcttcactcttgtcgcccagactggagtgcagtggcgcgatctcagctcattgcaacctccgcctcccaggttcaagcgattctccttcctcagtctcctgagtagctgagattacaagcgcctgccaccatgccatgctaatttttgtatttttagtagagacgtggttttgccatgttggccaggcttgtctcgaactcctgatctcaggtgatccacccgcctgggcctctcaaagtgctgggattacaggcgtgaccgaccatgcccagcccccacagtctcttcttaaaagccactaataatacttattgtattgatgcggttatagcttttgactgaggacgagtgcctttatccattttttaatttatttcttactattgaatttgtgactaaattaaaaggggagtgggtgctatggaaagaaagtgtgaaaagtaaggaaagctttctccttcaccttttaccaaattatctgtcaataaaatgagtaggttggaataatgactgtaaacgttccttctacctttaaaaatttatatggaaacaccctattaacccatttattaaagctagcctttaaggtttggcataagtgagataactattgttaaaaagaaaagagacaggatactttttaaaagagtggtatacttttattaggtcttctatatatttgactgaaccatattaaattgtcagtgttatgtttaacaatatgaataaaatgccagatattttcaggtgtcccttatattggagttgtcattattttgtttgaattgagttacagaaattcagaacagttctatttgtcgtgtaagtacagctaccctctcaagcttggttgaaatgctgattttgattcatccccatttaacattttcaggagactcctaaatttccacctgtagtcctgactgctctaccatactttgcagttgcccagacatgttctctgggttgcctcaccaatacattaaattcctcctgttgaaaacacaactctttgtgttccccagtaagatagattattttggctatcctccttttagtaataatatgtccatttctcagttaactaagctcaaaaccttagccatcctttgttgctcttttcccccccctcattcctccacattcaggcacaaagcttatccattctagttcctttacctcttataaccatctcctttccatttcctttgccccttcagttcaggacttccttcccctttatccacagtagtctctctcccgccccttttttaggctgtctgagacaatgggatcagatgtccattcctgaagcatagcttcagtcctgccctttctctgctcaaaaaaccttcgaaggctcttattgcccaccaaataaaagcctgcagtccataacaagatgttcatggcccctcaacagctggtccaaactatgagcgtaactcctacccagctcttcccctatgtgtaccagattctttagtcaaaatgaatatgaacatgcctttttcttttaaagatcatacctatccctccggaaatatccttcttatcctctctccttatttaaactctctccatcccttggagcctccgtggtactccctagttggggggtttctctgctgcacttcttcagtgctttgtgcatcacttgtcaggtttaggccccttcagcctgttttcctttagagcttgtcttctgtcccatctgtgctgtcagcttcctgtgagcagaggcttcctgttacttttacctccttggtagatctcttctgtctcacagttagttaatatccaatgaagattgattgactgattgattgaatagttacaatgactacatttatatattttgcatatttttctttaaagttttaggagttttcttgaaattatgattctctttgaatccagtttttctttggcatgccatttgtttatatgtcctgccttaagtatttctaggtttgtatgcaaatccttaggtgaggaaaaatcatgtaataaatatttttcttggtgtaaatgaattagtttattaagtctatttaaagctcttctcatttatttttatcttatttctttgcataatttggggaaggaatggtataggtgagtgtggaacaaatgtaaatggagcactgattatatgtaggataaagaacattgactttataatcacaaacttaagttcgaatgacacactttggaagttacttcacctttttgagtctctaaagataaacttgtctgtagaatgaggattaaaaattatttgtctatgagattttaacatccagcattgtatatgacacataataggtccttggtataattttgggggaattacctcaaaggatgaagatcattatagtatcttcctgtgaagattgagaaaacgtatgaaattatgtgatactcaaaaaaatgatttataggttaactgcatttttaatcacacatttctccttgctatatgatgttttagggaccatgattttatatatgatactcctgccacacagtacaatgtggtgtatcagtataacgctgggtgttactttactggatttaagggttttcctgaaattaagattgttccagatgagtttctaaaagtatttaaaacaaaacatgcagtgcattagtacatatcttaaattttgccaagccagttggaaaggttgctatttggaagtagctagtattttattggaaagttggaaagtttgctatgtggaaagttggaaaggttgctatttggcagtagctagtattttatttattcagtgttagattgtcgaaaaaggactgtgaatcttgagttattttattctttgaaaaataatgtttatgtgttataaacttttagttttgcttttaaaattgagtgagtactgtagtgttatccctgagaaaacccttcaatgtgccattgataatgtttatttacagaagaagaagaggacagtgctccagtgaaagtggaagaacaaaggaagatgagtcaggatagtgtccatcacacctcaggtaatgacttgtgtagcttcttggcaaaccttattttgcttttgttcactttcattttatccatgttcttactgttctaaagatgtttacacagctccccaaagttggcatttttggcttggatatcttatggctgataagctgcttagtcccatttaggatgcatgaaaaccacttgagaaggatttataaagtaagccaatttatacaaggtattccttcctgaattactttgtaatgactcaattagctttcatttctgcacaaaggagatttagttgcataaattagcttatcatcattgaggaagtgtcactgctaaaggacagtttatagatacaacatgcagttgctgtcaaacctataagaatgtaatatagacatctgtgtatactttgtgcttgagcagaacagacttctgccattcagagactaacaggggacaacaagttgcccaggggactggcaatgtagacatctctgaaaaggtcaacttgacacaggctctgacagtcgacccacagctctgtcttctttgataaaaatcagataaacttaagactgctaattgatctgcagcctgtttaaatgttggccatgcatatcttcattgcatatgattaacacagaaagcaaatgaattgggtaagaaatgccagagtccagtgacagcagcttaaaaattggaaaaggacactggtggcctaaaaggctaggaaggatgttccccttatccatttccacttggcacatatccccaagtactaattatgaatgagactggaaaaataattgcacacactctgtacaaaatcacatgatacggacaacttttcttgcttgttgttatttccaaatagcaggagataaaccatatctgtagtgcaagcatgaggttagttttgataaaccagcaattattttacacggaaagaagagaaagactgccttcttatcaggactttacacctcttcatagccacatgtcagctggggcaaggtctgccatatcatctctgtgtcttgcaaaaagctagagttagggtcaccttcccctctctgatatgtccatacatcactctttcaagctgtcaaggccgggtggacaagaagtgtgtgttcaggaagtagctttccagagtccttcctactgtgacatgtggaaaggaaacagaggcctgattctagacctggacaggaaagcagaagtaggttgctacaaaaggttttggttagtgttttttcagaaaggaagcgagaacaaaatctttacatgttagcactctagtcctataaaatgaagctataaaacactgaggcttagtgaaaccttgaggactatgttcaatagtagtttaagtatatatgttttcggtttatgtatcatgaaacttctgccaaaaatatgtagttttctttttaagaaaatttcagtgcaggtatagaaagtggatacatacagatggttcttccacagatacaaatattttggcttaaagcaattgtatttttcaaaagcccttttaaagtaaacatctcccaaatttttgcctttgagggtaggaaaaaaaatcagttttcctcaaaggaatgcatcaaatagatctagcctttcatgcaatggctataaaacactacaataattcttatctttagtgacatgaaattcttttcaagcaacagttttaatgcttttgcatagaagtgacctttgctcttccctaggctgtcaaagatgtaacactagaagtttgtttgccatgcagggcagtgagttgacaagggtattactatcttgctgagcatcacatgacatgaacttctaaccttactcaagaatgttatatatatttcacattgactgattttactaaaccccccaccacagacttttctaatgtaaagtatgtaagcaaaaacaaaattaatcttgtgtttcttacaagttccttcatgttcaaacttatatatcttgcagatatgtggatgagtatatatataaaataaagattccatttgattttttttgaacattatagaatatatttacctttctaaaatagtttttaaaccttttaacaccaaaggagagattctccactatcttattctcatatgtttcacccgtggtcatcatgtttttcatctttgcaaagtatctcctctgtctacatgtttcataacaattctgttagctttgcccaatgatctcttcttgtatgtttttaaaagcaggagtaaaaacattgttttaatctttcacaggctggctaattaatttttttctttcttacctttttttaatcattcatgcttctcaggacaagaaacataatgtagtttttttttgtaatttttaaaatatagatcatgatgtggatagaataggaaaattaatccatgtagtaaagccaactaaacatacttaatttgtgctttaaaatgtatgtttatgatatttgcctcatcccatctttaaaaatacatatctcaactggattatttttcagtgtttaggggtgaacagtgttaacttttgcacacctgcgcttttgaggctgtcggtgcttaattttttgtgtatgtttagctacactttaaattttaaaaagtaagctagaggagattgctgccctttaaggaacaagactcttcctgatttttgtgtccagatttcatatcaagaattcaaacattacttccctgagactaaggctaataaacatatactgccagggttttttttccccctacttacgattttttctgctttatagctagtattgcatgctgaaatagatagactagtaaatcatacatgtatgtagctgtgtgacataaacaaattattctttaacagagctctcatacgggacacaaaaatgaggttggtctttgggtaacatcatcatcaagattatagaaagcacagttgaaaatgcatctttttcccatattgccaaatcactagctctgttgcctctttacagcagtgagatttaatgaaatgctcatgatgcacatctagggagagatgcatcttgcacacggtgggggtctctcttcccctcatgtgctcctgtaactcccattagtgttaatgggagtttcagcaagcgtatcgaggggaagagagaccccaaagtgataaggattatgtgttagaaatcaccatatacttttcttttccttctttctctcccctcccctttgagaatctattgaataaaaactattgtaagagaatctgaaaaaaaggaagagcagcctggacagctggggaacgcaatgggacaacatagctaagccaaaacctctactctagtttttagtccaagttttgtttcttccacttttttggagcaagcctaaggctgagcagcatggggaacgcagactaaagaaaccagccatttagatccttttacctcctggccagttactgtgggcgagggcctcgcatgttactgtgggggaaggccttgcatgtgaaatgatgtcatcctctctttgctctaattccctgacttttaaactgacactgacagactgcaaggggcacaacatttgacccatttaccaactgatttaatctgactagaatgtttcaacttctaaatctctatttgtctaaataagtggtttttaaaggaaatcagtcactttattattaagtgatttttttcttttaaaattgacaatgtttgaagtgatctggccagctgcagtgccctctagtgtccatttttataatttacttaatatatgctttggggaaaaaaatgtaatgaagagtggccacaagcattgttagttcttggttggattcccaaccttgtgtacatccctgcaggtacgtgatgagtgctcagatgctagtgtggagaagtcaataaggtatctgtctctcccactgcctcctcctttctcttcctccttctctctccactcccattgtcccttgtttttttaattcttagaaaacaagagacaaaatttaatagagggattttactaggttgtatattttctagtccatctttattttcttataagcaaaaagtagcattctatttgctaaatattcagactccatattattcagattctcttttttttggctttaaaatatttcttatattaaagagaattttaaaattttctagtaaacctaacactttgtataaatcacaaaaaatgtgtaataagatgaacaccctaatgacatgctaatctgactagttgtgttggaatcaccaaaaagcctgctgtttgagagccatgtaacaatactgagatgacaaccctggtccagcctgtgtctccacagttatcccctcagaattcaaagatgacattccagtgatggaagttgttagcacgtatatattctgcctggctagtgaacacacggacatcttattgatattacttgcattctttttgtgttaactcatcaaaactcaattatcatgaaattgaaaacaggaaacagttcttagtgtaacaaaagcatctagtgtgtttagctgtgttccgtgtttcaggagatctgcactgtataagtgacaaagcatttattacccatttattgtggtcttacagagtggaaagtgctaaataatcaatcagttaatggtctgtatggcagtttgagcacatcacatccattgtgcttatgctgttagaaggatgagctgatactccagtgtatgttgcatgtttatttagagcctaatgtcctaaaccggggctgacaaaaatcggttgaaaaatgcagcttcaacactggcaatttcaaagttgctaaaaattttcaaagataactttggctttgggtacaaatgtccctaaagaaa[450 bp omitted]ctcaggacataatttttttagactattttagtgatctagggcatcatttaatttctactggttaattttgaaatgaggggttattacatgaaggccctaattcatgctttctctttcttcttcctaggggataagagcactgattatgctaatttttaccagggattgtgggattgtactggagctttttctgatgagttgtcatttaagcgtggtgatgtgatttacattcttagcaaggtaagaagataccccaaaatgacgtttgtaaagagggaatacaaagctcgatttttaatgcatttggatttacagcgctagggaagaatgccaattggaattcttctaggtccttgttaacaattgggagttcacaataattaattattttgtcaagtgaaatgtaatcaaattttaaacacaatcagataacaggattcaacttaacagtgtgtttacctatcacttcagcccttggctgacatccacctactgccttctccagaaacaatatacttatgtgaaagttaacattgtaaggtattagattatttattatgcttttctttcctcttcctttttattcttctgtgtgcttattctgattttgtctgccattcactactggaaacactatgtttatagaacaagtttttcatctttatgtaaatatgttgggtgttccggcaatttaaaagcaatgcttttctattcagacaggcttaggtaattttttaagttgtttagcatactatatttgtaaacaaaatggcaaagtataattctataaacccatcttcatatatatatatgtatatgtgtgtgtgtatatacataaattcttgtgtctgcttcttaaaatactggattattcagaatctttttgtccttagatctaaaagtcaagtttcttattgtgattatacttttggtaatgtatgtgagctcccttaattttcatattttaatttcccctatcgtaatatggggatttaaaaatttccctctgtctacttacaagactactttagaaacaaatgatgtaggaaaacagttgaaatataagtagaaaaatgttaaatcataagtctaggaggttgatgtggtttctttcttgattagagaaatattttggacttttcagagagatagtatgacttgttagaggcagaagacaatttggaaagaaggccacatactgaattttaacagtagatggctggtgcataaaatcataacacagagaatcatcgaacattagagtgatgagtctcaatgatgataatctaattcttggttttatagataaaggaacttgggtcaagaaaatgccagagtcatgatttgagctgtgtcttgactcccagaccagtgcttttccctttgttttctttcctgtgctccttctttccttccttccttccttccttccttccttccttccatccatccatcataaagcacctgcagtgtgccaggacccactctgacaactgtgataaaataaataaagccaactgtgataattgctagttagggtgcccaaagctaaggctggtcacttatttctctcagtcttctgctcattagcatgggtttttgttactgttgttcccagaaagatgttttaagttcttggacgctatagatagtcacatcacaactcttgattaagcctgttattaagcattaaattgtcctgagttaagataacagctttttggttaactacttaataaagaaatcaaactgattagtttcagctcctgtcaagaaactttcttggaatcattcctaaatttatatagctcacagtctttttaaaaccaatttagctgcaattgtgtataaaactaaaacgttgattagatttcacttgcaagttcagattataggagtgagtggcatatagctattatactccttttgtaaatatgaaatttataaagcccatgtggatctatttgtaaaaccctctttatgaatcaggttgtctttgttgctgaaagcctgggtagagcaccggcttccagaactggctgtgaaacaagccaccataggcatctcttgtttctactgttgcctcaggaaataattttcagttaacatgaaattaaaagtataatcataggtgtgtatcatacttttaggattccgaaggaggcagttcctgttttgtggagactaattttatttgtgaagcctgattagagaacaaaggttaaaggtgttccagcccatgggaagcacatacttccatctaacatttttaaatgctattatttgggagagagctgatcgaaagtacttcctctgccagtgttttgcaaggcttgaagtttcaccatcatgatcatatttattaagggccttctagagatgtgtaatttacctggggttcattttggagtttgaaaaaagagccaagaaagaagaccctgttagccagcatgttattacctttggctgaataaggttcagtgttcatcgttactcagctgtggacctagtggaatcaacctggtaaatcttggtgaggataaaaaggagaagacatttagctttccttgatgagatttggacatattttgggctattgatgggtgtcttggctgcgagtagacaggttgctttgggttgagtatatgtttgtctttgaagacttacttccttaccttccttcagacaaattcagctaggaatctcttgagactttctagtagtctttattgacttggccttccagttttattgaaactttggcaaactcagactgtaagttaataccataaattcatttaatatgtgaataactgcaattttgaatgcttgatattattacaaattaagtacaattagtatagaaaccactagcatttttaggtgcctcgcagtgtgtttaattgagtttctcagagttatattaagattttgtggtgatgggatgaaattttacctttctgtttttttttacgccatctagtgactcagaatgagtggtgcaggtaattgcagctgttgtacacaatcaaaatggtgtcataaattcaactttaaatccagctatgggttattactttcctattccatgtcaataaaatattagcattaatcatgaaaaactttgttcatcattctgaattaaatatagaaattgtatatataaggaagaatacattttaaggattctaaaatagtatttgtagagatacaggaaatgtgtactttgtaaagaaattaatgccatgacttgtctgttaataataaataagaccatttaaaagattttaaagatatgcagctttcttttagtaatggactcatttataatttgaaataccaaattatcactgtttgatttaccttctaaaagtgtgtcagttctgaaaatattctttaaaaaggcaacataaaatagtttaagaaaagatgcatactttcaatataaataaacatttaggcaaaacaagaaataaaatcccatgcattataatgaagagtgttttaattttgttttttgtttgtttgtttgttttgagatggagtctcactctgttgcccaggctggagtgcaatggcacgatctcggctcaccgcaaccgctgcctcccaggtttaagcgattctcctgcctcagcctcccaagtagctgagagtgtgccaccacacccagctaatttttgcatttttagtagagatggggtttcactgttctctggtcaggctggtctcgaactcctgacctcaggtgatctgcccgcctcggcctcccaaagtgctgggattagaggcatgagccactgcacccggcaagtgttttaattttgtaaatgtaatggcagaaaaacatttaactagcttggggattaggttgttttcatttaaaaatcactacagaaatatagttttatttaaaaattcaatatattattttctgttttgcaagaaagccttgatggaatgttagctgtgctcagtcaacctgggggtgatttatttattttaggcctcttttgaaagttatacaaatctaagcctttatttttttttttcttctggtgcaaatcaaatgttgcaataaagaaagaagagtaggcagatactgtgcccttcctccttccctttttaacattttccaattagcagctatcatgtgacccctggctgagatagcccctccttcaaagtgtccagcatttccttaggtttcacctttgaacctcactaataataaatctaaacaccgcctgccttaaaaggcaagccagtactttttgctttatacttctattcacatagggttgctgctgtttttttatgtgttaaaattaaaagcttcagtagttcagtggagatttggaaatctcttttttctcttaaaaaatggatcaaatttataatgactgatgaaagcagaatttgtgattttaatgacagttgtattgttagtgaattaacaattggtttcagattcatttgatgggggaaaatcatatttgagatagaaaacctgtatttccttaagaaattgggttgtttaaaataatgctaaatatttttgttagttttcatttcatttttattaccactaaataaaacaggaacataatattatagctaacagtattttcctagaaccatgtttttgaaattttatcattttaatagcaggatccagattatatagcaataggtatattctgaggtcccaaatgcctttttggttatgttattctatcttgctcttctggatttctatcctctattagtttatctttcaatctgtactcatcattaatttgcaaaccacattgctatacttacttttaaagcaataaactatttttagagatttaataacagacaagctatacttcagaaaagaggcacagtactttgatattaaaagaaaaatgagagttaagaattctggaatattttatctagtctagggcatatgcgactagctttgcagcctttgagaaactttttattaagtcaaacacaggaaatgtaggttaagactgtggtcaccaatataaaataaaagggtactttttggtgtatattggttggagtttcaagcagtacctccctttatatctgtttggttgactttttccagtgattggtgaattgtgactgtcattgaccatttgcttctcattgtaagaatgtaaaggttaagttactatggctttttttggcttcaaacctatgttaataaatgaaatgaaagtcttgttgagctttattggcagagggaaataagttactttttagctgtcttagtttttcatttgtaaccgtatgacccagtatgccacaaatagcgtggccaactgctgcagagtaactaggatatctgaatgtgggacatgcattgttgacactaagctagctccaaaatgttatattttatagccttttgataagaagaagtgtttgtatttgtgcttgcatttgtttgctccgatgacatttagtttgtatgctgtcagtatggatgtatggtctagagtacactggaagcattaaccaggccaacctcctatttagtacccatctcctcctaggagtgaaaagcagtttatggacacaacaccatgtcagaaaatgttctagttctactcataggactcctcttgttatctgtttgtgaacaatatgcttaagtacttccctactttctcttacataaattggaggaaacattccagaaaaatgttggcagatgaaagcaaaaggtgcttataggaggcaggctggcagctgcagcccttgcaatggcctgacaggtagaggaaaagccagaaggcagtgtcagagaggcaaggtgagcagaggtggcagtggagggggctgctttggaaaggagcccacctgtaaggcctatgtgatttacttcagcatgaataactaagagtttggcagcagcaaaacaaaaccttaaagaaaagcactacgttgatattttttttaattctcagttgaacaattcatgatttcagccttgaaaatgaggaactccctcagtgtgtatagcatactttcactcttttgagatgtcttcttcctcatccctttagaacatggagctagatattccagggaaatcattaggcatagagactagagatagactactgattaagaaaagttttagagtcgatatttagtaaattatagataagtgacagatgttcattgagtattcagctatcaaggaacaaccagcatgccaggtattgtggctcactcctgtaatcccagcactttgggaggccgaggcaggaggatcacttgaagtcaggagttcgagaccaacctggccaacatggtgaaaccccgtctctactaaaaatagaaaaattacctgggcgtggtggtgcgcacctgtagtcccagctacttgggaagctgaggcaggagaatcacttgaacccgggaagtagaggttgcagtgagctgagattgtaccactgcactccagcctggtgacagagcatgactccatctcaaaaaaaaaaaaaaaaagaacaaccagttaaaattgtaataaaatgttatattcctcaaatacttgttctctttgggagaagataagattctctttggaagagcagggtggagacctgctcataataatcagattgccttatagtgcgtcccaaagtactctgtttttttgttgttgccataatactttgctataccaattagtgggcagggagtgggggagggaatgaaaaagtgtttattgagcatttacaatgtcctgttctaggtacttaatatgctttcacacatataattaatataataaccctgtgaagtagatgatgttataattttacagattaggaaactgatgtgcagtaaggttattatggaaattatctgaggatacgcagctattaagtgccttctccaggtatcaatacaggtctgaccctaaagccttttctctttctactttgctacggttaagtgggacttgattaggactttaacttttcttctatatcagaggttaattgtaattatcacatcccagttctaaacaacagcaaaccatgttattgacagtatcttttacataattaaatcttgtatagatggtcaaaattatttcattttctaatcaacaaatatttggtgaacactcatgcaaagtactattttgagcaggatccagaaaagccacaaactgttattcaaggagactgcaattaagtcgaagagaagaccaatgcataaaatagataatagcaataaaacacaatgtagggtatcagtgttgtagtcctggagaatcccagaagaaagggaagtcagtaaatactggagtaagtaagtaatgaaagattcataggaaatggaacttgaactggaactttatgtataaatggagtttattcatttaacaaatatgaatgcttattttctgtgtctattacatataaaacctagaagaacggctgtgctatggaaaggggtggatggctatattgatgaaaggggagcatagagccaatagacatcagtcattcaggatcacttctttttttttttttttttttttattgagacagagtcttgctctgtcacccaggctggggtgcagtgatgcaatttcagctcactgcaacctctgcctcccgggttcaagcatttctcctgcctcagcctcccaagtagctgggattacaggctcctgccaccatgcccggctaattttttgtatttttagtagacatagggtttcaccatgttggccaggctggtcttgaactcctgacttcaggtgatcctcccgcctcggcctcccaaagtgctgggattacaggcatgagccatcacttctctttccttaccttggagaatggtaggcagccagagaaaccctgtgagaaaccaaatcaacctgatgtttccaagctagtttttctacagcagcttacaccacttttcccttatcttcgcctgtaccttgtgtgttaaccacactctcaactacttactcttcactgaacacagcacattcttttatctctgcaggccttcacgcctgccatgtattgctcctttcattattccttctggagtctcagcccagctgtcactttctatgtaaagtgtctcagatcctgctgtaggattagttgcttctctttttacaaactttttccctctcttacctaacattcaatataatgattacctgtttctctggctttctgtctaaactttgaacttcttgaggtagacactgtgtcttaaatatttttgtatcccaatatgttaacagtatggcagatagatgtttactatgcttttaccaaaatacagttaacaacaggaaataatcctgacttcttaaaagaacttagaatgataggatcatagagtgagggggaccttagtgctagcccttcactttataggtaaagaaatcgaggctcaacataataagggaaaaagaaataaaagcccaaaggaaaaatggaccactcctacagagacctccaaagacaatggtgtttctgaggttgtacttccaccttggccctgaacttcttggcagccaaaccaaaaaagggagagatgggagctagtaatttcttttaatcataaaggaaggatcttggcttttcccagcactggctacttaaatattcttacatgaatttctagactctgccctgaatatctggcctcaacaactttacataaataagtgcataagtggcaggtattggcctcaacaaaaacttttcatagtaaatataataaaagattttataaagggaattctgtgagggtccaaatgtataataattagacttattgatatatattaagtacctaagtgcactattgtagagtctcaatgaagaatataaatataaacaaaaaagataaggagctgaaaaaaccaggagattttccattctacctgtcatactattttttgcctttgcaaaattctgtcttaacttctttcagtgcttacaagtaagttaaactgaattcattttttccaagaactggaattagttggtccctgttccaatgtggacaaataccttctttctgcacatgggatttaagctttttagacaaggcacatcccatgtagtacatttgaaaacatggtggcaacagcctgccacaggtgggaacagcatgctccttcagatcgcccactcagctacatgtgaatgcttcagaacaaatgcttgtttcgtcactactacaattctttaactatgcctaatatacacaaaagaaaatacattactattggaaattacatttcttaagaaaatatttaggatagtcaactggtgcatcatccaaaatgaagacttagtctatttaatcatctagtacctacttatggaacatcttttatatctcctgcagtgggaggcatacagattaagtgtaagtccttcctctgatcttaatgagtttgtactttattttagttgaaggaataaaactaatgtacgtaaaatctactgaggaataaatgcttagcttgaaatgagagatataaatatggattagctaattcagagaaaaaatcatgacagctgagtcaggtcttagtcattggacaggatttggctgagggagaggagatgtctctgggaaggaagcactacatacagaggtagaatgagtgtagtgcggcaggttgtattgtgccagctagaacagtgacaggaaaaggttgccagcagggtgggaacaagctaaagtctacagttaatgcagtggagagttagtgtaagtttttgagcagcagggtaaactgatgaaaagagttcccgggaagaacagagaggcaccattgataatgcagtaatccagggcaaggtgatgaaggcctgaattagtggtgccagtgagaataaagtggaatgggtgaacctgagaacagttaatagagtcatgtaggtaaaataccatacactgaataccaaagtcactctctactgagcatgacatgatcttctttgcctaacattatctgcgaatcaccagtctgaatgtcaggttttactctatggtattgtaactgtcaactttgtagaaattggaattaactatagcatgactcagggatataaactaaaatttcttatgagaattcttactgtcagcttccttgtttttgtctctcttgctttaaaaatggagtatacaatgcaaggaggaaaaacagtaattctttgaattagaggaactcaaagtcacacctgcaaagtaaattgcaaagtaatgagattgatctccgtacaccactagagaacttagtgtcttcaatcaggttcctgaatggtggtgctcaaacatcatggaggtccttagagattgtgtcagtttcctcatttaacaggttaggaatctaagattcaagtagttaatgtatagatagtaatagtaaaacgccgaggttgtacagttcctgttgtgcatttataaagataaccttttgaaacaatgaatgtatgagaaatgagaggattcttacaaagtttctaatcggagttaataaaaaagagactaaagaggtagccttgatgaaagtatttatacactttaaataggtatctagttttcatagtattacagtgtttatgaataaagatatcacaatgaagaatacttggaaaacaacagtcaagtccattggttcttaaacttgctgtattttatgttttgtgaataaaattactttcattttcacaaaaggctggtgtgttttgaagcacagatatatgtttggaaaaggacacaaattttttttaacattgcaaacacctgttgctttcaaacacatcggtaactaatttctgaaagggttagtacattattaaatcttttaatgtttcaggtttctgttaagtcagcattcttttaccatatcattcgcagaaagcggattaacatactcgataaatgacagtcatggtgctgaaaaagatttaagtaaatgttggggccttatttaagtgtaaaataatattccagcagagaaagaagatttagttaatgagtaaatattactattatgttggataaagtctctgtttcactttatcataactagtcctttttcctgccttcttacccagtcactcttactgctcaataaatattaattggggactaaaatttcaactacaaaataaaacaaataaaatgactataatggtatgaaaattgaaaacatgggagttagatcacaagcattcactaccgccttactattattttctcggattactgggcaagtttggcttttttttgcttctttgattgccacactacattttgccttgaagccatccattttgcagatattgaatttcttttgagtactatttttatacaataagcatcactacacctctggatcttgatagcattactgcaggaggagaaagcagctttgtgttagtaattacctaacattgtcagaagctgactgcaggcctctttctagtgataacagaataaccgcataatgtagctttatagcacatgattaatagaaaataattacacgtcctacaaagggatgcaatatttcttataaattgactagaatggtttcctgtagattaaaggactcttcattattttatcagtcctcctgaagtacagtcacttgcctatgttagcatttcagctgatgttaagagctgaataggtgaaggataccagatggcagacctccttgtacctgaaaccttgtgttccataaagattacatgatgcttcctaacatttcaaagatttagacaacagcctggtatggattgtctattttttgtttgctaagaagataaagtttgagagttttcctttttgttttttaaatgatccacttgtgactttatagaacaatactataattagtttgtggactgcaaaacaacattgtatcagttgcattattttccactgtaagtaatatatcattcataatcacatttgtttgggggtggaaaagaggaaaggcatagacaggcagattttctttttcagaaggaaaccttgtacaatattgaatgttcaggccaaagtttagaatactgtactccaagaagcattttcattccaatttataggctgcaaatggtttaattgggattcatgttgctcaggaggctcatacagagaatagtaatgataaaagtaaaaagctcctgtatttgcagtcttgtcaacactctaatggctgcagtgtaaatccataaatttgcctcctgtatttttacctcactatatttgatcataatgcattaatttcaaacaggaatataatttgcaattctttacaaatataaggtaatattctggtttttagttttaccttttctgatttaaatctgatattttagagtatttttatcaagtgtatgtttcctatgtttttcaattattttaaattaagtgaagcatttaagattattttagtctaaaccttttttctccctagagtataacttttaagggatttgtttatagttgattaagctcctccctgctgtttaccactatgctttctagttaataaatcttcctgttctaccatagcacagaattctctcaactgtgaagtctgcccttgttgatgtgatttcttgggaactaatttcttaaatttgggtgtgagtaactttttgaaaatgataacatgcctttagttgatagcatagactatgaccaaagtagaatattataaagtaataactttctggcttgtaatttgaatctaagcattgacccccagattgagggccattctctggaagcaagtttatgccaataatatgtcttctcactgaatgttttctatgtctgtcactggggagcagggggctagttccttttctcattccaaataatcagtttcaaaaatcttatattggcattgaataagagctttaacactcagacctaccctgttaattatccactttgaaatcttacagtagtctgtggaacgttaagtacgtgtgtttttttaagcattaggctttaattgtattcattgccttaaaaatagaaaagggtagttttattaggtacctattaagatataatcgttgctaatcatgactttcagtaagttagtattttcttctgataaatatgtcctacatagattatagccatcattgggttctgggcatcagagtatcctcgttccttatacagcttcgtccactaagttcacactatcaatgaactttaaaagtttaaaacttaaaatcttgagtttactgcctcacaagccagagctgtgccctcaatagaataacaatagcaggagtggtcttttctcccctctccccctccactttgttcttccaataaacctaatcctgatactgcccactgtttgaaaaagtgcctatggattttatcctataatctctctattgatagactacatatcaatacatacacgctaatgtaatgctacatttgtattaaagaattgcataattttcctttctgatggtcaatagcatactaatcaatacaaatattaagtctgtactagtattaacattccctccccacatataactcaatatacatatgcacatttatctatgactcagatgctggaaaatcataacctattaaattacttttgggattgattttgaaaatttatcttatatgaaaaattaaatttgagcactacaatgcttgtgaagagtattgcttttggaagatattattcttgaaacttgaaattcattttactttgtttgtatctcactacacataaataaatttgagataaaaatacattagtcaatctggcagacatatgagaccggttatggagtattcacaatgcctaaagcagtggtgtatctgtcaaaggaggaaaaagtgggagaaaaggaggtataggtttgtttatctcaagttgcaaagtaaatgcaaaagtgactcatcgaccactctgttttagaggtagattaatattttgcctttataccttgagatacttttatttcctattgatcttccactataagggtgactctaacagcacctttaaattccttctacctattctttatctaaggtagtttatggtcaataataaaggaataataaatgccttagggaaactattttaaaggaacctatttgtgaattattttttaagcagttttttggtattattagtgtttccgtattctctaatttatctgttaaagtgtgtatattagattttcttaagaaggggcacacatctatcaacattctaaatcattttaggtcatataagtttaagaaataagtagtttattgtaaaaaaaattattttatccttgctagatgataagcttcttgaaggcaaatataatagcttaaggatcctggctttaaccttctatagcctcttacacatgaaaggtatccccaggctctgtggagagagagagtgtccccgagagaaggcttcctgaggtagtttcattttctaggttttcatcatgagtgattgtttctgtgttctgtgcccaataataaacaggctttgtgttataccttaatttaaatcgttgcctaacagcattttaaagtgtccagaaacaaaaagatgaaaatgtttacatttgcagctcaagctcttttaactttataaatagaaataacatttctaagaagttgcatacaaacgacattgtacttacaccagtctaaaggttaatattgcatattgttttcaattaggaatacaatagatatggctggtgggtaggagaaatgaagggagccattggcttggtgcctaaagcctacataatggagatgtatgatatttgagagtcctgggtaagtacattttaatccaatattctgtaatagctcatatgttctcttggtctcttcgttatgagtctttgcctttttaaaagtctttagagttttctgataacacaaagattgtgccccgaaatcttttttgttttgtttgatctggtttaatttttaaaataagaatttttaaaataaaaactttatggaatttactttggaaatgaatagattatttagagaaagttcttttgatagtaaccagctgttttcccaaacttcctccttttcagtaaaataccactttttatggcctttctgaagagttgaattgacaaaatgttgagtaaaaatacatttttccttggctaaaagtgtaatttttttaagcaggaaaaatcaagtttcagctgaatcaaaaattaaaatgcagctttccctttctcctgcagaaaaggaaaattcttctgcttgtctgcaaatgctttggatttagaagcgtcatgaaagcacgagtgacagctcctaacctctccttgttttattaaacattacttatctttgactgttattttatgcagtcgctcattaaaatattcctctgatgtgaaattaaatgaaggatattaatgtaaattagatgcaaccagttaagttatacctgttgctattttgcaaagaaataattatagtttttatttacccatttgatttgtgtgaagaattcatcactattttatacgtaacatatagtctactatagcatagtatgctactattgctacttctggtgtgatttgtaatgtttcttaatcattggacatcaattatttttagagagtaatgtataatttcatagcattttaaatttagtgtatcatgcgagttttttttggtagatgctgaagaatgtggttgctaaacaaagaatgctaaagaatgttcaaactttatagataactttattgttattatttattttcacacatttaattcctattaagtacagccgcaagaaagaaaaaatgatgaagttgcaaatggcagtgtgctgtcacctgcaacagaagtgcgtaccagaagtatgactcatgcaaagcattttaccgtacaaatatcctggtgcgatgatgggcctggcaacattttctactgtacttttgtttaaatttaatgaaacaaaaaattcctaagaaataccaccctaccactaacaaaatggtataaagaatctcccagccaggccaacatggtgaaaccctgtctctactaaaaattagccaagtgtggtaatgttcacctgcagtcccagctacttgggaggccaaggcacgagaattgcttgaacaaggtaggcagaggttgcagtgagccaagatcgcgccactgcactccagcctgggcgacagagtgagactccatctcagaaaaaaaaaaaaaaaaaaaacagaatctcagtgtattctcaaagtaaaaaggcataaccaagcactctcttatcttgccttattgctatactatttacatcccactgcagaacagcagatttgaggcttttctatatacttctcagagcactgaaaagaaaggaagggtttgcagaggagagtgtagaaatcccagtggtagcatgtaccaacaggtgagtagaaaggtagtgttagcctgacatttgagttatactctgtgctgcctgagcaagatttgtagaatcatataattaccttttcatgtatatttgaaatcagaggtgtttaaaatacctatgagataccaatgtagccttaacatatgtcaaaatgcattgctggttagataattatttggactacacataaactcctaatattgaatcattacctatcaggtattatctttatggaacttttcaatatctttgctttataaagattctaaacatgtatctgagctggtaatattttaaaatctccattatttgtgtaaaactgtttataagcagtgtttgagagggtctgctttaccattaccccctcaatatcatgatcatccaatctcaaatgtgaaaaaaaaaaagaaatttgattttaggtattgtgagtaaacaagtttatatagagagacattgtgaagttaaagttttcagaagttacatttgtgcagttcttaccttttcctcatatagtgccattgaaatagactgaaattatcttggcaaaagttagacaaccaaagacgactttagtggactggttttcaaaacttgagcagctgaaaagcaaaagccgttgtttcccatgacaatgtagcctttgtggatttgggtttgtgctttgggttgaaaagaagtttttagtcctaggccagtagatggcagcagcttttcattgcagacaaaacctcttgaaacccttcccccatggcacaaactcgcccatgatggaaagcatctagatttctgcctccttttacagttaatccaggagagggagtcctttgccaactgatgaccaacagttccaagccagatagtctcgtgaacagtgacaatacagaaataaggtgttatttctgttcagatctccaccggcctttgttcttttaaaacttgaatataggtgggagacataagaaaggaaagaaaagacttaaaactggagtgacaggacaaataatcattactttcaattcatgactgctttatattcatttgatgaaatcatttgtatacaaaccagggagagttttctttacacccttgacaatatatcacatactcttcaagatcataataatatcattaatataaatttaaacaacatggcttgttagaaaatatgctaattgctatggtctcattatgtttgcttagcttttatttgtttttctgtgaacagttagagagctaatttttttcaaaggtgattgtaagtcatattttatatagcattttgcttgattatttgctctgtactgaatttgtactctattgccattagatcttacaataatgttccactctgcaaatttttaaggttcaaataaagtttaattgtttgcaaactgttatgatgctaataattcaacagcctgctgtgttactaatgaaattactttgttatgattaatttggaaaatagtgtgttgattgtagtaattaagcacaacaaggtgaagtaaatgattctaatgccatctggccgccaaactgaatgaagaaatgaaatagggctgtcatctgaatttattcaaagaagtaaggataatacaaatgactttcattgctttaggatttacacttaacacagctcactccgttctatttttgccactttgctgcatatgacactttctttcatagaaaaagaatgtcatttagtccagcaattgttttgaatactttattttattggaagctgattatttttactgtgtgctaatttaattacagataattacataaagtattataggaccatgggaaaaagaaatcacttttcaaccatgtgtaggtgaaatccatatatatggggtttcgtttttgtttcatgttttgttttgtttcactttttgctatcattacacaaccactttgaatatagccttgcacaaagagtagggcatccattcaactgtttcttaaatgtgtacaaaggctcactcttagttcttatgatttctactttttatataatttcatgtaatttctgcactctactacttgctacttattcatagactggtactatccagggtcataatttaaaatagaactgagttagatattatgaattcagatttgcagttcagccattagaagaaaattaaccctaatatacatgttgtttaagagcttgaacttcatcagtgagactgagtgaagcattgtgagaatttttaaagttctaaatttcagataaatcagtcatttgtatttcatttgttggagttatagacacacaccatatagagatcacttttgcttctcttgagttcagtaggttcatgactattgaaagcaatccacatggtaaagaaagaggtggtgaagagtggagatcaaaacatgatcaagccatggaaaacacagcttcactcaaaggttgaaagaatactttgtgtgtgtgtgtgtgtgtgtacactgtatatatatataaaataaaaacatttgatgaatatgatcttatttatagtaatatacttagtattcaaaaatacagagaaacaataagtactacattgttaaaatattattatacaagtttaatatatactcaaatgcacaacagtttatactctggattgggaacaagagatttctagacatctcagctttagccagtttattatacgcctactgctttatagttgagttcttccagaatatctgttagaacctctgatagcatactattttatgatgagataaatactttaaaaatcatatgatcacagtagcatggaatgacatttcattaatgctatgtttgaggggctttttcttgtttctgctagtagaatctgttctaccattacttatacacaaacatattatttattgccagcatggtacacattatatggtgtggatccagtaaatatttgttaattaactgatttggcaccccacaatatctcaagacatgagatttaagaagaaaagagcttgactagtaaacctggtagagaaaatgcctttatacagttagtatatcccataatactatcaacaagtagattggattttattgttataacagaattgagtgagattgtgaataataagaaagttgagttgtggtacattgtccttagatgtttccttcctttcttcccttgtgttcagtgttgtgacctcaaataagaggcacaggtgcctcctcgggcagcttggggcaagtgatctactttcactttccagtgaaacatctcaaatcactgctgccctgcattccacttgcgtaatatcagagaagcctttcctgcatctgatcttgaaagcattctagctgtcgccttgggcagatcaaaaatttgtgcaagtaagtgggaagtttcacagttgctgccaaatctaatcataatttagcttttgtcctttttgttaacttttactccctgtttatttaaagttgtatgattatgttaacttgagtgctttgagtccccaaaatgaaaggaactgtaaatgcagaaagtcgccttagtcataccactgctcagtttaggtcttcagtgttgagagaggggctggaagttgagcaagccaaaacacttgactatgtgcaaaggcgtgaatatagaaactgctcccaaagcccatctcttaagtacctttcttaatgctggaactttggaaggtgtttccctaggtttctctcctcttttttttttttttttttcttttcagttttcttttttgttatccattactcggagaggcaatatagcacagcccttgtctgttttctgtttattggcctcaactttctaatataaaaatatcactcctgctagagtaaaagcaggtgccattttgtagcttgaactgcaatttacttcttgtttgaggaaagtgtcacacaggtactctcaaaggagaaaattaatgacactagtgtatgctggttaaagacagctgctttcgtggaggagaaaattccaacaaataagcagattctcatctactaccctcccctcccagctcccatgggagtctatttagaaaaccttgtgttctttatcacatcaaatgtgatgataacagtttaagtcagactagtaatagtaatagctaacatttactgagtgtttactatttgtcatgctgtgcacttttcattcaattcttataacaaccctatgaagtaagttctgttattcattaccattttcccgattaggaaacaggctgaataatttgtccccaaagccttagggtagtgagttacctaaccaagcctcacaccagcctccttgccctgaattgaacactgttctgctgcgcagtactgtgatgaattaaaaccaaatgcttatttggattctttgcatataataggcacacaacaaatgcttgttgaccactgatgaggtcaccatttctagaaaataatctgaagcatgtgaaaagaatcatccaataattgacaattggatagctgaatttggctcactagtcaggaaagcataccatggttatcatatcagatccaaagcagctgatccgcaatggagacgaaacttttatgcaggaacacttgacgttccagtccagatgaaaataggaagtcaatcaaagcagcagagtccagagaggacaccaagccaaactgacccttttctaaggaccttttcccatccttcccacctcctccaatgtgaagcccagtaaagggaccagccaggggagccttgaagaggactgcaaatccagctgcttctgtctcaaatagttgttttttaggagatgggttttaattgattggtttaaacacataaaggattgttaacaaactgtaccatcagtaaacttcattgtaaaacatgtataattttgtaactgagtgatggcaatgtctgacctgacttttgcttgttgagatatgaatttgtttaagaagaatttttattggaatatctgatacataagtacgtacaaggtcttattccgtggacacccaagcagtgccttgtactggacctcataaagacttctgttgtgttttttgaacaagtcctttttaaataattttgtacttcagtgattggaggctgagggttggggagagtgaaaagattaagagataagtaaggactaacattcactattatggctctggaatttaaccagagaggtggtaaaattgagccctctcatagtctaaaatacaccctatagtactgactgtcttatagcccaagagaaaggggtgtaccaaagttctattttcaaagggtatttgattctgtagagttctttgaaatgtttccatgcctactattcagaacatcatgcttctgaaggacaaggagtgaatgactgcattaccctgatctccagctgcccaagtagatctcagtggtgtaaaataacctgtcccatctaggataccctactaattcctaattcccaggtcaagcgcttgtggtccgtagagtctctgttgctccctgctttcatctccttgcgccactttcctcctcctcctcaggctattccaaggagctggagtcatatgaggcatgagatgttacaattcttatcgctctacatagttcacaacgtcaagtgtgccctctgctttctgggaacccagcagaaaaacaagttgtgtaactgtgtgtttatcctgttataagcatcctgaattgaaaaacctgaaatgtagcaatcttgtgaatgtgtgttattatctctctgttgctttgcttcagttggtcagcatatttgctttattctttattatcgtctcagggcttgctatttttcttcctatctaattaaatgattccattttgaataaattacatttaagtgccatcctgtgcaaggggtatttcaaacatagaatttgacatagtctttcccaagtagattcatagtctgaataagatagggcataaacacagggaaggataaggacagccccacataaccttaccttggtacagttcttagcaggttaagccactagcagtgtcctaagacataaaaggttctctgattttgtgatatctgaaccttagggattatctgggaaacaaactgggaatctttccttatgtatgtatttttaaaaataaacggggagggaaacgcaagggtttcagtattgtttcagatgaaaatatttttaaaaaaattccaaaatgcttgtagctcctgaattaagtgtgaggggaagcaaagagctgtgtatatgaataatgtgaacgtcttttacagagttgctaccagttatggtaacataactctggaagctgagagtgaccctacccctttaggagtaaggactcttttccttcagttggagacagagttgtaccagcagtattcagctgaaagtgagtagtagtaagaacactggaattggagtcaaccaaaattctagtttcactctctagtgccttgtgccctagaataagtttccttccctgcggaataccagtggtgcctgttctctctgccctgtcaggattgtggttaggctcaagtgagattatgtttagaagtgacttgaaaaatcaacaatagcgtcaaacatggctttcctgcatttaaagatatgagaactgaaatgaaacaatgatcaaataatttctccttcacaccgaaatctagcaagggaaaaaaatgttgatactcagcattggctgtaatactacttgaaataattttagtgagcccttggtattattatttataacagaaattgatgcaaataatcctagaggagtttgagatttgattctcctttaattttcaatgcattttttgatcaagtcattgacttccaagctatggtcaatttctgttaatggtgattttaatcacagagatgttacttctgtctataaagtttctaaataaacttttctcatgatatttaaaaccaccaatctgctaataatagtctttaggtatatgttgtaatatttttttaaactgacattctaaggaaaatttttgtgctgacttcctttgcccattgtctaatccttttatgaactgtttcttccagatggctatctatgaatgtttgtgtgtgaatacacactttctagttaaaaaacatcagatgcatatctaggagtgacacaattttattttctctaattagccttgtaatatagcactaatcttggtttgtagtttgtgaaaatatggggctagaaatgagggcaaaccagaacctcgttacatgtaaccttaatgctttaatgttataactttaggcaaagctaataaaagatgcaaaggactcttaaataatttaaattatctaaaaaattgagcatattccttcaaataataatggctttcatgaactgattttttaaaaattcatttttcatgtgaattacttagaagatatcaaagtaagtttgagtttatttaagattattaagtatatttgttatgcagagtcgctgaagattccattttctagtctagcaattgtaatctatagcgtgatgtagtacataattctggtaacatcggatgatgtcatggtagtatagagttaattcttagcacttctctttaaaacggtgctttgtgatgtgattccttgattattttgaaccattaatcaattctatcagcttaaaaaatagacacattgtgtacctgttaccactggtttctaaaatcaaagtttctcttaccatcttaaccttaccagtttaagctgggaaactattacttttataatgtgtttatattattatcattacatactctttgataaaggaaaacaatgggactatactaaattgtggcaactgtgattaaagataagtctgttttctaaacttttcctaagtgattatagtagagaatttcaagctataagtataccatcctttgcttctcctaaagctatgatctatagcaataaatactctgtattgatactacttaattttaatggatgtatactgaggctggaaacatattgtagcttagcatttagtgccttaatttttaaacagttttgaaattttaaaaattgatataattgcctgaatattttgttattggacccgtttcatgctagaagattattctcatttcacatctttcctaaaaattatgttgttcacaatgtatttctactgacacttcattgctatttttgcataactgaaaatctgtcattttcattttagctcagtttggaaacatgaaaaccatatcagagcagcatattaaagattagtatagaaacacacaaaaaatgaaagagccacatagagataaatttagtcacattattcaagtgtgccattttaatccattaatctggtttgaggctgcttaagagaaatatttctctctgaatgagttttttctcttaaaaaaatgttgagaagagaagcatctcatctaaaacaattaccatgggtttttttgttttttgaagaaaagggtaaagcaagagccgccctaaactctgccataatttattcttagtcaaaaacagattaccatttacacattaggtattaaaagctagttatagtgattaaaggttgtctttctaatgctatgtattaagataccaatacgacatttattttcaagctattttggggccacaggggaagttgtttttcttatgaagggaattctgtattttacttcattatttataagtatatatatatttaaaactatacacacacacatataactgggaaggggagaatgggagctggttgtttctttgaatcctaatactgtatgtcttcttaatgaacctgccgcattgcccagaaaacagctccctgcaaataaacatgctagaagtgatttagccacaatgtccagactgtgtaaacatctcattattacaataaaattgtcaataaatttacattactgctcccttttcaaacgttaaccaactttttcttcacttgataaaagggcataaattgtatttttatgtgttggtgtttttgttttcattacacctcttgctgcactctagacaaaagacctcaagccttaatgccctgagttattcctggatgaagaaaactcctacagttgtttattaatgtaatgtgctgtgttcctttcacagtgagatggacatggagccctcacaatctgatctttagtcacggcattttttaaaaagccataaagccagtagtattgtagtcactgcagctttaagagagacacaaagaattaaggcccttataatccactattagaatgggaatttaagttacattagaagcaaaagataaaacggcaaaatgcaataatttcctttaataaagattatgtccagttttcagaattatgatatcacgtcgaacataattgtggaataagcccccgccccaccaacacacgtatttcttatataactggtacattaacattagaaaagcagagtgatattgaattctaatgaggtctggcctatatgctctgctaggagaagaatgaggataattcatttgtattctacaaagcacttggaaatccacgggcatccctgtggcttcagcacgtggtgctgatcatctgttcctacttggagttggtgggggggtggggggtgggtattcattgctttgaacagcatctgagctggggaaaatagttaaccactttcttgctagctgttgtttcctaatgactatttaatatggttgctctatgcatttgcattacctattctcttcaaggatcttaaaaattgtgatgcctgtgttggtgacagtgcacctctgtagaagccaaacaaagaaaacgaagtgaaattcagtaggataaatgtgttttcaccatcctcagtaaacatgtcagttttaagtaaacaatcagatgacagtgaggtatttgttcattaaaaaaaaaatctgaaaaatgctccatttgatctgatactggctgttcaggaaaaactgcattcatttgtgagtcttgctgacattctgagaaaacagcccattttggaaacttatatttagtaaaaccaaggaatgaaagattttagcaaattgccacgtaaaatgatctgcacaaaaaggcattggggaagtgagctaaggcctgtgccaaacagatggcaccccctgctgtgtttttgattgaaaaagaaaggtaacatttgcagccacgtcaaagagacagtgatcagctaaacaaattggtctccaaagtaccccatcgctagagcaaaccccgctgcagggtacaagcgaggctgtatttcaaaataatgctatgtttgcgtctttcctaagtgaggggatatgtccccttttcatgcggcaaagagaagatgaggtctttgttgaagtcgactgcagtactatctgcagaataagcaacagacctcagtagcacaattacccgttttctctgatcaccgccaaatgcctacaaataatatttgggaagaccgcaatagcttcttatatattgttcactttcctgtgtcaggtctccagagcttacagagaggaaattggtatgcagcatacaaacaaaaacaacaccaaatcatgacaaaggcacagtctgaggaggagaaagaaagaggagatcaggaaaaactctccttgcacttgaattcaattgcaaaatacaaacatcaaaaatggcaaagtgtgtgtcagtgcgtaagttggggcggggggggcggggattttttttttctttggctcatctcagctggcagccttattccgcttcagtaaagacaaggtacagaaatgtcctttgggtgacattcaaaactcgatataaatcctctgctttatgagactgcagtgcaataaattacttagcctaattgtagatgtaatgaattaccataattagtcatgggctacattaaattaatcagcatggtacattattttgctaaattacatctttgccttccaaagccaccagtgcagcaatcagtgttttttgcaagaggggaatgatgctataatgagaagcctttctgctcctagaacagtgacaggatatgaattttgatgggaagcaggaaggtttggaaacactggagttccaacttgtgccttaagtgtctttggttgttaatgataccccagtcctcctgcaggggagcagtgggctgtagcttgcgaaggctgtggaagattcccctcacaggggaagaaaaacacttagatggtgctttaaggcaaataatatagctgatacaacaagtcacaaagcagtggggtggcagaaagataatgtctttgaaaatattaatagatttagaatgttcttttacattggttgatgagatttatagttaccaggtatttctttatgattattattattatt

SEQ ID NO: 1818 - DNA, 3677 bp, Homo sapiens
acatgcccaaccccagcagcacctcctctccctaccccctccctgaggaaattaggaacctgttgatgttgaaacatttgtagcagatatactgaaaggagaaaatttatccaagaaagcaaaggaaaagagagaatcccttattaagaagataaaagatgtaaagtctatctatcttcaggaatttcaagacaaaggtgatgcagaagatggggaagaatatgatgacccttttgctgggcctccagacactatttcattagcctcagaacgatatgataaagacgatgaagccccctctgatggagcccagtttcctccaattgcagcacaagaccttccttttgttctaaaggctggctaccttgaaaaacgcagaaaagatcacagctttctgggatttgaatggcagaaacggtggtgtgctctcagtaaaacggtattctattattatggaagtgataaagacaaacaacagaaaggtgaatttgcaatagatggctacagtgtcagaatgaataacactctaagaaaggatggaaagaaagattgctgttttgaaatctctgctcctgataaacgtatatatcagtttacagcagcttctcccaaagatgctgaagaatgggtacagcagctgaaatttgtattgcaagatatggaatctgatattattcctgaggattatgatgagagaggagaattatatgatgatgttgatcatcctctaccaataagcaatccactaacaagcagtcaaccaatagatgatgaaatttatgaagaacttccagaagaagaagaggacagtgctccagtgaaagtggaagaacaaaggaagatgagtcaggatagtgtccatcacacctcaggggataagagcactgattatgctaatttttaccagggattgtgggattgtactggagctttttctgatgagttgtcatttaagcgtggtgatgtgatttacattcttagcaaggaatacaatagatatggctggtgggtaggagaaatgaagggagccattggcttggtgcctaaagcctacataatggagatgtatgatatttgagagtcctggaaaaggaaaattcttctgcttgtctgcaaatgctttggatttagaagcgtcatgaaagcacgagtgacagctcctaacctctccttgttttattaaacattacttatctttgactgttattttatgcagtcgctcattaaaatattcctctgatgtgaaattaaatgaaggatattaatgtaaattagatgcaaccagttaagttatacctgttgctattttgcaaagaaataattatagtttttatttacccatttgatttgtgtgaagaattcatcactattttatacgtaacatatagtctactatagcatagtatgctactattgctacttctggtgtgatttgtaatgtttcttaatcattggacatcaattatttttagagagtaatgtataatttcatagcattttaaatttagtgtatcatgcgagttttttttggtagatgctgaagaatgtggttgctaaacaaagaatgctaaagaatgttcaaactttatagataactttattgttattatttattttcacacatttaattcctattaagtacagccgcaagaaagaaaaaatgatgaagttgcaaatggcagtgtgctgtcacctgcaacagaagtgcgtaccagaagtatgactcatgcaaagcattttaccgtacaaatatcctggtgcgatgatgggcctggcaacattttctactgtacttttgtttaaatttaatgaaacaaaaaattcctaagaaataccaccctaccactaacaaaatggtataaagaatctcccagccaggccaacatggtgaaaccctgtctctactaaaaattagccaagtgtggtaatgttcacctgcagtcccagctacttgggaggccaaggcacgagaattgcttgaacaaggtaggcagaggttgcagtgagccaagatcgcgccactgcactccagcctgggcgacagagtgagactccatctcagaaaaaaaaaaaaaaaaaaaacagaatctcagtgtattctcaaagtaaaaaggcataaccaagcactctcttatcttgccttattgctatactatttacatcccactgcagaacagcagatttgaggcttttctatatacttctcagagcactgaaaagaaaggaagggtttgcagaggagagtgtagaaatcccagtggtagcatgtaccaacaggtgagtagaaaggtagtgttagcctgacatttgagttatactctgtgctgcctgagcaagatttgtagaatcatataattaccttttcatgtatatttgaaatcagaggtgtttaaaatacctatgagataccaatgtagccttaacatatgtcaaaatgcattgctggttagataattatttggactacacataaactcctaatattgaatcattacctatcaggtattatctttatggaacttttcaatatctttgctttataaagattctaaacatgtatctgagctggtaatattttaaaatctccattatttgtgtaaaactgtttataagcagtgtttgagagggtctgctttaccattaccccctcaatatcatgatcatccaatctcaaatgtgaaaaaaaaaaagaaatttgattttaggtattgtgagtaaacaagtttatatagagagacattgtgaagttaaagttttcagaagttacatttgtgcagttcttaccttttcctcatatagtgccattgaaatagactgaaattatcttggcaaaagttagacaaccaaagacgactttagtggactggttttcaaaacttgagcagctgaaaagcaaaagccgttgtttcccatgacaatgtagcctttgtggatttgggtttgtgctttgggttgaaaagaagtttttagtcctaggccagtagatggcagcagcttttcattgcagacaaaacctcttgaaacccttcccccatggcacaaactcgcccatgatggaaagcatctagatttctgcctccttttacagttaatccaggagagggagtcctttgccaactgatgaccaacagttccaagccagatagtctcgtgaacagtgacaatacagaaataaggtgttatttctgttcagatctccaccggcctttgttcttttaaaacttgaatataggtgggagacataagaaaggaaagaaaagacttaaaactggagtgacaggacaaataatcattactttcaattcatgactgctttatattcatttgatgaaatcatttgtatacaaaccagggagagttttctttacacccttgacaatatatcacatactcttcaagatcataataatatcattaatataaatttaaacaacatggcttgttagaaaatatgctaattgctatggtctcattatgtttgcttagcttttatttgtttttctgtgaacagttagagagctaatttttttcaaaggtgattgtaagtcatattttatatagcattttgcttgattatttgctctgtactgaatttgtactctattgccattagatcttacaataatgttccactctgcaaatttttaaggttcaaataaagtttaattgtttgcaaa

SEQ ID NO: 1819 - protein, 185 aa, Homo sapiens
MNNTLRKDGKKDCCFEISAPDKRIYQFTADKDAEEWVQQLKFVLQDMESDIIPEDYDERGELYDDVDHPLPISNPLTSSQPIDDEIYEELPEEEEDSAPVKVEEQRKMSQDSVHHTSGDKSTDYANFYQGLWDCTGAFSDELSFKRGDVIYILSKEYNRYGWWVGEMKGAIGLVPKAYIMEMYDI

SEQ ID NO: 1820 - DNA, 3995 bp, Homo sapiens
acaggctctttcttctggggccgggaaaaccgaggaatacacatgcgcagttggacccctcaggcccttcgtgtcccttcccacccatctccccgccccggccctctgggcggggctgggccgacagtccagctgcagctcgctggagattcagtgacttccttgttgtgagccccggcccggcagtgtcccgactcgtagccccgctgttcttaatccgggccgctagcctgagtctaggtcgcagccgcagccccaccccgtcggtcaccttttcagcgcaggtcctttccccgcacgccctgcgctccctaacatgcccaaccccagcagcacctcctctccctaccccctccctgaggaaattaggaacctgttggcagatgttgaaacatttgtagcagatatactgaaaggagaaaatttatccaagaaagcaaaggaaaagagagaatcccttattaagaagataaaagatgtaaagtctatctatcttcaggaatttcaagacaaaggtgatgcagaagatggggaagaatatgatgacccttttgctgggcctccagacactatttcattagcctcagaacgatatgataaagacgatgaagccccctctgatggagcccagtttcctccaattgcagcacaagaccttccttttgttctaaaggctggctaccttgaaaaacgcagaaaagatcacagctttctgggatttgaatggcagaaacggtggtgtgctctcagtaaaacggtattctattattatggaagtgataaagacaaacaacagaaaggtgaatttgcaatagatggctacagtgtcagaatgaataacactctaagaaaggatggaaagaaagattgctgttttgaaatctctgctcctgataaacgtatatatcagtttacagcagcttctcccaaagatgctgaagaatgggtacagcagctgaaatttgtattgcaagatatggaatctgatattattcctgaggattatgatgagagaggagaattatatgatgatgttgatcatcctctaccaataagcaatccactaacaagcagtcaaccaatagatgatgaaatttatgaagaacttccagaagaagaagaggacagtgctccagtgaaagtggaagaacaaaggaagatgagtcaggatagtgtccatcacacctcaggggataagagcactgattatgctaatttttaccagggattgtgggattgtactggagctttttctgatgagttgtcatttaagcgtggtgatgtgatttacattcttagcaaggaatacaatagatatggctggtgggtaggagaaatgaagggagccattggcttggtgcctaaagcctacataatggagatgtatgatatttgagagtcctggaaaaggaaaattcttctgcttgtctgcaaatgctttggatttagaagcgtcatgaaagcacgagtgacagctcctaacctctccttgttttattaaacattacttatctttgactgttattttatgcagtcgctcattaaaatattcctctgatgtgaaattaaatgaaggatattaatgtaaattagatgcaaccagttaagttatacctgttgctattttgcaaagaaataattatagtttttatttacccatttgatttgtgtgaagaattcatcactattttatacgtaacatatagtctactatagcatagtatgctactattgctacttctggtgtgatttgtaatgtttcttaatcattggacatcaattatttttagagagtaatgtataatttcatagcattttaaatttagtgtatcatgcgagttttttttggtagatgctgaagaatgtggttgctaaacaaagaatgctaaagaatgttcaaactttatagataactttattgttattatttattttcacacatttaattcctattaagtacagccgcaagaaagaaaaaatgatgaagttgcaaatggcagtgtgctgtcacctgcaacagaagtgcgtaccagaagtatgactcatgcaaagcattttaccgtacaaatatcctggtgcgatgatgggcctggcaacattttctactgtacttttgtttaaatttaatgaaacaaaaaattcctaagaaataccaccctaccactaacaaaatggtataaagaatctcccagccaggccaacatggtgaaaccctgtctctactaaaaattagccaagtgtggtaatgttcacctgcagtcccagctacttgggaggccaaggcacgagaattgcttgaacaaggtaggcagaggttgcagtgagccaagatcgcgccactgcactccagcctgggcgacagagtgagactccatctcagaaaaaaaaaaaaaaaaaaaacagaatctcagtgtattctcaaagtaaaaaggcataaccaagcactctcttatcttgccttattgctatactatttacatcccactgcagaacagcagatttgaggcttttctatatacttctcagagcactgaaaagaaaggaagggtttgcagaggagagtgtagaaatcccagtggtagcatgtaccaacaggtgagtagaaaggtagtgttagcctgacatttgagttatactctgtgctgcctgagcaagatttgtagaatcatataattaccttttcatgtatatttgaaatcagaggtgtttaaaatacctatgagataccaatgtagccttaacatatgtcaaaatgcattgctggttagataattatttggactacacataaactcctaatattgaatcattacctatcaggtattatctttatggaacttttcaatatctttgctttataaagattctaaacatgtatctgagctggtaatattttaaaatctccattatttgtgtaaaactgtttataagcagtgtttgagagggtctgctttaccattaccccctcaatatcatgatcatccaatctcaaatgtgaaaaaaaaaaagaaatttgattttaggtattgtgagtaaacaagtttatatagagagacattgtgaagttaaagttttcagaagttacatttgtgcagttcttaccttttcctcatatagtgccattgaaatagactgaaattatcttggcaaaagttagacaaccaaagacgactttagtggactggttttcaaaacttgagcagctgaaaagcaaaagccgttgtttcccatgacaatgtagcctttgtggatttgggtttgtgctttgggttgaaaagaagtttttagtcctaggccagtagatggcagcagcttttcattgcagacaaaacctcttgaaacccttcccccatggcacaaactcgcccatgatggaaagcatctagatttctgcctccttttacagttaatccaggagagggagtcctttgccaactgatgaccaacagttccaagccagatagtctcgtgaacagtgacaatacagaaataaggtgttatttctgttcagatctccaccggcctttgttcttttaaaacttgaatataggtgggagacataagaaaggaaagaaaagacttaaaactggagtgacaggacaaataatcattactttcaattcatgactgctttatattcatttgatgaaatcatttgtatacaaaccagggagagttttctttacacccttgacaatatatcacatactcttcaagatcataataatatcattaatataaatttaaacaacatggcttgttagaaaatatgctaattgctatggtctcattatgtttgcttagcttttatttgtttttctgtgaacagttagagagctaatttttttcaaaggtgattgtaagtcatattttatatagcattttgcttgattatttgctctgtactgaatttgtactctattgccattagatcttacaataatgttccactctgcaaatttttaaggttcaaataaagtttaattgtttgcaaa

SEQ ID NO: 1821 - protein, 355 aa, Homo sapiens
MPNPSSTSSPYPLPEEIRNLLADVETFVADILKGENLSKKAKEKRESLIKKIKDVKSIYLQEFQDKGDAEDGEEYDDPFAGPPDTISLASYDKDDEAPSDGAQFPPIAAQDLPFVLKAGYLEKRRKDHSFLGFEWQKRWCALSKTVFYYYGSDKDKQQKGEFAIDGYSVRMNNTLRKDGKKDCCFEISAPDKRIYQFTADKDAEEWVQQLKFVLQDMESDIIPEDYDERGELYDDVDHPLPISNPLTSSQPIDDEIYEELPEEEEDSAPVKVEEQRKMSQDSVHHTSGDKSTDYANFYQGLWDCTGAFSDELSFKRGDVIYILSKEYNRYGWWVGEMKGAIGLVPKAYIMEMYDI

SEQ ID NO: 1822 - DNA, 3599 bp, Homo sapiens
acatgcccaaccccagcagcacctcctctccctaccccctccctgaggaaattaggaacctgttgatgttgaaacatttgtagcagatatactgaaaggagaaaatttatccaagaaagcaaaggaaaagagagaatcccttattaagaagataaaagatgtaaagtctatctatcttcaggaatttcaagacaaaggtgatgcagaagatggggaagaatatgatgacccttttgctgggcctccagacactatttcattagcctcagaacgatatgataaagacgatgaagccccctctgatggagcccagtttcctccaattgcagcacaagaccttccttttgttctaaaggctggctaccttgaaaaacgcagaaaagatcacagctttctgggatttgaatggcagaaacggtggtgtgctctcagtaaaacggtattctattattatggaagtgataaagacaaacaacagaaaggtgaatttgcaatagatggctacagtgtcagaatgaataacactctaagaaaggatggaaagaaagattgctgttttgaaatctctgctcctgataaacgtatatatcagtttacagcagcttctcccaaagatgctgaagaatgggtacagcagctgaaatttgtattgcaagatatggaatctgatattattcctgaggattatgatgagagaggagaattatatgatgatgttgatcatcctctaccaataagcaatccactaacaagcagtcaaccaatagatgatgaaatttatgaagaacttccaggggataagagcactgattatgctaatttttaccagggattgtgggattgtactggagctttttctgatgagttgtcatttaagcgtggtgatgtgatttacattcttagcaaggaatacaatagatatggctggtgggtaggagaaatgaagggagccattggcttggtgcctaaagcctacataatggagatgtatgatatttgagagtcctggaaaaggaaaattcttctgcttgtctgcaaatgctttggatttagaagcgtcatgaaagcacgagtgacagctcctaacctctccttgttttattaaacattacttatctttgactgttattttatgcagtcgctcattaaaatattcctctgatgtgaaattaaatgaaggatattaatgtaaattagatgcaaccagttaagttatacctgttgctattttgcaaagaaataattatagtttttatttacccatttgatttgtgtgaagaattcatcactattttatacgtaacatatagtctactatagcatagtatgctactattgctacttctggtgtgatttgtaatgtttcttaatcattggacatcaattatttttagagagtaatgtataatttcatagcattttaaatttagtgtatcatgcgagttttttttggtagatgctgaagaatgtggttgctaaacaaagaatgctaaagaatgttcaaactttatagataactttattgttattatttattttcacacatttaattcctattaagtacagccgcaagaaagaaaaaatgatgaagttgcaaatggcagtgtgctgtcacctgcaacagaagtgcgtaccagaagtatgactcatgcaaagcattttaccgtacaaatatcctggtgcgatgatgggcctggcaacattttctactgtacttttgtttaaatttaatgaaacaaaaaattcctaagaaataccaccctaccactaacaaaatggtataaagaatctcccagccaggccaacatggtgaaaccctgtctctactaaaaattagccaagtgtggtaatgttcacctgcagtcccagctacttgggaggccaaggcacgagaattgcttgaacaaggtaggcagaggttgcagtgagccaagatcgcgccactgcactccagcctgggcgacagagtgagactccatctcagaaaaaaaaaaaaaaaaaaaacagaatctcagtgtattctcaaagtaaaaaggcataaccaagcactctcttatcttgccttattgctatactatttacatcccactgcagaacagcagatttgaggcttttctatatacttctcagagcactgaaaagaaaggaagggtttgcagaggagagtgtagaaatcccagtggtagcatgtaccaacaggtgagtagaaaggtagtgttagcctgacatttgagttatactctgtgctgcctgagcaagatttgtagaatcatataattaccttttcatgtatatttgaaatcagaggtgtttaaaatacctatgagataccaatgtagccttaacatatgtcaaaatgcattgctggttagataattatttggactacacataaactcctaatattgaatcattacctatcaggtattatctttatggaacttttcaatatctttgctttataaagattctaaacatgtatctgagctggtaatattttaaaatctccattatttgtgtaaaactgtttataagcagtgtttgagagggtctgctttaccattaccccctcaatatcatgatcatccaatctcaaatgtgaaaaaaaaaaagaaatttgattttaggtattgtgagtaaacaagtttatatagagagacattgtgaagttaaagttttcagaagttacatttgtgcagttcttaccttttcctcatatagtgccattgaaatagactgaaattatcttggcaaaagttagacaaccaaagacgactttagtggactggttttcaaaacttgagcagctgaaaagcaaaagccgttgtttcccatgacaatgtagcctttgtggatttgggtttgtgctttgggttgaaaagaagtttttagtcctaggccagtagatggcagcagcttttcattgcagacaaaacctcttgaaacccttcccccatggcacaaactcgcccatgatggaaagcatctagatttctgcctccttttacagttaatccaggagagggagtcctttgccaactgatgaccaacagttccaagccagatagtctcgtgaacagtgacaatacagaaataaggtgttatttctgttcagatctccaccggcctttgttcttttaaaacttgaatataggtgggagacataagaaaggaaagaaaagacttaaaactggagtgacaggacaaataatcattactttcaattcatgactgctttatattcatttgatgaaatcatttgtatacaaaccagggagagttttctttacacccttgacaatatatcacatactcttcaagatcataataatatcattaatataaatttaaacaacatggcttgttagaaaatatgctaattgctatggtctcattatgtttgcttagcttttatttgtttttctgtgaacagttagagagctaatttttttcaaaggtgattgtaagtcatattttatatagcattttgcttgattatttgctctgtactgaatttgtactctattgccattagatcttacaataatgttccactctgcaaatttttaaggttcaaataaagtttaattgtttgcaaa

SEQ ID NO: 1823 - protein, 159 aa, Homo sapiens
MNNTLRKDGKKDCCFEISAPDKRIYQFTADKDAEEWVQQLKFVLQDMESDIIPEDYDERGELYDDVDHPLPISNPLTSSQPIDDEIYEELPGDKSTDYANFYQGLWDCTGAFSDELSFKRGDVIYILSKEYNRYGWWVGEMKGAIGLVPKAYIMEMYDI

SEQ ID NO: 1824 - DNA, 77027 bp, Mus musculus
  misc_feature (1)...(77027): n = A, C, G or T/U
gcagttgtttatcacaacttcacttcagtaaggcctgagattctgccgagcagggctctgcttcccaagaggcagtgtcaactgggacatttctggtaaatctgaacgcaaagcagggtgccagcccctgggggactgtgggtgggacttggggagtttgggtgccatccccgagtgacagatggatggacggttcatgagagagaaaggaggagacacgtgggcagatcggtctggagcgtaagagtgcctgcaaagcaagcaacaggcagagaaggcagaggaaccgaagtgaagatcagagaaacaagaagggcacagcctgtgacacactgtgagccacttgaccagctactcacccacctcggaagcaaaatgtctctcaagctgccaaggaactgggatttcaatttgaaagcggaggcttcaaaaataggtaaggtcagggtccaggtatttcctcggggttcttatgcgtgagcacccactatttgcattctgagttgtgggagctcagtcggccaaagcacaccacacaacaacatcgagcttggcagaaatgtgcattcgggtggacgagtcctgagaagttctagtgtgctggggttggggggtggttctcttctctctgggggtgggctatgtgggtcaagggaacttggatggtttcggctgtgcattggacacaaaactgaaattttgtttctgtcattggaaagtcggttctttctggcatggcacgtcgtctaactgttgaatggctttcagtaaaaggacagagactcgagtattttgaagtgattcatctgtggatgaattcaagggagtgtcacatttttttgtggacccagaggccaatgagggactacctatagttaaaagtagacaaggagaacagggtgagagaatagaggcttttgaagtataaaacactattctaaggaacagaacgtgggagaacgcaggagagttgggaaagatagactttagttagttatgaaggataattcgaggtgttcatatcattttcctctaacaatggtgatatatattcgtcaaatctattgtttgctattatatagatgtcttgttttcttgccaccccctgcaccatgaattctcgctctgtagctctagttggcctgaaacttgctatggaaacttagattcacagagttactttagtgctcagattatcggcatggcctgaatacctgatatttcttctgttattaaactttagttttaaattgatcatagtcagatgaagcacacacacacacacacacacacacagacagacacacacacacacgactatctactcagtgagataaatttcttgattttaggctttacagtgttgaggtatttgcaaacagcatggaaggattttgcttagaagaaagttttggccagatggttcatggtggttggtgtgttaaaataagtagttcactaaaagctcacagataggaagcaggtcagaaaagggctttgaaatgaaactgaaagtaaccagagaagccatttattttggtgatcaggagcccacatttccaaacagagctggaactgtgtgccaaagccagctccaagatgtgacacagggaagaaagagccttctctcctgcccatacaaacatactctcactaagtcactcagattaattttaaggtagaatatctgtccctctgctccttggtaagtgtcccacctccccactgtaaaggcattccgctctctcaccttccatatttcagctaaagatgggacacttgggaaaataaatgttagatttttttcagcactatagaaaatcacctcattggattctcaggcctaggattagactgagtgcggttccataatctcttcgagcagttcttacaggtgtccccctgggtcgcttactgtagaacaccctttactcctggaaacacagagtctcagagtccaccccaactgtgaagtcaggctctcaagagggtcccgccatcctgccttttaatgagcatctctatctgatgagctgtcagttccctgagctaagcgcagcagggctccgccactgtgcaagtggcacagctcctagcgcctggacccactgggcaaacaatgtttgaagtctgatcaccagaattcaatattatttaatatcacttaataatgtataataacaagtacatacggtttagaagagtctttgctgttacccgtgacatctacatgtttgtcactgcatagcagagtgtcacatgaactgggatctagattataggtagagccagctccctaaggagaaagtacctgactcagttacaagatctccagtcccttgtcccacgtaggaatcggtttatcaatatgccagaaaagccacttccagaggaagggtggtgcaattgggagtccctacagggaagccaggaactgtggctttctagcctgggtagtgtgatatagaaggatcgggcttctcagcccggtcactgttgacatttgtgactggataattctcgattgcaggggtttttctgcacattgtaagacagcagcatccctggcctctaccctctagaaggtggtaacacccatctaccactaccctctgtagcaaccaaaaatgtcttcagatgttgccaaatgtcccctggggagaggtggcagtaatattttccctagacctctggacctgagtgttgccattataaggtcatgagagggggggaagcccacacatcacaattcactttctagttcagtttttaggaggctcttattaaggtgtgatttgaaggggatgagaaaaaacttgagcccttcaagaaaggctctcaatgggaaaatacaagctcccctcttccctccctcccatcatcccccccccccccactggtgagcccagcagggggcctgcttgcccattcagttcctctaatcttgagtgttgagccagggctggaaagaaagccaaccctagatgtgggggaggactctgaggctctgctctttctcctccaagaatggcaggttcccttagagtaacagaaccaggagaccaccagtatggcctgagagctcctggtgtagagatgagagatggagaactaggtcaccttgcatctgacctatcaatcctgatggggaataaggattagaaatagaaggttaaagggcaccaatctgggcttgaagtgggaccagggacacatctttcttcctcagatgtagtattatctaccattttagtctagcagaccacttaggatgataatacatcgtgtgtgagtacatctcactgataaagtctgttcccatagttaaccacagttaacatactttgcatgctttgatggtttgctgtcctggatttgtttttgttgttgtttgttcgatatacaaccaggtgcatggattgctgagctaggaccttcaacaccacacaaatgtggtaggtaacaaatgttacccgcacattttagtccagatgacacctatgaataatcggaaagtatgtagagaacacaaatagtaatacttgaccaacaaacatgaaaatatacaatcctatcagtcagggagtgcaaatgagaagcatcgtggaacattcgttctcatccactaagataaacacctgaggaaatctgataattccaagggttatcgttgacacagtgtaagaaggtctcacaagccaagcgtgctgtcattgtggaggacagagcgacagagctctcctgattgattcacaaatcttactctgttgtgcttctctcctgagacctcatcctagagacaagctgtgcatgccagtggattaaatctgcagaagtctacatgttcataggttaacgctcagtagcatcgtcataagatggagcacttcataagagcagagtatcattaattagtttatgcccaagtgaaacggagtcgcaaaacttaatattggaattctcagaaggatagaatgaagttcatccatattaagtttaaaaactacacatgcttgtggcaaaactataaagaaaaacaaagaatcagatcatataaaattcagggttagtgccctttgggaagggaaaggatggaaaaagcatttgggaaggtcccatgtcaccaatccacacacctggttatgtatcaaatgaacaacaagacgaattcagacgcacacagaccatcagagccatgcaagctctgttaacagtggttaactgtaggaaaagactttgtcaacgggatgtgctcacacgtgatgcatgattcttctaaacgttctgtactaagaaccagtgttactgtattgttaaaaattacccaaagctagcactcatctccaagtgctcgaccaagcaaattggccaaggtcttcatgcaacacctgctcctttagcaacccagcggctggctccaaagccctgcatgagctgaagaggctccactaagctaggacccgcactagctgttctacaaatgtctgcccacacatcccatagatgtgccaggcacatccgttccctatagttcccagagctccatcattcctcaagtgccaggccagcctgcctgagtccacctggacaccggaactgatgctgctccccagcgagacacacggacaccatgcagtctgaggtgaccagagacaagcatgtttgtgaattcagttttagagactttttacactttttttgttgtcaaacttaacacatgttaatgcggaccagcctgggtctgggccaaggtagtctattttgtgaggttcttgtcactgtgttccgtgtgcagctcagctaagtgtcctcaaaagctgaagcttaccacacaggcagcagagccatggcgggaataggaacactgacactgagcaggccctttggggcccacacccgtctctctacagaggttatgccattgtcccttatttgagtaaaactgtttgtccttaggctactgtcaacttacctttaaactgttaatattaaatggagggcatgtcttccactgtctaggctgagagccttctggtcactagggaatgaaggctgaatgtcccctctgggtctcctgtagcagcagcagtgagaaaacccactctagtggtcaagggaagacacatttcctactggctcgaacactgagtgctatctgcagacactgggcagtctgcacttcatgctagataaggagctgagtggcagtggttctcagaacccaagtctcttaaattgggtctgggttgagacggctttagcctgagtgtgcacagccttacttagctaacaggaatggtgttgctgggtatctgtctagcacatgactgtttacaaagcagcttcggagtgttctctaggaggactccatggagacccacacagctgcagacgggaggattcgggatcagctgggaaggatatgttggtgacaactgtccttccacacacaggatagctcggaaaaaaaaaaaaacttctcctgagatagcaccctttggagctacctaggtagcatgagatatgacatgagagaacacagcaggctggaagaaggccccagctgtggccatagcagctgaggccaactgcacccccggggaagctgggaaatcatggacacaagagtaaggcacaagccatttaggagggttccatcacggggcagcagcgggagctttgcagaaccccaggaggaactgagataagaaagtcacagagagaaaagatgattcgcctctccctcctttacacagcatcacttttctttgacataggattagcagccagatgtaaaggcagctggcctatttctctggaacctgcagaagttagggctggctcttccgcccagacccatggccccagaaataagacccaggctcaaaatatatttacagataccttggccatatagctaagctcttctctgagtagaccagaatttaaaataacccatgtattttagcctacattctgccacatggctcaggtaccatgcatctgtcttgtctcatctccccaggcgaatctcccaggcctcagtctatcccagaattctctctgcctccccatgccctgacctcctattctaccctgtcctataggccataggttgtttgacttgacaggtgatgtgtccattcaatacacagataagtagaggcagacaggggaaaaactacaagactgtgccgagaatagctacatgggtcacgggggacaccaccatcccagaagtctgctgctgttatcttccctgtccaactatatccttccataggatactgaccattgtttcttaaactttctctgattaagaccttttttagcccagggaatttttacacaactccagatatccgggtattttaaattgtgatacaaaccaatatttattggcaataatttataaacaaattctcaaataagtcattgtatgcctatagttttaccacttgttaacagtaagagcagatttatgcaccagtgagaaagatgtctttgcttattttttgcacagagaattcaaccttggctgaatatttgatattgcagactacaggatctttaagggtttttagagctgattgatattttgatttttttaacagccagcactgagaacactactttgcataaatacataatataaaatggtatgtggtggagaagatggttaagtggttagccaaactgtctgctcttgcagaagacccaggttctgttcccagcacccgtatgcaattcacaaccatcagtaactcttgttctaaaggtttgagtgccctctttctggcctctgcaggcgccacccatgtacatggtatacacgcatacttgtaggcaaacactcttcttttcttttcttttcttttcttttcttttcttttcttttcttttcttttcttttcttttctttcctttcctttctcttttcttttctttttctttctttctttttttttttttttaaagatttttgtgtatacagcattctgcctatatatatgcatgcaggtcagaagagggcaccagatctcattatagacggttagaagccaccatgtggttgctaggaattgaactcaggacctttggaagagcaggcagtgctcttaacctctgagttatctctccaaccctgtaggcaaacacttatacacacaaaataagaataaaaatatacatagaaataaaagcaagatggcaaaagttgtttaggggcgtttcagaaattgtcagaaattctgcccaattgtaagtccagattcaagaaataatttcttttaaatgaaactcaagtcaatcaaacaaaatttaaaccaaagattctaattcaattcagccctaaaataaacattctatactaacatgacgaggactggaggtaggaaaattttttaattgaacaattttgctattatagaaggggtcatttttgtatgttgtagaatcccacaacaaataacctgtgacagccttgactacgagccaggcataggcagcgtgtgctgcgtgatgtcaggcacagtgcaaggtgtgcacgctgtatgttcagaaccaggactgcagtacaatcctgggacaacataagtaagtgccgaacacctcacaatcaccacgggtttgagttagaattaactttgggtcattacatattcagaaaccttttactgttgccgtaatttccacgactcccatcacaggaacctccgtggggctgcagccacagtttaagaagatgtaagtgtgcatctttcagggagtctcagacttccgctccatcctgtgttaatttgctgtgtggcatcttgtacatattttatatggttcctttttcaagaaaggaaccagactagaagggctcgtgttgtaacccggcagcggccaccccgcttgcatttcccaagcacagcacgcccactgcagaattcagctgactttccttgcgttctccccactttgggcactgggtccaataagactcagctaatctctggaaagaaggtataatgaatggttctttctgaaccattcagcagagatgctgattcctttgagctggtatctgtggatgcttctgaacgcgtgtgacatgacttttgtccctgacagctagttggttgctttttctcagttctttactctgtggacctacgagtggggatgaccggaagttgtctggaagagttggcacgggagtgagagtaatggggggttgggctgtctgttgatgactgattgactcggaggaggcctgtgaggcatgaggtgtggaaagggcgcgtggccttggctcatgctgatggcttgatagtgtatctaggacacatggcttattctgcaagtcacaatcgtaacacctctgtgctgtgagagggaaataaagtccttcctatacatcacatatgtaaggcgctcagcaaatatctctgtcctttgtttatagacaacctcatctttaagctcagatcagaccagcagccgagcttaggcccctcagaagggtaagcccacagagcatgcttcgtttagtgtggtactcttggcttttatttttactccaagacttgctgaaagtttgctggcttgaaagccaggactggcatggaccagcagctaccgtatagagcgccacacgagaaggctttctgagtttccggcgctcagatttacctatgcactccttcctgataaggcacctggacctactatgttgctctttctccccttccaggaagacctactacctccccttccaggaagctgagtcacaccaaggtctgtccatgaattagcatgaattagcataaattagtattggttagcatacttgccttgttggtcttcaatcataatttacagtttcctttgaaagtgattgactgtgtgatctcatgaacccttctttgaagacaccatataagaacatgcactgtatatacccctgctatgtaccctgtgggcagatttcatatttttcagtagcaactgaacactgtagcaactgatctgtctaagacatgtttggaaagcacgttggttctgagaaccattttttccaagtttgagtgaaaacacaggtccgtgcacacgcctcctgcctttagaattccacagagcagtcacaccttcagtacattcaagccagcgatgtcatccattcaccggctcatgtctttgttcacaccaatctggtcaccctatttgactggtgcttttcaaagaacattcttggctgtctgctgtgcctctcgtgtggaaagcacctcccaccgtgctaccccaccccccacctttctgaagaacatcttccttagcctcaagtctctcggtttccataagctgagcagattaagtctcgaggactgacaggtttttgatgagccctgcctgcactcctcagccttctcatcaaatgcacctaggcagatcttgtttctagatgattccagatcccttgctgctggactccggtctctggagccagacatttcttcacttccttacctcactaatcgcaagtcaccgtgatgacatgtgtttacctgtcatggccagactgtctcagcctgagtgccctgtgccccttctgaaacccacctttcatctttattttggctccaaactgactcagcatctcaggttctcccttctgtcagctggccttggggtgggggctgttcaaggtatttcgtgtgtttatcacattgaagttttgcacaaggccatggcatttgggggtagaaatggacgtggggaaaacatctttaagccaggactcactcttcctagacaccaaaagtccttccaaattcttttcatagcctacttgaaactgttgctgtagcttcttccattttctttatgaaatctttccttctgctcacacattggaggccacatctgtcactgtgttgcaagtctcttcccagaatcatgcaaaacccttatgtatccaccctacgtccagctcctaagtttgcaatccacacattttgggtgttcttccaactcttcccctccatccccattgccatgtgggctcagttacccaggaaattggtccagtatgtatctggtagatgcatatcactgggtgtttattatgcactggatagtcagctcaggactcttgcagataaaaagatcaagattctgacagtttgtagagtacagctgccgtgagtggtttctggtcacgacagggatgctgcatacagggacttgcagggggcctgaccaggtcagctcagccacaattccagcctgagtctgggagggactcctgaagtcccacctcacctgaggagctactggtaactgatggctgctgagggaaagacagcctgttcacttcataggcccacatgcttgtagatgatcagacaccgagaaacagcctattgactgcataggtccacgtgccggcaatgattggacatctgtacacgttctggcagcactaagtgggcttagagggtttaaaaaagacaacatgaatctgggaagacaaagtgggggtggggagaatgggaggagggtgatctgaaacttctcaaagaatacaatttgtttaaaatatttcaaagtgccttttatctgaggaaagagtcctatcgcacaaaaaaaattcagacatagcatagacgtgtgactgtcattacagcatttaaagaagcaacatggagtttgttctgtaaggcccagtgttgttgtgttatctatcattccagcccatctctaagaaaccttccacttcccgactgcttctcacttacagccagcagaggacgcccacagacaatgttctgtggttccattgctccagagaaacttcatctgttttccatatacttccccagaaagtcctggatttaacctattctctgagcagcctaaagcttccacaaggctcatctttttatggcctgaaatacccagaactgtaatgaatggaaactgtaaaggcccatttgtcttcttaagttaaaagtaaggttccagattaaaatatttcttgaatgaaaagaaaaatatcttgatttgggaacccagtccttgcatagagatagggttgggatggaatttgagaatacagaccttacggacacattcacatgggttagattacaagatcagccttttgctacccctgactctggacattccagagcagtttctgaagggtgtcactcactctgcttcttcacagagcccctgctacccagcacaggccagccatcacacactgcgccacttctgacctcacctccgtgaccccccttgcctgctacccagcacaggccagccattacacactgcgccacttctgacctcacctccgtgactccccttgcctgctacccagcacaggccagccatcacacactgcgccacttctgacctcacctccgtgaccccccttgcctgctacccagcacaggccagccatcacacactgcgccacttctgacctcacctccgtgaccccccatgtcctgtgtcctcagtttacctcttctttccattttctcactctctcccctgccactctgaactccctggagaaagtctaaccattgggctgactggttctacttcgggcttatgcccatcaccctaggtggccactcacagagccactgagaccctaactgaattctctgtgttacagttacttgtgaccagtaatgataaagttcagagatgtgcatctcccagtgctgcaggcgagggagttcagagtgaaggttttagcactcctgggaacggggaaacctattacatatacatagctctaccacaggcctgatggacaaagaagatgcacactgtgagtccaaagggctgaaaagcagaagaggcaaatccacttcctcagaacattctataagagccttcagtcagtcagctgttcgctgcagagacaaagtacccaagaagatacttgaaggaaaaaaatacttattttattccttgttttgaatgccttagtccactgtcatttagttcttgtgttctctctctctctctctctctctctctctctctctctctctctctctctctctccctctctctccctccctctctcaagacagggctactctgtgtaatatacctggctgacctggaactcactccgtagaccaggttggactcgaactcacagagacccacctgcctctgcctcctgaatgctgggattaaaggtgtgtgccaccatgcccaaccagtgttatttcttttggtataaagtgagactagacatcatggaagacagcttgtagctgagcaaagatggtcatgtctactggaaaggaagcaggagagagatggggaatatggcagacaccaaggacaagatgtgccctccagaggcccctctacatcctccaccaggatccagctctccagggacagaccggttttctggactcagttaatccactgtaaggtcagcatccttacgacgcagaccttctcaatagcactgtaaactagagaccaagccttcagcggcgacctcagggcatagctcatgccttgaaaggccttaattcttctctggagaattaagagcttactgagtaacttgctgtggttactcattagcttgctaaggcattgctactgtggggtttaagtttcaacatgcatttggaaaggatattcctctctcaggctgcagaatctatctaccaaagttcccttgcttttgccccaaaatcttgtcagcctgagtggatttcgggcccctgagatgagatgaggcaggcacacctttggctgtgtgtctgaggaagtttccagaagaatcagctagcaggattgtctagtttgtcctaggagcccggaaggagttaaaaatgggggtgggtcagggtggggagagggctctgaggtacagccactactttctctctgctccctgcccaccatgactgtgttgctttgctgccctgtgtcctcccccgcgatggattgaataaactctgatgtcgagagccaaagcaagtcctccagttgtcttcctagctatttatcatgctctttccttctcaaggccttaacagttcctcatactcttgttcagatgtttatatttcaaagtggaaaatgtggcagctaaaagagaattccaccccccaccttccccatcatgaagagattccatcggctcccacctttacctccagttctgccttcagacatgtacagggggtgcccatccagagacctgcgaattagcgggcctccacagtctcctcaggttgaggcaggaagccaagggagcccgagcacccagactctggccccgcccacctctgggcctcacgatgtctaatgataccacgatgtcaccttggaacaggcttttcagggctcatttgctctcacaccttctggctctcctcgatttcagtgcccactctttctgagacccttcagcagtatgtcctcctacgtcacgcctcgtaacactcaggtgtctcaggcagcgctggctatgtcgttcatgggggagacgccagggttcttggtcagaaagcattaagaatcacaagatggtggcagctgagcatcaacccaggtgcaggaactccgtcagggcaggaccgcatttgactgcactacacaggctgcatgtctctgaagttggttttgaccagggcttagggcatcggtctgcgactcatccagccccaccagctaggcggtctgaggccttcctgtggcttgactctccagctgctactctcctgttagctgtgaccgctcagtcgtctgcttggatgccttagaggctgctctcccctactttggttaacacagcatcctggattttcttcccaaccactttacttggcattagtcagaggctctactcttcacctaggggctgtaaccaaacactaagagtcgacttcgttctcccttttcgctcccacctcacactaaatccactgatgaagctctggactcaccagcctgtctctggtctgacctcactattgcccctgaccctgcaaaccccagcgtgtctcaccttcgccactgcctcctactcttccatgcaacacatgctccacaccaggccagattcagcactgcttaaaaagaatcaaattgggccatttgtcacttcaagctatcaatgtgctttagaattaaattaaaaaaaaaatcagggtctccatttgtaggctatgcacgcccttaccaacctatctgcaagggctttggtcctgttgcctgtgcttgggcacaccgacttccagttctggaagcactctgcttggggtttctcaaggccgggtcactgctctccttgaaatgccctttctgagattttgcgatgtcctatctggtgcttgttgagcttcagagaaaacaaggtctttccacagagcctttgcttgggtactctgtccgatgggttccagcgtctctgcatccgcctccttagtctctgcctgacaatgcggttttgagtctgaaatgatctcattcatttgcacaagtacactgtaagttccttaaagtcaaagctttttctacttgatttactttcagatcctccaggaatcaggatgcgccttcacgtggtagctaccgccgaaaatgctgtgggatagctgggctttttctaactttcctctgtcttggagacattaaattaaaatgaggccaaagcttatttacatttgttatctctagtttctagttgctgttattatgatagaacaatggcttggtctagaggtttctagcttctatctatctatctatctatctatctatctatctatctatctctatctatctatctatctatctatctatctatctatctatctatctatctatctataatctatacgtttggtttcagaagatcatttggacactggagaagtgactgagaatttgcatagtctcagtcccagggcctctatggctggctaggatcagaaggaatacttcttgctcttatcatcaaagtcttccagagtgtgagcaaggaattattccacttgagcctcgagcgacaaggtctgtgggcgttcttttcatctgccttccctcccctgctcatctctaactgggcactggtttcttccttactatctaggaaacagccacaaactgagggctacgggtacagtggacaacttggcttagttctctttattggagaaaaacccaattcacattctctactgaggatgagagaagtaaccttcagtataaatatgatgctgcagagcatttctgttgttgtgaacacatttaggattagttagcataaatgagcaactgagaggaggaggagtaagtgagccagggagaggaaaatggggaggagggaatgagtgagcagaacagggagagatccagtgcatgaaggggtgagaaagcaaaccaagaggaggagggaagactgtgatatgggcagagggagggatcactatgttttttcagcaagaccaggagctcattaactacatattcataaaatagctccattgcctgtccattactgctgacagcatgatggctactctagacacctcactagggactcactccactgtgtgaagagattggaaaactaatgaggggactcccttgcagctaggattttggaaccagattactggtgctgattaaactagaagagaagataaaggaaggtgtgctttcctgagattccaaccatggctgctgtgcataatgctggtcagtcaagcaagaactctcaagattttccagcagctaagcttcagacccaaccttgtgtccaggctgctagaatattggcagctcatctcagtgatgagacagcttcttccaggtgtcctcggacaggcagacaatgtaagaatcaagtgttatggcttggggaggtgttctggggggataaaaacttgcttctttagttcctccaaacattttacaatcacctaagacttctgtaagtcagttccttcttgcactaacctctcaccctgacactgctgcatgctgccttagcagaaattttgccataactctcctcttctacccagataagcctcccacacttccacaaactacttccccagagtcatgatactccaggcatctcaacacccacccagtcagtacctacagtctcaacatcacatctgccactcaagccattcatttatgagtagaaaaaaatctataccagtccagccagcatgtctgtggacctttacatggaaagatcattaatgggtggctttctatgtaagctacttttctcgttggtgttccaaacagaacaagcttaaggtaaggaaagtgtactctgattcatgtttttaagaaatttcagttcagtgtattggaggaggtgtaatggtataagggattgaagctgggggtgtgcatagctttcattggcctaactttaggaacctctttctgtccagcaagccccacctactaatggctccacaaccttcaaaatggtaccatagcttgggattgagcattcaatcatcagcttgtgaggaaactgtagcaccttccacccctaggtcatcttggagggtctctttgttccactagtaaccgagatcccctttccacaatgtgggcttcatggtgtgctcccagctccactctgcaggacccatgctgggtcttgtattctcttgccactgtcttgtatttctccatagtttccaaacaagagactctgtattttcatttaataccaagtcctacaaattatacacacaatcctgatattccactttcttctagaacctgggtcatctttgagcctgaccttgaccttaggacccttcctattctgattagtgactatctctcatatgaattcccactcccttctcttaccacactgctagtctctgccctcctctagcctgtagtgtttatatgctttattctttttttcctgtgagaagcccagagcctgctatgcattaacacttcatggttcagtgcagttaccccaggattcagcaaatcaaacaacaatgatagctttcggctgtaggagggagcaccacctctcctcccattaactggtttgcaaacttggctgccctgggagcgtaggtaagtttactttcaggttccatgccagagatgccaactgaagtgacctggggtaggagctagaaactcagagatttaagaattttaaattaattgctattgtgtgtatgggtgaatggattgcaccactgtaacaccctttctttggtgaattccattccctgttagcagctttcctcagcaggtgtcccatagctctgatatcttcaacatttgggggcaatccaggcctcaccttcattcacagcattgcctaatgtcctttctaggcctccatgcagggacacccctgatacagaccttgcttcggtggctttccttagtcacagagagttccataacccttttcttctatccttgactctaaagcacaattctctgccaagttctctgcttgctggggctcaaccatgactcccttgttcttttacatcttcatcaattttctggtttttatggtttccttccctgcctaagcttgactgtcctgtagaccaggctgacctcaaactacctgcctctacctccagactgctgggattaaaggtgtgtaccctgagacctggatctaaatgctctttaattccttttacagttgggggcttacctgggtgggattttgccctgaggccactacttcctttattccattcatgtcaaaatgttatcacctaaaacacaggactcagctccattccacttcctggtgccccctttctcctcaaattgtacattttgtaattttcctctatcagcttgttccttttcattatagatcttcataagtgtgaacattaataaccatattctagagtcaatgctaggctgctttgaaatttcctgtgctaacacagtttatccagaactcttcaatttagccccaggcagactttacaaataggacaacaggcagccacattcttcaccaaaatatcacagaatgatctctaggtcacgtgctcatattcttttctgaaacctcttgagtcaggcccccacagttcagagacaccattgtcttccatggtcctactaggatggcccattgagccccacttaaagtgttgaactgcttttctaacccaaagtcccaaagtctacatttctccaaacaaaaacacagtcaggcctatcacagccatactacagttcctggtaccaatttctgtcttagtaaaacttttatcctgtgaagagacaccatgatcacagcagctcttgtaaaggaaaacattgaattggggttggcgtacagtttcagaggtttagtccattatcctcatggtgggaagcatggcagcatacaagcagacatggtgatggagaaggagctgagaggtctacatctggatctctaggaagcaggcagagaactgccacactgggcatggcttgagcatctgagacctcaaagcctgcccccagtgaccacttcttttaacaaggccacacctcctaatagtaccactccctagtagcctatgggggccgttttcttttaaacgaccacctgtatgaagggacaatagcactgagccatgcatgtgtcaacaggtccagggaaaggaggaggctgcaccccttctctcctgtacccctttccctcctgcacccccttttcctctctggcactctgctcacctgctttacccatgaacttactgtaggcttctgagaaccacagtgcacactccaggtcatgcatcccacttaggactcattgtgtctcactgctgtgcgccctgaccatagggactaagacacatttgcttttagtcgcctagagaagcctggggtttgcttatacactgggtggtcagggctgttggcttcttttctgagtttgtttggttttctcactcccaacccaaaccctcatggccaaggactttggatgaacaggagtagggagtgggagagaccaagaaactccagtgtgcaaaactggaaagtggtgcttagggcaaaaaggaaaggcagagaatactcagcatgaatagacatggctaagagccacactggcatctgggacatcatagggccattaaggcaagttctgcccctcaggggcagcaccgttccccttcattttcatacacatcacctgctagctccctttctgtcccaaatgaagtctgagaagcttacaggatccctagataacattgatagcaggcctacaatcaggatctccttccctttgcgctcaaggctggtttcagtgagtacacccctccagaggttgtatgaagaaatgcatatgaacacacaaattcccaatgaggtctgcaacctcaaagggtaaaaacactgctgtaagtttctaagtgcaaagaaagcccttgcaagctggacaagtggcccacacctctcacctagggtgtcttctggatattacatgtaagggaacacagaagaaacgaccaggctggtgggaaagcacgacatggcttccctagctctgtcttgtttttctagtctaaactccatgggctggaccactgcaaatgataactggtggaggaagttcctaggactgtttgagctgcttttagttggttagtagtggaccaacaggttccagttggccactgttggcaacctctgtgaacctatgctggcaggagccaccaggtggcagcaagcctcccagagtagcagcctgtgcaggtggccagcagcctcttccttagtgagacatcttagcgaatctaaactgttctagctgcaccccattcccttctcagaggaaagcctggcattgattagatactgggtcaggctaatactggcagccgaactagtaatagtgacctatcttccagaagagccttccattgggttggcaattttgatctgggccccgggacatctggcggatctcactgatgctggcgccttggcgccgattatgcagccgattaagttatttggaatggtgagttcatgggtggtttgagtagatgcatccaaacttgcccaatagcctttcacctctggagagctggagccaattccggcaaatcccaccctgccgtgcatcatggcaaagtgagactgttgtcttgtcaactggttcagcttggccagaacagtgtaggtttgctcgtaacccccttctgctgttttcccatgatccaactgtgtgatttcaggttttaaatagtttgtaagtgttcagtttctacactttatcatccactaagaatttaaagaaaaatcacattctctgttcagccgttaatgctgggatccatatttagttttataagcttttccctgtttttagtttcgtttgagttctttggctcatggattttattttctgtttgtcgataagaaatgtaagagtagaatgttaataaatttcattttagttctgtaatgtcaagaatttaagaattaaaaaaatggattggttaaaaatgaaaaaaaaagacatagtagtgtaggaatgaattttgaattttatttattgttgctcttcctcactgttgagggaagggaatgtactgccccagggtcacatatttggttcttatgaagggcaggtagaaaaatcaccctccatatccgtacatgtagaagagagaaagacatgggggttgtttctgacagacagcgattacgatgaagtgctacaaatatctacctagaggttttctataactatgatgcatcgtctctctgaggcaaatattgaggcgtgggcacactgagaagtctgagtttaactctatgagacacttgtcagcagtcatttgcccatgtggcagcatcatttcctgtctgaccagcctcctaagaaagcgtccgcttcttgcttagcagtccttgatataaggttgccattacattttaccctatttattctaatgtgtttgtattagtaccctactgtggttttattttacatatcgtactagcatcttttcatctaacaaagtgacagttcaaatattttggtcattttagaaattgacctgttttctcagggataagttttgagtgtgcctctcctcctttcttctccccctcctctttcccctcttcctcccctcccctcctcnnnnnnnnnnnnnnnnnnnncccccctcctccacttcctccccttccccccttccctcttcccccttctcccttccagccttccccctctcccctctctttttttcttttttgaattgcattttattgagtacattgtaagagagcagcaggctgggaagtaggtggattaccacctacagtcaagagtctactaaagtagattctaagtacatctttagtcagatgtgtgaccagagttactttctccctctctgttacctgcttttcaatctctcatgtatatcaaagagtgaaaagcattgatcctggtggaatctagtaccacagttttcctatgtggattatggttttagtgtcaggagttggtcttggtcatcttagcccaggatactctgtgaagaacaaatgcattccataaatattagggattcggagtctttccttcagctacttcctgcagtggcttataaacatcttcttttgttttttccccatactagtactgcccacaagaacatacccacaatcaggcataacaaatatggatttcccatctgaccgctcagccttctgtccccaggcctccccaagatcacagaagcagcattttctaaagtatcatttactgctcagatggagcagccagtgcacattttatagcagaacactctggaacatcactgcatcctctggaagctcatgccccaaatattctactcccaaaataacaaaactcagtcacctatcaactgacatttcagattttaggcaccaagccgtttgtttgtttgtttatatttgtgccgtgcagcatcttcctacatacgaaaggaacagatattcttagaggcttttcttgaatctaagtgcaacttcctcttcctcctcctcctcctggatctgattttaaaccagctctgttcatagctggttcaatgccaaggaagagaaggagaggaggcagtggctgctctcagagtcaggagactaatgagtcatccggagcacagttgcctttcccctcatcttagtctcagttcacataaaaatatttacttttgctatcaagatggctccctggtatttgccacataaacctggtgacttgagtttgactttcatctagattgtacagaggaagaagagaacagttgccctctgacctccatttatacacatatacactgacaagtgtacagatgctcacacgtatgcatgcatgcacacattcatcatacacactaaataaacaaacaaacaaacaaacaaacatacacacacacacacacacacacttgctattttcctaaatttaccccaactcagtttattataaaatacatgagctgttttatttttgacatattcctattttttggctggacttagttaaatggaacaattccctgaaacataaaggaaactgggccaatgacagaagcaccagagatctgtgtccccacctagggaatcacctttgcagaatccacctagtgcagccatcttggatttctggtgtctcatggaggtctcagttttccaggagaaggtttgggtgctaaatttcatttaattttggtaaattcaagatcttgaaacatgagtattgtcttagtcaggattttctagagtcacagaacctctctctctctctcgaatttattggaatgatcttcagacttcagaccagctcattaaacaatggctagctgggtgctgcaagtccaagaatagagtagttgctcagtcccacaaggctggatgtctcagctggtcttctacctgttttggaatctcaaagaagtaaactccaatgtcagtgaaacagtgggtgtcctagcaagaggaggacaaacaggcaaagagaaatattccttactctatgtccttgtatagacttctaacagaaagtatagtccatattaaaggtgtgtcttcttgactcaagatccaaatcaaaggtgtgagtcttcctgcctcaaaggtcctgactaaaaatggatccacctacttcaaaccaagcagaaaatcttttaaaggtgttccctacatttctggattgttcaagctggcaaccaagaatagtaccacaagtaccaacctgtctctcgccgccacccctgtgccaggcagctgggagtacatgccctgggcagcttgtgctgcctgctggatcaaagagactggatcatcaaatgacagaaatctgtgctccaggcaagccaggggcagtcatttttgtttactctattctactccagcactgtgtgagcctccctatttgattattgactttcagaaaatttaaaggcccatgcttttgaattgacttttcaaacttctgattttttttcaaatgaaatagcctgtgacatttacaatagacaaaattttaaaagccagaaacccaacacctgaagaaggggaaaatctgaattccagagtagtgttttcaaatgctgagtttgcgctttctctgtcactgtctctctgtctccatctctatctctctcttcttttttttcaagaacaacaaaataacaaagtatatgaagaaacattaaagtatgatctattcaaaggaggaaaatagatcatcataacttatccgtgaaaagaagatagaaaacataaaaggaaatgaaaagaaatgctgaagctaaaaatcatacataaatgaaatgaaaatcttactagagtgttttgaaaccagatatgagaaagaaagagaatctgcaaactcaagggtgaggcattggaaatagtcaagtttgaggaatataagccacattagaggaaagtgctcagagcctaagggatctgtaggtcatgagtcaacagagaaatacactcattgtttgagtctcaggggaagagagaaaggggaagagaggatgtctaaagagcaatgactgaaagcttcccacacttgatgaaggacatgaatataaagaaccatgatgctgagttaactacaagtgtgatgagcttagggcccgcaaagatgcgttaggatgcgttacagctgaactttcagaaaagagtggtaaagagaaatttaaaagcaggtggagagaagtgactgatcacctacaaaggactctcaatacgatcatgagacatttcttatcagaagcttttgatctgatgatgaattcaaccttctagaaagaggaggaactgttgatcaagaatcttttttttaattacatattttcctcaattacatttccaatgctatcccaaaagtcccccataccccccccactcccctacccacccattcccactttttggctctggcgttcccctgtactggggcatataaagtttgcatgtccaatgggcctctctttccagtgatggccgactaggccatcttttgatacatatgcagctagagtcaagagctccggggtactggttagttcataatgttgttgcacctacagggttgcagatctctttagctccttggatactttctctagctcctccattgggggccctgtgatccatccaatagctgactgtgagcatccacttatgtgtttcctaggccccggcctagtctcacaagagacagctatatcagggtcctttcagcaaacgcttgctagtttatgcaatggtgtcatcgtttggaggctaattatggggtggatccctggatatgacagtctctagatggtccatccttttgtctcagctccaaactttgtctctgtaactccttccatgggtgattgtttccaattctaagaaggggcaaagtgtccacactttggtcttcgttcttcttcagtttcatgtgttttacaaattgtctcttatatctcaggtatactaagtttctgggctaatatccacttatcagtgagtacatatcatttgagttcttttgtgattgtgttacctcactcaggatgatgccctccagctccaaccatttgcctaggaatttcataaattcattctttttaatagctgagtagtactccattgtgtaagtgtaccacattttttgtatccattcctctgttgaggggcatctgggttctttccagctatggctattgatcaagaatcttatatccagcaaaactatccttctgtaatgctcactcagctcagataaaggtgcctgccacccaaccagataacctgagttcaatccctggaacccacctggtgaaaaaaaaaagacctgacccctgaaaattgtcttttgaccttcatatacgctcttcatacacacacacacacacacacacacacacacacacaataaataaaaagtgtttttaaaaagtgagagaggggggctggtgagatggctcagtgggtaagagcacccgactgctcttccaaaggtccgaagttcaaatcccagcaaccacatgggggctcacaaccacccgtaatgagatctgatgccctcttctggtgcgtctgatgacagctacagtgtacttacatgtaataataaaaaaaaaagtgagagagatggtaagacattcccagagaaacaaaagttaagtgaattcattagtctcatcctgcaagaagttctaaatgaggtctggaaggtcaaaatggaaggtcataaccataactcaaagacaacaaagacatacagacctcaaaagatgtgtgtgacctacaattattaaagcaacttataacagtgctgtgaaactataaccttatttctgcataatttgaaatgttaaagatcactctagatgctatcataattgcaattttagtttataaactatacactcttcttaataatttaatggatttaaaacctttaagattaaaattttgtaattttcttggaattacaagttatataatgcaatttggtgccatttaagaactgaagacaaagggacaaaggcattaaaagcagcatatgcatattattaaagttaagttgggataaatcaaaattagaatggaatatgtttggactgttaaacacaaatctgatgtcagtataaaacagttaaataacatatgcaaaagaaaataataaatctataccttttgctgtaaaaattcaattgaagaagatagtccgtcagaaaatgagggaccagatgctataaatgatgtgagaaatgaatagcaaatgtacagaattaagtcccacatcatctacgattattttgaatgcatttttctgaatgaaaaagaaaacatgacccaataatgtgctgtctgtgtacacaaaacgacagaagattaaaagtgaaagctttacgacaccttccctgcaaatactaactgaagtacgaggacaactatactcacagtcatcaaagtgctctggacctgcggagaggccgtagaggagccggagcaaggcctcaaataactgaaatcaaaactagaattggagacagtgccacctgtttcacagacacacaatataagttagtacattggacagttacatacctaccagccaactccataactagaataggtggaagagcatctcagacatgccacactactgagactcagcccggaagaactaagaaattggaataaacctacagctatggtcaagactgaatcagcaattgcaaacctggaaaagaaagacctgatactccaccaatgaactccattacagtattatgtttttatatttatttttattttatattatgtgtgttgagtgttatgcctgaatgtgtgactgtgcacccagtacccttggaagccagaagagggcatcaaatcccccagaactggagttacacatgtttgtgagccaccaggtgcgagctgggaatcaaacctggttctctggaagagcagcctgtgcttttagctgttgtatcactttccagcctctcccccatcacaatctccactcagaaaaatgactgataccaattcttctcttttgcaaagaagagagtgagagagagaacaactttctagcttgttttataaagtagccttaccctgaaatcaaagctagccaaaaatgctacaacaaaacacaaaccattatcctttatagcattgctgtaaacactcccaaccaagacaatggagctgcaattcacagtgtgaacggccgtgcatcgtcaccatggggttcattactggaacccaggataagtcagccttaaaatgtcaatcgatatgataaaccacgtaacagaaggaaggaaggaagaggaaaaatgcacgattatagatgctgtgagcttagccgtgctcccccacacctgagcacggattcatcagcaccaagcatggggtcctccactcttcaagcatggagtcctccactcttcctgattcaccctcagtaaggctggtgttgagcgcactgaagacaggatcacagtcttctgagaacactgagctttccaaaattggtcttaactatggatgatataaaccagttatttaagtatccttgcattcatagaatattctagacatttggcatggatgaagataggaaaagctgtctaactttgtggactttgtatataaagtatttagctttataaaccacattggaaatcattctcttttctatgtggagactattcttgtttcccacagtttcccttgtattttgtgtgcagaaacctctctctttctttctctctctctctctgcnnnnnnnnnnnnnnnnnnnnnnnnnnnnnnnnnnnnnnnnnnnnnnnnnnnnnnnnnnnnnnnnnnnnnnnnnnnnnnnnnnnnnnnnnnnnnnnnnnnnnnnnnnnnnnnnnnnnnnnnnnnnnnnnnnnnnnnnnnnnnnnnnnnnnnnnnnnnnnnnnnnnnnnnnnnnnnnnnnnnnnnnnnnnnnnnnnnnnnnnnnnnnnnnnnnnnnnnnnnnnnnnnnnnnnnnnnnnnnnnnnnnnnnnnnnnnnnnnnnnnnnnnnnnnnnnnnnnnnnnnnnnnnnnnnnnnnnnnnnnnnnnnnnnnnnnnnnnnnnnnnnnnnnnnnnnnnnnnnnnnnnnnnnnnnnnnnnnnnnnnnnnnnnnnnnnnnnnnnnnnnnnnnnnnnnnnnnnnnnnnnnnnnnnnnnnnnnnnnnnnnnnnnnnnnnnnnnnnnnnnnnnnnnnnnnnnnnnnnnnnnnnnnnnnnnnnnnnnnnnnnnnnnnnnnnnnnnnnnnnnnnnnnnnnnnnnnnnnnnnnnnnnnnnnnnnnnnnnnnnnnnnnnnnnnnnnnnnnnnnnnnnnnnnnnnnnnnnnnnnnnnnnnnnnnnnnnnnnnnnnnnnnnnnnnnnnnnnnnnnnnnnnnnnnnnnnnnnnnnnnnnnnnnnnnnnnnnnnnnnnnnnnnnnnnnnnnnnnnnnnnnnnnnnnnnnnnnnnnnnnnnnnnnnnnnnnnnnnnnnnnnnnnnnnnnnnnnnnnnnnnnnnnnnnnnnnnnnnnnnnnnnnnnnnnnnnnnnnnnnnnnnnnnnnnnnnnnnnnnnnnnnnnnnnnnnnnnnnnnnnnnnnnnnnnnnnnnnnnnnnnnnnnnnnnnnnnnnnnnnnnnnnnnnnnnnnnnnnnnnnnnnnnnnnnnnnnnnnnnnnnnnnnnnnnnnnnnnnnnnnnnnnnnnnnnnnnnnnnnnnnnnnnnnnnnnnnnnnnnnnnnnnnnnnnnnnnnnnnnnnnnnnnnnnnnnnnnnnnnnnnnnnnnnnnnnnnnnnnnnnnnnnnnnnnnnnnnnnnnnnnnnnnnnnnnnnnnnnnnnnnnnnnnnnnnnnnnnnnnnnnnnnnnnnnnnnnnnnnnnnnnnnnnnnnnnnnnnnnnnnnnnnnnnnnnnnnnnnnnnnnnnnnnnnnnnnnnnnnnnnnnnnnnnnnnnnnnnnnnnnnnnnnnnnnnnnnnnnnnnnnnnnnnnnnnnnnnnnnnnnnnnnnnnnnnnnnnnnnnnntgcagggggagagagagagagagagagagagagagagagagagagagagagagagagagagagagagagagagagagagagagagaaagagagagagagagagagagagagagctgtagcaactgaagccgacccagaaaaggcaatggagctcacagtcccaggaaacatgaaagccccaaaatgtgaacagttcaaaggggttcagggaggcaccattgactaagaattttcctgaaggctggaagcctttggagactgagtcttgttcctagcctgagtttttggagctgctaaatgggtaaatgaagcagaaagccaggcccacctcatccccacttctccacctctttcttctttctcttctttccattagttcttacacacacacacacacacacacacacacacacacacacacacactcttactctctctgtcatcaaccctcatgctaccatggagacaatatatgtgcctggcttttctgtcagaattcatcactatcgataccaaattcctttctaaggtgggttctgctcttttcagttgtcgtggtcacctgactaacattaaagacatcagatgtagaaaatgaggtacactccagttctgggcactgaagacgaggcattcagagaacaattgtttcataaatctgttctcaagggtgagtgtctggggaaggttcctgtgtgagtgtagagcacagagtggacatctctgtgctacctctagtctcacagctcttctgtgatgctcttcacactgaagtggaaatggaattatcacgacttccttggctgtttgcagcaggaggcatcaaccccacaagcttcccttcagcctgcagatggagctgggttagctcagccctctccttcccactctacgcccacagtaggcgtcaatcagcatcttcgtggttcttctaatgagcttgggcagtgagtgagctggtaagatcagcaggattgcctaatatgtccatcttcctgttggtgtcaacaaagcctgggtggtaggtttgaggtttcagtactatttttctgtcagtgttttttcaaggcctgatgagtgtcacatatgacacactgggcggaagtggaagtagaagcatgaggttgtttatatataatgcttgaagcaacttgggcggtgaccgacggcgtgagtctctcccccaaagttcacacattgggaatttagtctggaggtggggcctcacgaggagattatgtcacatggagggatgtctttatctggagattgttacaaaagtgactccagccctctcttgtttgcctgctccttcctctagccctttctttccatgggggcaatcgtagctcagaggccagtgccatgtgcagccttcagaactataaaccaagtgatctctgatcttggtgaattactcagcaggaagtattctgtaaagcggcagaggcaaagaccaggagcttcctgtggtcggtcccatggctttgttctacccagaggagggatgggctgtctgccctccgcacgctttcttactctataaccgcttggatttgtaatgtgggcagctctcttcaccacaagatgctgttcctttctgggtcttgtgccctgactatggatatctggctttagaatcactagttggagatgatcactctagctctgcaattcagacccttgttgttaaggtggaggttgcactcaggtactacctaatgaaaggactggtctgtacacgggaataacggagacctgaactgtagcaggtatttgtaaagccttgctgtgttaagtagctgactgttattactggagtaggcataaatccttccaccagccatcacctgcactggaacaagtgaacacacccagaagccccacaaacagaaaaacgtgccattatttgttacaaatataaagccccttgatggtaattgccaaaacattctaaaatgcttattccttcactaaatactcatcaacgattgtcttctggccagacccctcattgcaggctatatggtattgtctctgtgtgacactcactctgtggccctttctgtgtgacacttactctttggtactctgtgtgtggcactgtctctgtgtggcactatctttgtgtggttctctctgtgtgacactcactgtatggcactgtctctatgtgacactctctatgtggcattgtctctgtgtggcactatctctgtgtggcactctctttatgacacttcactgtgtggcactctctgtatggtgctctctctctgtggcactttctgtgtggcaccctctgtgtggtactctctgtgtggcactctctgtgtgacactcactgtgtagcactgtatgtgacactctgtgtgtagcactgtctctgtgtggcactgtctctgtgtggcaatctgtgtgtggcactttctttaaggtacttcactgtgtgacactctctctgtgttggactgtcactgtgtggctaagcattcttgttctctagttccaccccgtcactttgggcttctgagagtttctggaggatgggtggtacacaggctcagatctgacactgacctgctgtctgtcaagagctcagcaatgtcggctgtgtgagcagttgggaggctagcgtacctaaggtatacaaactccaagcctcacagagacccctggctcctccttgttcactctacactcagcctgtgtgtccactctcagaggcatctcttagggggtcctttcccaccaacactttcttaaaccaggcccgtctggtacagctggagtactgtgtggtgtcctgcgagccttccactcccaccctccttttatccctcactttcctcagtccttcatctcatttgatactaaatcaactacatatttataatgatgctgtttacagcaccagcttcttttcaactcttgtgttttagagctaggcaccagctgagacacgtccattatcatgttaactcctgtcggttaatcagccacagagtgcttctgacactcaaagtctcatggagaaaaaaaaacaaattgtagagcagatagagactcagccatggccactgtcacagaagtctgtataccttgctacctcattctgctgactctgcactggaggctggactgggggccaggatatgagatgagcagggacaagcacagaggcagcgccctcattctgttacactgcaggtggagagggagacagaggaagaaactgccacgcatggtaaacgctgcaccacgtaccatacctgtccccggtgagaaggggacagggctagagaactactaagttcagatactgggccttctcatggaagtgcggcctgacttgagtctcaaagggtgggcaagaagttttatgagaaaatcagtgcaaggagcacactgtcctgcaggttggatgtagagaagaacagaaaagccacaaagactccaggtattatatgagcagcgtattgaggcttgatcttctagttgtgagccatagaggctcatgggagatttgtagtcaggagacaaacattagtctgtatctaagaaggtcataagatcagcaacctcatctctgctgactgtaggagccacggcctgttgggtcagtcatagagacagtcataggactatagccgtatagaggccagagaaaagcaggctgggatatgagtgaagatagggaagggtggtgaatctgactagcagcgtggtaaacttgagaatttccctccaatccctgtaagtagccaggcggatggatctgcaacttattagagaggtctggaggggagccgtaagaattctcctcccgtttctaatttgtccagacaggtttccacagtgatactcagctcatagtgagaaaacaccagcagcccctcccagccctatgaaccccctcctcacatctacagacagccccagtgcagagcctcgaccagggcgactggagagcataaagtgagatgctgcagagggggcccctaggaaagtttgtggttatttttcaggtcagtgggtcagcagatgggaagacgaggaggaagtggcagtgtctctgagacgacttctctgctcatacttccttctttaattttctcttgttccaacttggggcaaaaataagctaacttctgctgtagaaataaaacccagggttcatggcacacctcctatttcccttctcttactgccaacccggctacatgctacatcttctatttctcttttactgcagactaaaattcggcatggacaatttaattgcacaacatggtctttgtagtcctctggtgttagtgacaggtaatggctgcctatttcctcttagaagaaggtgaagctacacccaaggccacctctctgagcccactagtcctgccagctactgagtgcttgatgtatgtctgatggaaatgtatatttacttaattctacttatcttaatccatttaactgaccacacccagttacagtgactgctgtgttgtctagcacagtgttagctagccaggacttcttctctcttctagaataagggtacatctctggacccatggaaacctcaacccgctcttgctccggggaattctacaaacactgagtagctgcagtttcagcgtttgtagaattgtccccttcccttggcccccctatagcctgctctgtagcccatgctgagttcatctctcctccctgagaggattcctaaccaggagtgtgaagaccagttcacagccaagcttgtcactataacccttgtgattaagaggaattaaccattggcagttgcagatcacttacgaagagggactgttcagagaagtaacaaggaatgcgagccaaagccgagacccaccaggctgcttcttccacacttggaccatccatgagaggtctgcctggtaggccaggactgagggataagatgggacaggaatctcctcggctgagtagctggctcactgcgccccagctgccctgttccccatgactggggtcgacttccagctgtatatagtgtgtacagatctcaccacatgctctaacttacagtgggtggccctggacacatggccataccgaagatgggggaatgacagcaggcactaaagaaacattggctatatgataaatatatggtgagtgatgtcactttaggctctgtcttggtgctgtgctgccttcctgtcacatggctgtcacatcctctttgggtcgtatttaagaacacctcccaccttccccaggtcattcttcagggaacaggtgtttttagggatgatcactgggggcttggttattgtttgttttcaccataaagaatcatgaaatttcctcagaactaagtatagaagaacaccctagccactgggttccatgtttagcaaattacctctaatctacagtgtctttctggtctctgtgaatccccattttgtttctggatgcttctgacatcttccacttctcttgcctctagcaatgattctaataatatctgtgggattctgggagtggctcaagagacctaaatcctcatagacacatgtagcctttacctaattttttcccctttccatgttggttctatttggttctatggatgctcttcgtcactctgccgaaagaaaggggtcctcttcccatgtctgacaatgcttcagatgagcagccataagagttgctctgggggctggagagatggctcagtggttaagagcaccgactgctcttctggaggtcctgagttcaaatcctagtaaccacatggtggctcacaaccatctgtaatgagatcacatgccctcttctggtgtgtctgaagacagtggcagtgtacttacatataataaataaataaatcttaaaaaaaaaaaaagagttgtcccgggatgggcttataccaaggccattagagcagaaggggacgtcgctgataacctcactcttcatcttcttccaagtgttttgtgtgaaggacacactcacttttgtccatgtgtaccttctccacagtagtaggagatactcccacacatagaaagatacaatgttacatagtcgttagtcctccattcaggtctactcctccttgttgctccacagccaatgcctgtccatcatctcaccatcctggtgggtccttggggtaagtggtcagccccagggaaagaccctgtaaatagtagacagctgagaagaaagatggacaatacagatttaggtcctttctttcttttttggtgagggtgtcaagacacaatgatacaaaatgttctctttacaaaccaaatggccatcaagctgacaacttatcttccatggccactgtctatcacggccactgtctatccgatttcccgtgccgatggctgtccaatgcaaggctcacccaagcatgtgctgcaactcttcccgttccctagtgggagttaaggaatgaagccataactgtcttataggcccagtgcacacagtcctgttgtcctctgaattatgcagaagacagcttttgatacagctggagtcagtggagataagactaccatcccgtgtaaagttctggtgcttggaaggatgccgtgaacacgaataaagcctgagagctcagggcctaggagccaggaaaacaagagtccaaagcaccagggagaagtctccggttaaatgtgctaagggtgaggatgagtgaagataggaaatctgagtttgcagtgagagagagagatggaggacatgctcaaagatgggctccatccttatagctggatgtagtcacctgttgacagaaataagtgtgagcacacgcctgagtgtggtcagtggtttctgtgtgtggaatctgagacctggagaagtgtcagtcagaaacaaggagagaaaggacaggcctctcgagtcagttgagacaaaggatgaggaagaacttgataacttagccacgttattcacagctcagggatcagccgaagctaactagaggcacatgaagtagaggctttcctttgacagcagagcagagcataggcacttggtattagtgaggacagagcgccagtgcaaggtcaaggctttgcagagcagtaactgattggaaggccactgttgagccggctagagaagagagaaggcaggtgttagaagaaagggccagctagaaaccagggtggcgaatgggtcactctggagatacaggaaggagggagccagctgttgtgggtgggggtcactatggggatgcaggtcaagacccaagcaaatgatagaactctgtaggaagctaaaagacaattatagcaggcagtgggtggaaggatctggcctcaagtccagcttctgcttctgttagtgttggcaatctaactagaaaggtaagacaactgtatcatcaaagcccttagcccagcagagtaaggcaaacacagtggacaggcgactggagggcatgagatgacgcttggccagaaactttgtgaggtaccaagctcttgtgggctgacatgtgagtatgatctgttggagagaccctgttgggcagagagatccaagctacaggctggcttcccagaatggctatagaggaaagccaggcactttctggcggtctctgcagctgtgtggaccttactctaagcacagagcggggcactattttgtcccctgtcagatactcccacgcaggaaaaggaagcaccttccgtcagatgctgtggccacttcctcttcagaggctccagccaatctccgctgtgcagcaggcagggccggaggcagctggacggcaggagctggtcgtcagttgggctcctttcaggagcaggaccctgtgaggtgtgggggacaacagggtttcctctcagcctcccccacccttaccccctctctcttgactttgtgcttcatttccctcggtcagcccgcctatctgttcctctccttagctcggtcgaggagtgtgatgaccggggagcagatggcggcctttcacccacccaccactcccaaccccctggaaaggccaattaaggtgggctggctgaagaagcagaggtccatcgtgaaaaactggcagcagcggtactttgtgttgagagctcagcaactctactactacaaggacgaagaggactcaaagccacaggtacctgctgggtgtgtgtccctgcctcaggcccagagcaccggggcctgcttcaggcagggacccactgctgctttcactcctacaggccctgggatcagaaatgtccacctggggcagtgctgtggcctcgttgcgattttctctatgttcccctgggtgtgaggatggcagaaatgttctcactagcacagtgtggtttctggggcatctcaagtccagtctcatactataagggtggcactgagatggtaacccatcatggtagcttaagagacctgatttaggtactttgggggggtggtcaataaatatgtactgaacaagtgttatatttaattccaaacgcataatgttctcattctagttacgactctagacccttgaagtaaatcagtaagtagagtaggggagtgtgtagttgttagaaaagatgagtagggtgagaaagggagagaatctggtgagagagacgtttgggagacacgttgccatcttaagtgggttgtgcaggctgactatgcaggttgtggcaatgctaaggaggggttgcttggtggatctctgggacaagaacctcctgagcagagggaatagacaaacaggctagaggggcacatgtgacctgtgggagcagctcttgggggtctggtgggcaggaacagagggtgagaggtcagagaagtgaggtcaggggtcaggttgtaactatcactgcaaacactcgggcagttacaccgagtgtcacgggagccactgcagggttctgaatagagaagagacagccattatctttctgtaaacagatggttctgtgtgtcctaaaacaaactgatgttggagcggagagcacagggcacaggtggtatgggtaagtgcttacagtgttaggaatgccagagggagctgaaggtcagcggccaaattcaggatatactctgagagtagcggataaggacgaggataaatctgcaagatggttttcatctccagtctcaggcccggggctctttgccctctcctctatgctaatactcatgatggggagtgagggtgggacaggccaccataaaccatgactgtgggatcccgagtagaaactgagatctctaacacccaagacggctgcatacccacttagagttcacatctgtgatggtggaagcggggtggaagggctttactggagtttactagagaaaacagactccaacacttagaggtgatgctaacacgtacatggatattgaggtggctaagcagatgaacggacaagcagatgggtggaaccaaaatgaagcagtctctgagactccaccgagccaggcttttgtggacatctgtttgtggtggctggacttcctgttcttaatgagcaacttgagaggcagtggcacttcagtcacccaagcccacggaaagggccgctgggtagtggctgtctctgtgcagtgcggaaagggaaaggtgtttcccacagaacgctgagttctgtcgtggtgctacaattcctgttaccttttgcggaccctccttccttgtttaaaacaagacaatactgcctggcctgtgtttgtcacatgatctaataacgtaaaacacacacaaaaacctgttctgtaaaaatgaactagtaacaaggggtagaatagtcacgtgcgtgggagttctggccccttcccttgtaagaaattcccggcttctcaggaccaagttgcccgggaatgagtaggcagtgttcttcagtcctcaaggatggtttgtttgtgtgagatctgggaacattgtaaccaagcaagaaggcaagtgagggaaccacagggtcccttccagggggctaaaacaaacatgctcatttcagatctaaaactaaaagtttcttataaagtccttataaaggatttattttgctgtgtgttgctaggtatatttgattataaaggctatactgtgtactgtaggaaatttaagacaaacaaaaattattcataatcttatcaagcaatagctgcctcaatccagcagtccctgtcctcagatacttagaaagtcatcctgtaagtgtgaaataaggttctgatttagtaaaagtggcaataggtcacaaatattgttctttagtgttgactattattctacaatgtaaccaatgatcacggcaattaatatattgtataaagtttctgaaatttaaaaaataatttcttactgttggaaaatattattatcacaaaccagagctagtggctgtctttcaatctccacaatctccattatctcattaaaatagaaataatctatttaatgttctattaactacaccatcatttgttaccacttggggagtcccgaaaatatctagaaatgagctggaagttatagttgcaggctaggttcctgaaaacaaggaatgttccacttccacattcctgaatgtgggtaaagacttgactgggaaacacacttctgcaggaagagcagacgaaatggcagctgcctgagtgggcttaggggagctgctaccgtaaagctaccaggatggcacaagggagagattggcttatttcataattaaaagtcaatgtaagaaaataaaactcccaataataaatggaaaactgtgtgtgtatatttggtaaacaaatgttcttaatatttaaagtattctaaaattgtaagaaaaattcaaaccaaacggtaggaaaatggccaaatttaccaaagaaatgcaatggccaataaacatgtattaaaactttgatctcagtgataattagtgttacacagtgctcatgagtgagccaccatcctcttgtcaaagcgggagaacacctggaggacatgatgcccctttacagaggacctttgtcccacatctcgatgtgcaggaatttaaccgaacaggcctgtctgtggtgggctagtaaatgcctaacagcaggctctttgatggcaagtttgtttctgtgtagaatttgccaatttctgtggcctaaatgttcatgtcacgattgattcaaagtgctgcatgagggctgggaagatggctcagccgagctctagctgctcctccataggacccaagtttgattcccagagcccacgtggtggctcactgtctgtatctccaacccctctaatggttccacaggaggcagtgtggtacacagctatatatgcaggtaaaacactcatacacataaatcaaaactgaattaaaaaatcaaaatactgtgacatactatcactgatgccaggagctcagtgttatataaactttttaccacagaggtaaatcacaccacaggcataaaaagatgtggtaaatgacaagtaaatgacaagtttgggataacattatctttgtatctccttacttttaaaatgatgtggggtagctgtgtgcgtatgagtacaggtgtccaaggacccctgagacatcagcttccctggagctgacatgatgatgggtccctcagctctcctggggctgatgtgatgggtccctgtgctggctgggaaccaaaacctggtcctataagagaagtaagcactctcaattgctgagccctctgtccagctccaacttaactgcttcctagtacaagagctgctcactacataaaagtataacctttggtctttcagggctgcatgtatctgccaggcagtacagtcaaagaaattgccacaaaccccgaagaagctgggaaatttgtctttgaagttattccaggtaggtagcctgcatttccatcaaggtgacggtccgttcaaccatgttatgaactcacagtggcctttcatatagttaagaagctagcatcaagggctcaagggcggcccgggaccaataggggccgacttggtgcaatcccaggagtgttccaggaatctggatgtagcatgaggctctgggacctccctgtgagcagtcgtcatccatgctcacacacattgcggagtactacagcagagatgtgctctgagcgatgatcaactgtcagtggtcctatatgtccccacaagtttcagcttttgagaactttaagcatgccaggtgcagcatgtctgctgtgtgcatatgggctgtatgctggaaggtgcctgttgcaaatgaagaacatattaggagcaaagggaatttggcacataccttgcaccttccaccttggagctatttttccttcctccgcccgcccccatctcttgatcggagacagtcctagttctgccagaaatgctggtactgccaggaatgtgtggtaccacagccttgatcgcagcaggaaaggtcatgaggtcctttcttttagacctttccttgctcacatgggtggagaaggcagtgtgtgccctgcccagagccaccctgcccacacccaaatcctggctgtgcctctcgctgtatagcagcccctctaacttctctctgactcttctgacttacctgccatgaggacaaggatggcagagagcgttacgtggagatgactgaataaaatgttgggtttgatgcctagcacatagtaagtgccacgcagacgttgatattggggacatctggtggaaattgtgatgcagagaaaaatcctggctgtctctttactccaacgaaaagggaagatgaaatccagacaggtttcatgggttctcgtgcactctaatctgaaggtccagcctcttcctcctgccattcctgcctcttcccctatctagaaaaaccccacccttctctgtcctgagctgctcaggctgtaggatctccctctcctgatgaagctcctggaacacaactacccacaatagtgtgtgtccccacggccgcatgttctacccacaaagtcccatggaaggctccagttgaagatgcattgtgagctttccctataaactacctagaaggattgctctgagggagggaagggaagagcctgtccctcatcatcccattgtccaaatatacagcctcccgcaggagctcctaggtgctcactcctctctctctctctctctctctctctttctctctctctctttctctctctctctctctctgcctctctctctctgcctctctcccctctttccctctgcctctctctctccctccccatctctctctcttgccatttatctttcatattctctgtctttccttctgtctctgtctattcctgtcccagtagcttcctctgcctgaacccctcatatgtacaaatgatcacacagcaatcccaaactcggagcctctgttcctgtagcgctgccatttccaaagctccttccagcctggactgagatacataaaattttcagttcatctctttgtcctcctcttgcagaaggtcatgctgctgtaagaaacagggtttctaatcaaggccctctctcagaggcccccagtttcaggggcacacatagcatgtacttgtagtgtcctttggttttgacttacagcaggcaactgttgaggccctatgtccccccacacctccgcattcccccgacttttagcttgagaacaggtgtgggggcccgctccttctattgtgtaacacatctaattcagccttcacgcatggcacctcaggatatgcagccattctttcaacagcatttgtcaagcatctgctaagaggcagtgaagttgtagggcttgtggtcagcaaagaacagaaacaaccacacaccacctaatgtccagccacgtaccaaagagcacgggggaactgcataattttcctgatggagcggaaaattaaaatcaaagagagaccatgttctgactgaggcaagataaaggtaattgctttgtcattgatagtggagtggacagaggatgtgtcactgagaaccatggaattggggtaaaattatgaagacaccaacagagaaagttaagtgttcacctggaggaagcctttccaaggtcagggatggccagggcaatgtccccaagtccccatgtgtcagagaattccaagtggacccgtgtggtcaggtgccttgattgcagaagtgggaaggtggtttgagaggcacctcttagcaattataagaaattgagcttctctgctagaaggacagaaagccactgggaaggtctaggtagagtggcatgatacggctcatgtttaaaattcatgtgagttgagaataaaatgtaaattatagggccaaggacagagcagggtaccagtgaagaagttcctgcagtgagacaccagaggcagtgacttaaggaagcatttcctaaggaccttcaggaactggtaaaccaagaagatgtcttttgacagtgcatgtttgtagcaaagaggagcaccagagatttggcccaggaggacttccgcagggaggaagagagccttgcttggtgtttggctaggcctcattgggtagagtcctggcagttctggggttcagtcttagtaactcttaagtgggtaacagcacaacttctcaccccatttcaaaggtaccctgtggttactcaggtagcttttggttctctcctgagcatcttttctttccaattctaccccctggagatacccacaggaaaggcttttctggataagagacaatggcaagctgggttagaatcagttcatctcaaacggtgagagacacttggcatgctgataccaagctaggtggaggtgaccagaagcaaagggattggaaagctggtttcagcaggaaattccatggctgggcccctaggacagctggagtgggctttcttgcgatgagctggggttgtaggaagagcaggcttcaatagcctcctataactgagaggatttctgtgggcttgccccttctaactcctttaccaccaacaccttcaccaactaaaaaaaagaaatctgtatctgcagatttccgtctgtaggaagtgtagggagatgccaggttccttctctccctcatctcttcctttgtcccttttcctgatttttgttccttcccgccacctctttcctctttgtcttttccatcatttttgctcagctgatacattaagctctactcaagtttaaagggaaatggtaaacttcattttaaggtcctgtggctctccatgagccctgtaactaagtattggacactcaccttctgcaaggctctgtgtggtccgaacattccatgaccagagacaccagctctatgagacaggcactgtagggccctatgtccttcttgcctgggttgtttgttcctttccaggtctccacagctcaggctgtcttgggaagcatccactgtggatatggagaccagaagtctccccaaatgcctcactcagtgctgcagttgcttttcctgtcaatagcaaatggcttctgacctctgtagaagctgttctctgccaaagccggggcgacagaaaacctcacattcagtgacttgtcaatagaaatatgtcattggccaaagacataacagtagagcaagatccagggccactgagcaaggttagacaacaggattactgcaggtgcttcactgaactaagaaaccagtcagattcagcttttgcccctccccctgactctggctcctcccactctacacactgcaactctttcctccagcctcaagtgaccagaaccgcattggacaagactcctacgtcctcatggccagctcccaggtagagatggaggagtgggttaagttcctcaggagagttgctggcacgccctctggaggtaagaactctcacaactctttctgagcaggcctctggggaagagaaggaagcaggctccagataccatctctctattcagtgttcagaggggagagatcggagttcccctggagtcattggccagatcctctgctgagtgtgaggaaaaggggtttctacataaacagctttcctcccaggtcacctcaaaaggccaacttcaaatcaaatagaacattagaggactgtgacatcccaaggtggggctttctccactttggccaaagcactctctttgagatgaacagcttgggctagctgctctgggtccctggtggcggtaactcttactgcaccacaagtctatccatcccatacccaagagggctaatgacaaggtttgcaaccaagtctggtcaggacagaggacagctgccctgcggagtggggataggggcctcagctggtcttacagatgtggggtaaattctgcatttaggcctttccaggacatgcaaggtgtttgagtgagcagtctagcaatattttcacagttggcaatggcttgattacaaccaacaaaatcctgatgcagaatatatgtgaaatcaacacaagtgaatttagcacgttctctttattttataaacacataaaatagctcaaatggataagttcacaaaaataccactttccaaacatttttaaaaaatgaactgcttgtgttgactccaggaaaactataaatatgtaattaattattgatattgtctcttattttagagctcatttatggaagcattcatggttaaatattgatgcgatttcccaacagtttctttcagaaattataagaacaccaaaataattttatgtaaaattgaaaaaaattagccatttgaattattttagtgcttctttgttccagccatggttgcatgtacatattttttcctgaaagataaatgtagaatacataaaactttatatgccttataacttaattattctatgttactataaaatccttttaaagattaatttttattaattttgtgtgtgtgtgtgtgtgtatacatgtggcacttgtggaggtcagaaaagggtatcagatctccagcagctatagtagctatgggcagtgggcacccatggatactggagccatactctcacactctgcaagaacaattaccctcttaactgctgtgccatccctctcttctccatcataggaccttgttgagccattccaaggattgtcttaatgcagaatagaaatcacgcttagtgatgttaaggagcagaaagggttgctgggtagatacaccaaggacagggactgccatgggcctcacagcaccatcagtgaactgcaacctggtcagttcagatgttctcctgaaaacagtaacatcatcaagacacgttgccctccttccaacctgagggaagctctacatttcccatgtctgtcttgacccatctttcattacctttacccctctgcctggtcaagaaagacttatccctgctcaccccccccccccatgttgatgtcacttcctcagagcctgctgacagctgtcatatcaaggctcctctgtacaaccctttccttcccttcccctctcaaagtaaaaaaataaatctttggaggaaaaaaaaagctttatactggttcacaatgcacaatgttctcttagttagctctttgtccttgttttctagacccttcttttattcctgtaccactccagcagcatcatctgtaccatcatcagtctccgaatacaccataggcatgctcctgccttggggctcttgcacattatgttctgtttagagtcctctgcattgcatggcttgatcacgtgtgtgtgtgttttggtttttgcttgtttgtttttctttaggtttttgcttaacaatcacctcaataattcccctcctggtcattctgtttaacattagtagatttcttcacctttttttggcccttcctagtcttctgttatttattttctcttcagcatacaaatcctttctaatttattaaatattttttttttagttcatagtcttccgtcactgggataaaatcttcaatctatatgtcaagatgtgtgtgtgtgtgtgtattgaaatggtaagtgacttgtgttaaatgatctggttaaggaagaggctctccacagcagagtcgccctgggtcactctcccaggcttttcttgccattggctaatgtctagtcaagaaagggctcagtaaagtgagttgttccttctagaattattccccactgcacttatcaagagcaagccttgctgaagttcttttcttagaaaaatccaatgaacgcatgggaactagccagaatgatagctggacatgaaaagtttggccttccacagtaggacgtcctgacacacctgtagttccacagtaggatgtcctgatacacttgtagcccgcctgagtgccagtgttaaacaggagaagccactctgggcagaactgacaccgttttctggcctccaggtctcctggcttcttaggtgttcctcctttctgacaggctctgcatggtcctcatgtctcctcagggagcagctgcttggtggcttttcagcaggtccggtttacagaggaccagctggatggacaggccggagcagcagcaccctggatgctgagaatgtaatttcaaagtcttacaaagttaagcaagaaaagagaacagagtcattaacttctgacagcttatcccaagccacacttccagtgtgctcgtgtgtgtgtgtgtgtgtgtgtgagcgcgcctatgtgtgtatgcgtgcgtgtgtgtgtgtgtgtgtgtgtgcgtgcatgagtgagtgtgtatacctgcatccccctgactcctcccctctcagcatggagatcagaccctcagcgcctcacagtggaactctggtttctgtggcctaggaacaggcagtcctggctgcagatggggtctctgttgactgctatcccttccctcgggatgcttgctccatggcttcagggcacaggagttgtgttgtgtgtaaagtttcatccttctctctgctgttccagtttagagacagggttcagctcctttgtttaagcgtctttgtaaatttgccaacccaaggcttatgccacgtaaatatgtacttattatgagcctgaaggaatttttcttcctctggccttttggtattttttttttcatacttcagaacaggatttcacaatccatagctcagggcaacaacgtgtgggatgtggtgtccttgccaagcactcttctgtgtgacctagctagtcttccgagctaagcctgatcattcttatttatttctactaaatatttcatctcccctttccccagctcctaaatataagcaagacacataattattcatttactctaaaattctttattgatcacatgccaacactagggagaaagatccagtggtcttccccaaggaggaatcattctctcaagaaacctacactttattaagagacacaaaaattaacttttaaagcccaaagttacaatataaaattataactttgaaaagcactgtgaagccgggtgtgattgctcacacctgtgagacagcccctcataaaatagaaatgaaaatatattactgaagaaaaatacacgaaacaaagtaaatctttgtgaagaaggttgaggaaggcttcccctggatgagaaatgattcaccaagccccaaatggtcaggggaggtaaacctgacagagaatgggaagcagagtggtgtctgtgtgggaggggacagcggctgcaaaaaagtcttgagaccaaaaggtgagtgtgagggtagggcgagggtagtagaagaagcaactagtggtggttactaggagcaacgggtagccattcaggagaaagtttcaagcaagaaggtggaaaagatcactgtagtggctgtgtgcatcacaggctgggctggaggcagtcagttacaaagaaggcagcagtagaccagaaatgaaactggagccgtcattcaggcaagagtgggcaggtgggagcttatacaggaagaaggccacagagttgggagaatcaaacaggcctacacagccttctagaggtgacactgccaggaagtgggtgtgaattccacatggcaggagaaggtggtgtcaaagaggagtcctgattcctgcctggggaatgacagacggatggatgcttggttggcagtgtgagaccgaatgccccaggccctccctggcaagactgtccttgcctgaatctctgcgagggttctagggtgctggggtcagttgcaggaggtctgctccatcttcctgacaggaggggcgggagctggctcgcttcgcccaccagcctacctctgagatcattgtctcagaagaccctgactgagccttgcctgcctctgaaagcctttccaggagagggtgggctggcttcataaaggctaagtgccgttctgtgttcctgccagacagtttgatatacggtgcaatgctggtaaacgctggcgtgtgggattttcttcctttctctctttcttttagcccacctcatagctgtcccctgaatggcggctgacaattagctgctaagtaaaaggaggcacttatttttattgtgctctgacagctttatgtttactctctgaaagccaagggagcctcttgtgtgtaaaggtgagtagggaggagtgttgggaaagggccgggcaggtgctgacacatccctgggattcctcccaggactcagaacctgagcagcctttgcaagcctgtgctgatctggaagccagcgaggacagttagctcttgcagtgcaggagaggccagactggctcctcagaggcagagggctcagcagccatgcctcacgtccccaggatgccgcactgggaactgggttgtggctttcccaccttggcgctgctcttttgctgggacgtcaggaagagagcccccaagctccgaaagaaaggtatttctttctggttttatcattcttccatgataggaagacttttctcaaatgctctttgctctcatgtcaggatagggtatgcatctgagactgagggtatgccctggaaaactgggaaactagcaggggagctgtgctggggtctggctgcgggagggattcagagacgttcagagataacaggggaggctgagctagccgtttgcactttcctaaactgttcagtgctctggggttttgtagccactctggggggggggatctttggggctggttgtggaaagcagaaagagaatagttggcagttctgtcatcgtgagaatgggatgtcactgtcctggggctattcaggacaaggctcttctgttcaaagacttaggtctgggcactggaagcgctcatggggtgaggtggtggctgctggtggttgtatgagaacactggatggcagtcagagctggagcactgtgcaagaagcaccaggaggtcctgtccccagggcctccctggacagggatgatgtctcagttattattacagtgacttttggggggagagtgcactgtgcagacctttatgcgtgatgggcgaatgctctgagctatattcctatcccttttaaaaaaacgtgtgtgtgtgtgtgtgtgtgtgtgtgtgtgtgtgttcacatatgttgaatgcatgagtgcatgttgggagccagagattaggtatcattcctttggagctatccacctgatgtttcgaggtgtgatttcccatacacctggaactcaagcagcttaggctggctgcccagtgagccccgggacctgacagtcttcacctcgctgggactaagactgatgatcaagctctggtacctgcttagcaaatgccatacacactgacctatctccccagctttagtttcttaacttaaaaaaaacagactgtggccttataccccactgatctttaataaaaacaggttaaagtgctgcatagaggacccagggatgggggtgggggtatgtagtttcaggcaaactctaaacccaagttcagcttttcaggttccagtttcagatgagttcaattaaatcattcaactgtcacactcaataatagctagacccagagccagtgaggcctaatgaactgatatacagttagagttggcatttgtcaactcactgaaatatggtcttagaaaaactcctaacccaggcctgcctttgtttgtctgtttgttttgttttgttttgttttgttttgttttgttttgttttgttttgtttgagacagggtttctctgtgaggccctgactatcctgtaacttgctctgtagaccaggctggcctcaaacgcagagatctgtttgcctctacctcccacgtattaggattaaaggtgtgtgccaccaccacccagctgtaatgtgatattcttacttgcaagttttaaatgattaagttaaaaaataaaccagtcaattgctgtgaagtttatattgcatctagcaatcataaaatttacaccccatatgatgattgtaattaataggttgaattttattattgttgagacagaagcatttctgctaattggttcagagtgataatgagcccctgcgagtgaattgattagatatcaattcattgctgccaagagcagaattatgtagcccagatgccctgaaggggtgggcataacccaacaggccagggttttgtctttgagcaacgcctgccccactgtcttcttccttcactggcctctggcttttggcctttgggctgcctctgtttccccatattcaggcttttcactgtatacctggaagcaaaggtaaagacaaggacccagggaatgagacccatacagtcggtgcagttcagtgggtgctgggggcaggtgtcagactccaggggccgcattggatgccactctcctatgtggtctgcagtgggaaaagacacaacctgaccaggacaagcatagggtgctctgtttcactgaagaaggggcacagtggccctcgagagtgagggtgcatgatggctctccctagagggagtggctgtggcttagttctaggctacagatatgaagtttggagacttcattctgtgaatggattccatggctcgagtttctaaggcatggagtgaagacagggaagagagtgcctggaagaagctaatgaatgaaggtcagggagagaggaggaagcattggaggagggtgagagcagacaacggtgtgaatgaggaaccagagaggggagttccaggagcctcgagaaagcatttcaagaagggagtgtgtgacctcctgtgccccgagctgctgattgagcagcggagaggagctctagaaacttaattcctctgtttaaaaaaactgtaaaggccattggtctccttgacattgggggcttggagaaatgctgaccagaggggtagtgtggagagtgggaagcatgggagacagcaggtggaatgttcctgaggactaaggccgcctctgtgccaggagataaaaatagaaggtgaaccagacgggctgtctgtctctgaggcgctcacagaccggtggaagagtgctgtttaaataaatcatcgagaaactacataggaggtgataaaagaggggctttcgtggaggtcggtggattcagagaaggnnnnnnnnnnnnnnnnnnnnnnnnnnnnnnnnnnnnnnnnnnnnnnnnnnnnnnnnnnnnnnnnnnnnnnnnnnnnnnnnnnnnnnnnnnnnnnnnnnnnnnnnnnnnnnnnnnnnnnnnnnnnnnnnnnnnnnnnnnnnnnnnnnnnnnnnnnnnnnnnnnnnnnnnnnnnnnnnnnnnnnnnnnnnnnnnnnnnnnnnnnnnnnnnnnnnnnnnnnnnnnnnnnnnnnnnnnnnnnnnnnnnnnnnnnnnnnnnnnnnnnnnnnnnnnnnnnnnnnnnnnnnnnnnnnnnnnnnnnnnnnnnnnnnnnnnnnnnnnnnnnnnnnnnnnnnnnnnnnnnnnnnnnnnnnnnnnnnnnnnnnnnnnnnnnnnnnnnnnnnnnnnnnnnnnnnnnnnnnnnnnnnnnnnnnnnnnnnnnnnnnnnnnnnnnnnnnnnnnnnnnnnnnnnnnnnnnnnnnnnnnnnnnnnnnnnnnnnnnnnnnnnnnnnnnnnnnnnnnnnnnnnnnnnnnnnnnnnnnnnnnnnnnnnnnnnnnnnnnnnnnnnnnnnnnnnnnnnnnnnnnnnnnnnnnnnnnnnnnnnnnnnnnnnnnnnnnnnnnnnnnnnnnnnnnnnnnnnnnnnnnnnnnnnnnnnnnnnnnnnnnnnnnnnnnnnnnnnnnnnnnnnnnnnnnnnnnnnnnnnnnnnnnnnnnnnnnnnnnnnnnnnnnnnnnnnnnnnnnnnnnnnnnnnnnnnnnnnnnnnnnnnnnnnnnnnnnnnnnnnnnnnnnnnnnnnnnnnnnnnnnnnnnnnnnnnnnnnnnnnnnnnnnnnnnnnnnnnnnnnnnnnnnnnnnnnnnnnnnnnnnnnnnnnnnnnnnnnntggctggtgtgtgggactgaggtaaaggattattctttataaattggcaatgagatagatgctcttgactcttcttcacacaaagagtaagtcttggagaaggtgggaaggatggagctgacgaagttggaaagcagcagaggcagaacacagaggaaccgtcctgtagagaaggaaggcggagaggaagggtctgggcaacaggagtaggtatttcttccctcctgaaggagtcacttgacttactgtcttagggttttacagctgggaacagacaccatgaccaaagcaactcaaataaagacaacatttatttgggattggcttatatgctcagaggttcattccattatcatcaaggtgggagcatggcagcatccaggcagacctggggcaggaggaactgagagtgcgataccttgtcctgaaggcaaacaagagaagactgactttcagacagctaggatgagggtctcaacatccacacccacagtgacacacttcctccaacaaagccaggcctactccaataaggccacacctcctagtcaggcccttccatggaccaagcaaattccaaccaccacacttgccaaggcagggaggaggggcaggaaagtgagcacaaagcgggtggaccttaggaacagcagagtttcagagccaaggtctcatgaagattgggtatggcacaattctaggatatggcactgtttctgtatggtgtgacaccctcataattctcggtagcctgacaaagtcatacatttgagttgtgggagctgacagggtagggatgttagaagaaaaagtaatactgagaaatgaatatcctggtaagagcaacgtgagagtggcctagagtgctggggggacacagactgggggaggcctatggacacacaggaagtgagtggtgagaaggcctggtggactcagaggaagagagtggagggaaggctgatggatgctcttgctgtttatcgtgtggttctttctttttcataatgggaagttggctaactggaggcaatgacaaggtcttggtgccccttgtcattccacatggctgttgtcaaccctttcaggacacttgatgctgttagggagggaaactggattactttccatgagagagatgactgctagtgtttcaaccaaagaaatgctgaaagaaccatgagctattggaaaacacttggttatagatattaaccgaccaagcaatccagcaaagcctgttggccatcctcctgtcccaggcctgctgggggaaagaagagagactctctccatgtgttccagccacaagaacttatggtcacatgcccagacatagacagacacagacagcacaatatgagtctggcagaacgggcagagaggaagagggcacatggaatgggaatgtggtctctctatttgagagcaagaagacctggcagagatgatgatattggaaaaagcccaggaaagacaaatagaatcccagaggcagagaagggggcagacatgggagggagaagagtttttgaggatgtaggaactggagaacactaagttttagaaccatcaggatgaggtgcttttgaatacactttagtgggtcatacaaaatggcaggttggtgtcaggccagcactgagatgcactaaagccaaacaggcaacattggggcagattcgggattagagatgatactgccaactcccagaaccagataccacgagggaggagccatcaggcacgggggccaatagaagaacagtgctgtagcaactgagaaagaggtgtaagttctcaaactcagggtactggtattcagacagaccagtgggctggaaaggtaagcagcagagggttttgaaaatgccagctactggagcagaggccagaacaccaggaatcaggaatcaatacagttctttatagatggaatccatattaactagtgtgtggatataggacagccagagtcaggcagagaaccaagagacttcacaaagaaccagcctctaggacaaaggtttggcaaagctaaagccattgccctctgaacctgaagggtacagaggagccccggagcctgcaggaaatacacgtgggcagtggctgccttcattcagatctagtcttgtcaggcagaggggaggggaaattacagagcccagtgctgacagggctagggtggagcttgccgactcttgctttgctggaggctgtgtaatttggaaaaatatttttgcaaagcaatttgcatatggttgggtcaaaccactcgacccccaagtttaacatgcagaaaattgccctaagaaaatagtttgacagcatgaaatatcttcactcatctatccaaacactaattgattaattcaacagtagtcagatatcatgcctgtgggtgtagacattccagggagtgtgtttgctatagctgtgcttttgatagtagagcaaacaatctgagttctaagaggtgccataaaggtgtaattctgtagtatgggataacctagcaacgggctcttgtcctttgatgttccatgatgccagcagaattcagttcttgttgttgttgttgtttttcctgtgccccctttaaagagtttagaacaatggcattaagaaagatcacttgtgcttcctgatctgtctcttgggctgttttcttccagtctccatttttgacccacgttttcacacatctgagataccacccagcctcaactgagcactgtgtgccagaaagcttgtcagtaccctgcttttcctttgcacattcatttcatcttgacagctaccctgatgtgacaacactgtcacaatcacttcactgtcaaccaccctgagcctcccaggcactggtaaacttgccagactagtagctgaggcaggacctgttcagaagccacgcccaggcagccagcccccagggatgcagtggcctgtctgtcgtagcataatggaaataatatgcttgctcagtgagaaatcaatcaacactcccagagatgcaagagagctctttaatagtgtgtgcctgactggagctagtggccaactcagagtcgacccccaagagaagattttactagctttttaggcttatgcattttgcacttgctgccatccttaaatctctttcaggtcccaaccccaggttacacttcaaataattcaaacagagacaggagactgcaagtctggctgcttagcagataggagatttacacagcaaagatattacctattgccagaattattttaagcacaccactgttgttctttctcaaacagttgttacccagggtcatcttgctcacctggcagagtgagccaggctttagtaacgtgtacaccctgcactgcccaccttgagcatccccttagaggtacatcttagtcactggtctattactgtgaagagaccacaagcccactgcaactcttatcaaagaaatcatttaactgaggttgctttacagcttcataaatttagtccattgtcatcaaggtgtggggagcacggtactgtgcaggcagacatggtgtctgaggagtatctgagaggtccacactgggatcagcaggcattagtacgagcaaggcactgggcctgacttgggtttttgaaacctcaaagcccaccccgagtgacacaattccaacaagacgacacccctaatcctttcaaattgtgccactccctgctaacaaggcattcaaatctacaaacatatgaggggcattttctctcaaaccaccacagagcctaatggctgtcagtcccggtgaataaatatttatatcctagcaccctaaatgtcacttatctctaacaacctggttagcatactagcttctttgaggggtattttggaagcagtgctatatctatatctttggaagctatatctaaattgtacttgtgtgactgaatgcctcctaagcaagcctattaccttgagtttcttctccatcaatgatgttcccgccaaaagccatagactctctaataaaattcccagtaccaagcatagaaacctccctttgagctattggtcaggacaggggaaaagactcccctaatataggctactgtgctgttcttggtttcctcccaggagttaactccctactgctgcagacaccacacacacagatataagacagaagagttgagctggaactggcttggaagctcttccctgtggactggctttcttagtaccaaaaggtgttgtgcaacttgccaaaggagggaagtaatcaataattctgcccaactgtgaagccacagcagtgagcaggagcaaagacatccccaagggtgcaataatggcccttatattctgggggcagccaacagctgtctacttggatggaagacctactcaataggaagaaattcatacccgatactataaagctagctaactactgatggccaatgacgtattagaccctagagggaagcctactatagccagtttcctaaaacgatacaatttctaactgcatcctaaatacttacctttccactcacagatgagtgtagctctcaccccttgccacagacgcttctttttagcagcaggtggagatcatcacagaagtccacttctgctccaaaatccagagaacaaccgactatgtgttgctcaaccccaactaatccatctaaaacacaactctgaagagctagggatgtcatgaaagaggggccaaaagattgtaagggccagagaaccaggagctctgccatgagagagtgtctgctgtatacaacagggattgtgtacccatgaaatctcaaaaaatatggtcaagtaaacatgaccaaaaagatgacaacaccagctgacacaccagtgttgatggaggagctgtcacaagaatctgcccctagatgaagagctactggcaatcaatcaacggccaatgagaaagagggagaatcattgttcccaggaacaacccccctaataggttctgcaatcccaaatgagcagccctaaacacatacacagagcagcatgaatggatttagttggatgtgtttgtgtgtgtgcgcatgcgcaggcctgtgcacgtgtgcatgtgtgtctgaaacaaaaattaaagaggaaatggccatggatctgaggcgaggggagggaggtcacaaggcacatggagagagttggaggtggaggagtgggggtggaaaatgatgtaaatacagtattaatgcatgaaattctcaaaagttaaatgaaaaaataaataaccttttcaaagagaaaagagtctggagaaatgccttagtggttaagaatactgaatactctcccagaggaactcttggatttgattcccagcacccacaaggcagttcacaactacctgtaacttgggtcccatctggcctcaaaggacattcatacacgtgatacccagacatacatgcagaaaaacacccatgcatgtaaaataataatagtgatgatgatgatagtaataatgatgatgatttttttaaaaacagaacaaatgtgcaaagccccagactacccactgattcactgaaggtcagaataactcagggactccgtatttcttcttctcagcggtgtttggccagcgtctggatgagactgtggcctatgagcagaagtttggccctcacctggtgcccatcttggtggagaagtgcgctgagttcatcctggaacatggtgtgagtgaagagggcatcttccgcctgcccgggcaggacaaccttgtgaagcagctgagagatgctttcgatgcgggggagcggccctcctttgacaggtatgctgtccttacgggccttgtctgcctccgcccagcggactggaaagagagtctagtggagcggggaaccttcgcaggggattcaggagaacaaggagcctgtcctgctggacactctgggtctgggggcctgagcacagttaggagagtgtgcagatggtttatgtgagggaatgttcggggcagagtcaagtgatgcttaggatgggagggaaggggcaggcaggggccatgggggagagctgaggcttcacctaagagcgtccttgtcatgcagaccaaaatcgtgaagagcagcgctacctacataaagggggcatcaccacatctgtgtcttctccagcattccagaggtggctagaactagtcattctcacatgtgattctgaactcagctctgggccttctgactgcagtacacacacacacacacacacacacacacacacacacacctgtggcagcctggcatttgccctcatcgaaggtttccagccctatttggagcatagctggtgtggtgacatttctcacagttcatctcattctccaggctcccagcaaggatgtcctctgccacgcttagctgtacagccccaccacacactgcatgctctgttgactgtgcagtacccaattccctgaacacacttgtactgcccgcttaagaccaaccactctttccaaattagcatctcatcaaacaagatttggtacaatgggcctgaatgctaaccggtttacacatgttgaaatcccctagagttattgagtacaaaggggaaagttatggaggttgagtcattcttgtgcaggagtctcacgctcttccctttcagcctcactctgttcaccaacgcagcccagcttgcttgctttgtttttactgaagcatctctgaggccttctgtttctctccatgccgactctgctatggtcttagtttgatctgactatctctccttcccttactataccataggttaatttctcatgtagtttatgcaaacagcgatgtagttagcattggaactatagcaagttatgggtccttttaacagcacagacagttacattttacaagcaggtacctattccaggaggctcactgtcactgtatccagttttcttcctaatttttgtttttttgttttttgtttttttgttttttgaaacagggtttctctgtatagccctggctgtcctggaactcactttgtagaccaggctggcctcgaactcagaaatccgcctgcttctgcctcccaagtactgggattaaaggcgtgcgccaccaccgcccagctcctaatttttaattatattgaagttgatagaaagatgtgtatggattactgcttggaaagtgaagtctgttatccaaaagaaaagacacaattgctgggattttccaaatgactgcttcgatgccagcttacactcggtcaggttgctatgagtggtggcactgtggcctttatattctcatgaaattcagagtttataaggaggaggaaagcaccggtgcatgcacacacatacacacacagacacggagagacacacagagagacagagagatgggagagagagacagagagacagagttctatgaccaactcctgggtccatatgccccttgagtggacaagtcttatttggagaagaatgtagaattctttttgttcttgtcatttcactaacttccaatggatttaataccaaggtttcttcaaagagtatgtcccagcacctatagctgaccatggatgagaagacttttgccacaggcatagctgtgtgataaactaaaccttccctatagtttttgctattctgaaccctaaccataatttttttatccatcaatgagatacagagggagttgtaaggccaagaagcccctgcctggcatcccaactgtaggaccagtgggcaccacctccatcttctacatggccatacacttggtccactcgatggtctgctgctgttattttcactgggcagaagtagcatggggctcttgcttagtggagaggtgtgcacattctagcacattctagcacattctagcacattctagcacattctagcacattctagcacaggtgtgcacattctagcacattctagcacattctagcacaggtgtgcacattctagcacaggtgtgcacattctagcacaggtgtgtacattctagcacattctagcacaggtgtgtacattctagcacattctagcacaggtgtgcacattctagcacaggtgtgcacattctagcacaggtgtgcatggttctcaccaagtagaggagcacaaatataaaagcctccttgtagggctagggggatggattcatggttaaagagtttcccacacaagaaaagatgagggtgcgattcaggtccccagcaataactggaaggtgggcattactgtctgtaatgccagtcgatcagaggctgggacaggaggtctccccagagcaagctggatagctagattggacaaatctgaactttggggctcaagtgaaggactgtgccttgatatacattaggtgggaagagaccaaagaaggcactaatgtcaattcctggcctccatagaaacattcatatacatgtacatgtactcatgtgcacgtgaacatgcacacatatgtatgtgcacccacatgcatgtgaacatacataaatatacacatcacacacatgcaaagacagtgtttttcaatgtcctcgtcaggttttactaggcttggatgctacctggtcacagcaccgatgtaaccccatccctgtgactctctgtgagaacaggcaggcaggctacatggcatacatgaagttccaagacaactaggcagggccagcaagacggctcaggactcagaatggacaagaacgtcacttaaggttgatcctttggtttggagggatggccatctcagaagaaatgattctggagacttagattctaagggtgaccctggtctccgcattaacacagtggggtgcccatgaccctggtctccgcattaacacagtggggtgccccccatacagagaaatcagcaccagttccactgtgttagtgctaaaaatgacaactagagataactgagaatttagagaataggggcttgacacggtctggtggaactcgagaagtccccaggaaaaagaacattaatgatgagacccagtagaccagaatgagcagttagccagctaagctgaggcactgctagcatcacccttgtcaaaactaattgggctttctaataagactatataatataatcttcaaactacctctgttgtgtctatgactataattctttctcttctcttctcttctcttctcttctcttctcttctcttctcttctctcctctcctctcctctcctctcctctcctctcctctcctctcctctcttccttttcttttctcttctttcattttcttttttatttctgtctttctttcttgatttttttttttgagacagaatttctctgtgtagccctggctgtcttagaactcactctgtagaccaagctggccttgaactcagagatctacttcccttggcttccctagtgttgggattaaaggtgtgtgccaccaccaccagtctccctttctatattatcttcagccttttgcaataaaacatcttttaaagctgaggtttccctttaagggtctctttttcctccctttttctgatgctatgtttctcactgaaatttttcgtctctactcatcctatgggtgtgttctgtatgttggggccatgctggctgtggataagatgggcaggacaggggctgggaatgggagtggctttcagatccagagtggaaagaggagaccgtgaggggttcatctgagatgaaggattaggatgcaggagcttcattgcagatcgggtagagcagaggccacaaacatgctaaagacactggatagactgtgccaggggacacctcagagaatccttcccctgcagatttccaggtcacaggtcttctgtcacctgctcaggtgctttcgttaaaggttttccccagctgggttttttctcaggggtatttttagacagtgactcaataggatagggctttttagaatatccatgttaagggaacattcctctggcccaaatttcctgccttggagtgcagaccgttttctatgaagctctgtgttctttttcagaggcagcaagttcacaggttgcagaggcaggggttggatgggttggatggattgggaagataggaatggggtgtggtggggttgggttggtgcagaagtcaaagtcaaagttcttggcaaccaagagcagaaacaaaaacaacacacacacacacacacacacacacacataagtgtacacgtgttcatatttgtaactgcctcaaatgcttcaattgacagatcacaagagtacttcccatgtagcttaggaatggagcagccgatcccacctggatctatgaacatcatacagtgactaaattgcctaatggcacacttctcagagcacatccccttactaagggtgcatggtggatccagatttagtttttctattaacagaataaatgcaatccctctgaaaatgcaggagtcagccagccttgcaggctgggccacagttacatatgtaggctcttcagataaagtgactttgtcaccgttactgttctctcacactaacgaagcaatggcagtatgtaagtgaacaagcggggctgtgttcctccaaaacttaccttgttgatactgtagctgcgagtatgtaaaagtttcacctgtcctaagatatatggcttttgatcgcccccccccaggcacttaaaaaagtagtaataatttccagctcgcagccctacaaaaatgcaggttgtaggccagatctgcatcccaagttgaggcaacatttgctataaacaccaaaagctgagccacagagccatgccttgcccacactcaaccgaatgtcatctcagaccatgggggtaggggcaccattcctcactccgggggatacacatgtgctttcccgatctcccccatcatctgacttgtcttcatctgaagagtcactgtgtctcccaagctgtcactttctacactctgacctcctgagtttgtcctgggcttctcacatgccagcacctaccacagtgtctggcgatgtgtatattctcagtgctgtggcctggtgaaactaggttcagttcactactggaatcatggaaaaacatcactaattggaaggtactaagtggtctgaaaaatgcagaaatgatcaaaaataattaaagagaatgtaatgaaaagggaaaccttaaggcagctagctgtgtggaagcagagggaagtatgttggagttgttctagaagctggtgtctggggctgcttcaactttgccaagctctggtcctttgtaacctgcccctctctagtccatgctctgaccccgaggtccctcggggcagcggggagggcctgtccactaagtacagcttattttctttcagggacacagatgtgcacacggtggcatctctactaaagctctacctccgagacctgccagagcctgtggttccttggagtcagtatgaagggttcctgctctgtgggcagctcatgaacgcagatgaggcaaaggttggtgtctctctagctgactgccttacttagaagaaagcaaaaaagcaatgaattttctaaactgggctctagtagatgagagtgggggccacaccctttggtaggatactttatcagatcttgcgcgcgctcgactggccaggaagaacgacgctgcaacaggatccttctgcacacgtttattgggagagcttgattgtagaggcgaaaagacttcgagcccagaactggtgctgcgtttataggtctaggaggggcgtgtctcacacccggattggttatgcactaagcctcatttgcatgttcctcatctgattggctactctctctcagtaccttacagaacctcattatcatacctcatttgcatgtctcacatctgattggttatactctcagtaccttacagaacctcattatcatacctcatttgcatgtctcacatctgattggttatactctcagtaccttacagaacctcattatcatgcctgggccaggcagtgtctttgcaaaaaactttactgcatatgtacacattggttgtttgtccaatcttatgcgtggtggccagcagtagtcagtgccactctgcaacggcacatgtggcttcccacaatcagactggaactctgcagcagcagcagcagcagcaccaggccaatgtgtctgtcattctccctggtaaaacactacacaagacttggatttgcctgccatccttccatttggtaaattatgcagtgtattagtggctagctcattactgtggcaaagtgccagactgaagcaatgcatggaagtctcggctccaggatacagtttgtggtggtggagaaggcatggcagcaggggtatgggccactggtcatgctgtatctgcaatcagggatcagagggagatgaaggcctgtcctcagcttgctttctccttcttaccaaaatcccagactatgggctgctactgcttgccagcatggtgggccttcccactgcagtccaacctctcctgagacagagacactcttgtagatgcatccattggccattctaaacccagtcaggctggtaactaagaacagctgcctcatgcatattctatgagactcggtgtagttacttaaaccaataggatttccctgttgatgtaatcttatcactgttccacgtgctaacctctagccacaagtgataacacgttcacaaattatgactactataccagaagagtcaaattcttgattttatttacacttaaatagctacatgcaacaattagctactgtatggaacagcacaaatttccaccatgttgttgtctgcattgtctaggattgtatagaggagcaaggcacatgaaactaatttgttactttgttgttgagccgtttcttctctgttctttggtgtttgtgatatagtctgagtcacaggatacctgggccagtgagaaaatagttagtggaatttcctgggctaactgcctgtgggagccatggttataaggattctggcacaaaagagtattctacatttcaaaactcggatagcaagagagtagcaacgattcagccaacagtgtagctgttttttccaagaagaaaaaactaggttgtatttagtcttatgtgggcatttgagttgtgggtattgtagggttgacagaagatatgaaaacccttgatttacaggggcatttaagatatcctttgtgaatgataaggcttgaaaaacacctaaaaagagtcacgttacatgtcatctcacatgccatcagaggtgatcacggactgcaggcagctgtggtccccaagggcaaaaagtcctgtcatcctttccctggtccacgcgatctttgaatggccacatgtgaaatctgtagccattgtagaacttaagctgcccttcccagtgcacgccttgcagcacggccagtctggcctgcttcccagaagttctcagcagaatcatttgctcactacttctgagatattaggctgtggtttcattgtttactggatcattgtatctcattcattgagaacattatcacgagtgtccgttatcagatagtccgcacttacaggagctctaggtcaggaaggaggtcaggagtgggtgagcaacattaccgaaaacagacttcataaatgcacaatacaaaatatatatgctagctgggagtatatctcagtcggtagagtgcttgccgagcacgtacagagccctgggtccgattctcgaccagcatagacgggctgtggtagctcgcactccagaggtagaggcaggagaatcagaagttgaaattcatcactggttacatatggagttcaagaccagtctgggcgtcaactttctgtgaattcatagctatttccaaatattttaactcacgaaactatgggaacaggagagataaccaacgtgctcttcctatacagacacaccagtgatgtctctctactcactgccgacaaaggggcagtaggcttatttaccagtgtcaaacatctcttccaggctcagcaggagttggtgaagcagctttctacccttccccgagacaactacaacctcctgagctacatctgcaggtgagcatccaggtgtggagccacagtttccagccatggcagagagaagtccccgttagaagaggaagctttctaaggtcacagattctggtccagaactgtagaagctcaactctgtttgcgtattattgacagaggactcaccagggatccctaagaacctgcacacagaatacatgtactcttccttcagacctgccccaggtcctgcaagagaacctggaatgcctgttatccctgaaactaccaccctggaaacattcattctaggccatcagttatagtttcctgcagtcctctgtgggaacctactgtgtgaggtcctttgtgaggacctactgtgtgaggtccttgtggcgataccttacaggtggtccagcccagatctgctgtggtggacaccttcaccccatacatacctccattttgtcattttcaaaaatactgtgatgtaatttccaagttgtaaagatgattctgacttaatctggagaccacaaagagacaagaactgtgaataaggaccagcactagtgcagcccctggtccagtgatgccttccttctcttgggtgttttatcttctgatgcatcttttctactgcagtgaaactgcaggaatggttttatacccatgaaaagcatgtcctttatcccaggataaattatcccataataactcataattttcatcatttgaacatacgatttcttatttctcctaatttttacaaataaagtccttaagaaattaattttataaatcacctaaattttatgatatttcagtctacctcctttgaatgctttttaaaaatatccagaattcctttacctatctgtttagttgtttttgtttttctaacacatctaaggatttcaggcttctagtgggtggaaatatagtagagttgagcagcggctgggagtgagagatgctcacagactcctcggttttcctctctggagacatgggtgggatgggaactgagaagtgagtgataaaggcaaatcaatgaagctgtctgacacccatctgaatccttaaagtcacctctttctcctaagcaacccttgctgtgagattctccagctccagcctgcccctcccccggcaactgaacagtccacggctcctcctctctccttggtctgtgaacttccagaaagtcttgcaggcagagccagttcactccattccagaaacaggggaaaactataattccacaagtgtacctaccgctgggtcccgggagcactcaagctctctctcctgggcacttcccattgtctaagatggggtttcctgttgcccacagatttctgcatgaaatccagctgaactgtgccgtcaacaagatgagcgtggacaacctggccactgtgatcggggtgaacctcatcaggtcgaaggttgaagacccagctgtgattatgagaggtacacaggctgatcctgcagggaagcggcttgctgggcgtgacagcgagaacactgccccctagtgtccgtttgatgtcctgccgcttaccgagcttgcctacttgacctcttctgactttattaacatcccccatgaggtcagcagtgcaggaattaggtcccctgttcaatggtcacggatcgcagcagtctaacctcaaaccaattaactagtgctttccagtccttttatgactttaacatacctttagccaagaagagcaaacagggttttattttacaagccggtttcacaaaatggttgctgtaaagcttggctgaaagctttctaaggtcgtgacttggctcaataagcaaaagtcctggccgagaagactcgtgatggacgtggggaggaagtgtccctgacacccatttgcttcaggagtaataacaagacagaccgtattgaggaccacaggtgaagagaaagatatcacccccgtcccttgcctgttattgttacatctattgtctgataaaaactgatccaaggaaatataggtgtgaagtatcctcaatgctcactgcttgcccccttatatattctcatttagacatcctctcattaaaaatattttaccccaaacaattaaaacaggtcccatgagagcaaacaaagcctgtggctttagggccaatggggaaataccctattggtgggcagcaacccttgggtgtttctgggagcctgctccatgtaccagcatggcaaatctcttctttctttcagggactcctcagatccaaagagtgatgaccatgatgatcagagaccacgaagtcctcttccccaagtctaaggatgcaccgatctcaccccctgcccagaaaaacgatgccaagaaggctccagtgccgcgaagctctgtggggtgggatgccacggaagacccacccctttctaggacagacagcttcagtaacacagtaagatgcctgctgccccacagactcctcctttagtctggtcattctgaggcagcagtttgaggagcgcggggtgatgctggggccatgtgtagagctggcagtgacctgccagaacacatttggaaagcctgggctagtgacatgtgcgagaactgcctgcaggctgactctctgggtctttcctaaaatcatctccaagacaaaaacccggggaagttcgacagagaaaataactgcagcattgcatgtgtctgggtaagagctgctgagcattctgagggaaagtccagagagcacgggtgtcctgctcatgatgaacgtgatttcttcctcagagcagggatgtgtccgtgtagtctttctcattccctgataagctgccccggcaatgtcagcccctcgcttggacagaaggcctggtgatcacgttcacagagtcgctagactctgcagtctccaatgggtagactattagagggccccaactcacaaaggtcaaatattttcatgtatttacaggaacaaatgttttttaaaagaatctgtagactttttatagcagcttgcttttaaaaaaaaaatggggccaagtaataaaattcaaatatctagctgaccaagagagctacctatgactccgttaaagatgggggttggggtagggcaataaattgtggtggttgtagttttgttttagatgggttttgtatggccacgggcatcttactagagctctgaactgagttacgatttaaagttttgttaaccagtcacccacagtccttgacagctaaggtgttgctccttcaacagtagcctgtgacaacaggacaatagtctatgctgagcaagtaatcgaatcagctccacaccccgactctggggacaatgcagtgcacatgtactttggttgaggatctgaggcaagagagtttgaccaaggtgtcagcactagcatactctagggcagggctgcatgcctcaggtcctattcccactgcaagaacacacgccacaactgaagcacgggatgggctaggaaatatcccagcccccgactttcccatcttaagtgggaaatgattttttttttcattttgtttttttttttctttttcttttcaatttggttttatatacaaccacatggttcaaaacaaaacaaaaaacccaaatcataggaagggattggctgacaagtgtagggctacttaggagaggagaggttcatgccagtgtgtggttggcggttacagttcacagcggcagagaacccatggcagcgagggcttgaggtgctgggcgcagtggctccacagtcagggaacagagaggtgaatgctgtcacccagtccctattctcctttctcttcagtccaggattggttctgcccacaggtaatgtgggtcttcccacctctgttattccagacattcctggctgctgccccaagaggatcgtttctatagtgattctagattctggcaaattgaatgtctccttgaagttctttgccggcttcttcctggtcattgatcttttcctttccaatcagtatacgcttggaacagcacagggagttgccagcaggagacctttattgcctgtggaacacttcgcaaagcttgccagcttttcacttagcatatggtgtttgtgtggttttgttcttaattttggaggttgtagaaagacgtttcttggagtttgctgaacttctcttatgggtctcgggctctgagtcacaactgacaaagcctcccaagttcatgaaaggctcctagctcgagatttttacaccaaccaagcaaatggttttagcccattcttcctctctagatcttgaatggctagagtccctgaactgtaatatcctcttggcaagttatcacacagaaaattaactgaggtgatgtactgagggtgtcacaggtgtgtgaccaggaaacacttccttcctggtctctaatccttaggagtgtggcacacagaagaaaaaaaaacttatataacgtccatgactatttttttcaggcaagtagtcctgatgccaccagtcccactggaccactgcccagtgaccagcatcaggaagacagcggaaaagcccccagggaaaacccaggagactggaagatgcaatcccgtaaaaggactcaaacgcttcccaaccggaagtgtttcctgacgtccgcattccaaggcaccaccagcagtaaactggaaatctttaaaaatgagttctggtctccatcttcagaggctaaggcaggagaagggcacaggcgaactatgtcccaagacttgcgccacctttccaatgaccagcggacttctacctacgataatgtccccacctcaccacagtcccaagggaacccagcaggtgcactctctccccctgccagtgactccaagagagatgctcttgttagcacagactctgaaatggaggctggaagcaagaactctggcgaggatgaccttgattctctgcagaggacagtccagagcctacagaaggaaatagaaacccagaagcaggtctatgaggaacagattaaaaagtaagtcatgtgcagagggccacgtgcacttgacttctgtgtttagtaggaaggatactgtccccaccttccaaaatgtcacggtataaaggggacagagcattctgtagcagccaaccctaataaaggaccaagggagagagaggtgacaggtgagttagtgagaatccttacacttccgatgaggtccatggaaacatagatatgaaacccacgtagcctcaagggtgaatatgtgcaactgagttggggaatttccttgtgctccatattagtgtatgttatcagtgccgaccatctgctatcgaggaacagttggtatgctcttctctagagccacttctgccactcaaggcacccctgggtggcctgttgttctttgtgtaggattgaggtcttgtgggccttccctattcacactggcatgtttacatttgggcagccatgttggtgaggctttatgactttagcttctgagaggtaggagacaggattccccagcaaactccctgactgtctggctcttaacagtctttctgctcctttctccacaaggttccctgagccttagacgtgggagtgttttgtaggatatatccactggggttagaatccacaactctttattttgattggttgtggttttctgtaatggtctttgtttcaaggagggaagcttccttgatgaggggtgaagactgctcttacctgtgggtgtaaggacacattaggttgttgttagggcttatgatggttcagtaatgtggtgattgtaggttttcctccgagatccatgacttcactagttagctaggcttctgtaccaggcttccctcttgttgggtgggtcttatggttaattactgatggttactgcctaggtgtgtgtgccaccttagggttgtcatgccatcttggtattgttgtgatcccctccccatttttcttctgaggcaaaaatctttttttttttttttttttttttttgagatagggtttctctgtgtagccttggctgtcctggaactcactctgtacaccaggctggccttgaattcagaaatccgcctgcctctgcctcccaagttctgggattaaaggagtgcaccaccacaccgggctgcaaattctttctcagagaggtaaccttgtccaacttgacacacaggaaacttgtcataatgaggttaatatactttcatatttatggatacttttattaatatttaggtaccagaaagaaagactattgtgaatttccatccattgtcccatatagggggatggcccttaagcaaaacatgttttttgtctgataacctgaaatcaaccatttgtggagttataagacttcggtgacatcttatccggtagaaaatcagtcccagataaggctccgattgtgccctagcctgagtgccagtgagaatcaggaaaaggactgactgccatagagatgtctgcgtttccaaatacataagggtctctaagtcgcccattagcccatccatggcagaggcaggagaattagcagctgggcaatgccttctgattcaatccacataggaagcaccccatttatcagaagaatcggggggttcaaaagcatcaaagcattcttgaaggccacacagctgattagtgtggggctgggttttgaaccttgaacccaggtcagtccagctctcaagtccatgtagattctactctcccctgcaatcagtggtcaagatccatcccagcatcccactttctccaagccaggaaagaatggaaagccagaggagaagattgactctataatgggaggctctggagggatgaggaaacgttctgtaggaaaagcaagacagacgggggcaggcacagctctgagggagtggtccacacagagccagccatggctcttgaactcagaatgtgaggcacgggctcagagggggacctcagtctgtagatgactttgggcaggctgtggggaggaggaggggacagtagtcacagactgagtttggggaggagggcagcacccaggggaggaaattctgaagcaaattcccaatcacacaatttgaatttcacccagagatcggaaatttcctccttaggcttgagtaataaactaggttcatccattcctcagggttagttccacagagcttggaagagcacctggggctgtattaggatttcagccagtagcaatgaatgtcatgaaaattcaggaaatttatagttcacctaccctgagcaggatttagaattttagtgggaccctggtccccaaaatatgtttccctttgcctttccaaatcttggtcccaggagggtcttggctgggaagggcttttggcccaggatgtctatccactggagcagggtagagaggcatcatgtgcagagatgtcaaggatctagaatatggactgtccacagccttagctgacctgggcaaaacacagtgctctaaggtggaaacacagatccgttcattacagatggctccttctttcgaatattttgtctgattaaaaatatgatacaatatatataactgacgtggagcaccgtaagccagggggtgtctccagggtgttaagtggggctctgagtgctttgggaattgaggttttctgtaaagtcttctggaaggaagaacatacacagaagacaatggctagactggcatcttgtgtctcacaaaggcaaatgaacaagaggtcgtgaacatgggtggaggtctgtgaaggaagggtttaaaattaatgctctgctgtcccttggtttccttccttgcagcctggagaaggaaaattacgatgtctgggctaaggtggtgaggctcaatgaagaactcgagagggagaggaagaaattcgcggccctggaaatcagccttcgaaatgtggagcgctcccgggaggacgttgagaagaggaacagagtcttggaagaagaagtcaaggagtttgtgaagtcgatggagaagcccaagacaaagacggatccttgagggtctgagtggtgtggcagggacagtcaactccactccatttcttcatgctcctagtgagctggaagcagggttacctcctaggatggacagggtatctgagggatgtgccacaatcctcagcaaatacacagaagttgagagtgtacaggagcacaccaggacacttgccaccctgtgctgtgctccaaggattgcgttattccactgtgggaagagtgaactggaatcttccagtgtatgaccaggtccaaaggagacatttaaggtgtgtgacatctcaggaccccaggccagagctgggccaaggcctcagttctttgttgtctctgtggctgtcttgcctagtcagatggttctggtcgctctaaaacatggccagaaaatatttcttcactctccagtgctggccaactgagggctgcttggagaggctgaactgttggaatccaggatcaaacaatatttatgaaagcaaaatgagtgagaaaattatattcaaataaagaaaacagaaaacaaaaattgagcaaggatattggcaatctaatgaaacacttttattagaattagtaaaagggggtttggtaaaattagtaaaagctggctctgtggctgagagcactggctgctctttcagaggactcagcatccacacgatgatggctaacaaacctctgtagctccagttccaggagatctgacaccctctgaggacaccatatatacatatgctgcccatacatatatgcaaacaaacaaacacctgtacacatcaaatacacacacacacacatacatacatacatacatacatacatacatacatacatacatacattccaacaacaaagaaaaaaataattagtaaaaggcacctcttgcctgaagcaggtgaatctttcttgtggtacatggctgtgtgaccagggctttgggttccatcctgagtcaccctccagtggacaaaacttgtctgcaaagtctcagagcaaaggtttccaactatgaaatgactttaggggtgtggatttgtatagtgaatagtcaagattattaattattattgtcattgttgttattgctattctacttcaacaaaatgaaaatgggtttatttgctctttagagggggatcaggcacaatcatctgttttctcaactatagctaatgccacctgccttttgctgagttaattataaaaacaaccaaccaacaatatcgctgattactctctggccacaatggtctccctgctcccgtggcttgccccaggtggcagtaccgccccaattgctgctgttggcttgccactgaacctctgtattctcagtcatctattccttgcggctagctgtcacaaatcctctgtaacccagtaaaatca

SEQ ID NO: 1825 - DNA, 3710 bp, Mus musculus
gcagttgtttatcacaacttcacttcagtaaggcctgagattctgccgagcagggctctgcttcccaagaggcagtgtcaactgggacatttctggtaaatctgaacgcaaagcagggtgccagcccctgggggactgtgggtgggacttggggagtttgggtgccatccccgagtgacagatggatggacggttcatgagagagaaaggaggagacacgtgggcagatcggtctggagcgtaagagtgcctgcaaagcaagcaacaggcagagaaggcagaggaaccgaagtgaagatcagagaaacaagaagggcacagcctgtgacacactgtgagccacttgaccagctactcacccacctcggaagcaaaatgtctctcaagctgccaaggaactgggatttcaatttgaaagcggaggcttcaaaaatagctcggtcgaggagtgtgatgaccggggagcagatggcggcctttcacccacccaccactcccaaccccctggaaaggccaattaaggtgggctggctgaagaagcagaggtccatcgtgaaaaactggcagcagcggtactttgtgttgagagctcagcaactctactactacaaggacgaagaggactcaaagccacagggctgcatgtatctgccaggcagtacagtcaaagaaattgccacaaaccccgaagaagctgggaaatttgtctttgaagttattccagcctcaagtgaccagaaccgcattggacaagactcctacgtcctcatggccagctcccaggtagagatggaggagtgggttaagttcctcaggagagttgctggcacgccctctggagcggtgtttggccagcgtctggatgagactgtggcctatgagcagaagtttggccctcacctggtgcccatcttggtggagaagtgcgctgagttcatcctggaacatggtgtgagtgaagagggcatcttccgcctgcccgggcaggacaaccttgtgaagcagctgagagatgctttcgatgcgggggagcggccctcctttgacagggacacagatgtgcacacggtggcatctctactaaagctctacctccgagacctgccagagcctgtggttccttggagtcagtatgaagggttcctgctctgtgggcagctcatgaacgcagatgaggcaaaggctcagcaggagttggtgaagcagctttctacccttccccgagacaactacaacctcctgagctacatctgcagatttctgcatgaaatccagctgaactgtgccgtcaacaagatgagcgtggacaacctggccactgtgatcggggtgaacctcatcaggtcgaaggttgaagacccagctgtgattatgagagggactcctcagatccaaagagtgatgaccatgatgatcagagaccacgaagtcctcttccccaagtctaaggatgcaccgatctcaccccctgcccagaaaaacgatgccaagaaggctccagtgccgcgaagctctgtggggtgggatgccacggaagacccacccctttctaggacagacagcttcagtaacacagcaagtagtcctgatgccaccagtcccactggaccactgcccagtgaccagcatcaggaagacagcggaaaagcccccagggaaaacccaggagactggaagatgcaatcccgtaaaaggactcaaacgcttcccaaccggaagtgtttcctgacgtccgcattccaaggcaccaccagcagtaaactggaaatctttaaaaatgagttctggtctccatcttcagaggctaaggcaggagaagggcacaggcgaactatgtcccaagacttgcgccacctttccaatgaccagcggacttctacctacgataatgtccccacctcaccacagtcccaagggaacccagcaggtgcactctctccccctgccagtgactccaagagagatgctcttgttagcacagactctgaaatggaggctggaagcaagaactctggcgaggatgaccttgattctctgcagaggacagtccagagcctacagaaggaaatagaaacccagaagcaggtctatgaggaacagattaaaaacctggagaaggaaaattacgatgtctgggctaaggtggtgaggctcaatgaagaactcgagagggagaggaagaaattcgcggccctggaaatcagccttcgaaatgtggagcgctcccgggaggacgttgagaagaggaacagagtcttggaagaagaagtcaaggagtttgtgaagtcgatggagaagcccaagacaaagacggatccttgagggtctgagtggtgtggcagggacagtcaactccactccatttcttcatgctcctagtgagctggaagcagggttacctcctaggatggacagggtatctgagggatgtgccacaatcctcagcaaatacacagaagttgagagtgtacaggagcacaccaggacacttgccaccctgtgctgtgctccaaggattgcgttattccactgtgggaagagtgaactggaatcttccagtgtatgaccaggtccaaaggagacatttaaggtgtgtgacatctcaggaccccaggccagagctgggccaaggcctcagttctttgttgtctctgtggctgtcttgcctagtcagatggttctggtcgctctaaaacatggccagaaaatatttcttcactctccagtgctggccaactgagggctgcttggagaggctgaactgttggaatccaggatcaaacaatatttatgaaagcaaaatgagtgagaaaattatattcaaataaagaaaacagaaaacaaaaattgagcaaggatattggcaatctaatgaaacacttttattagaattagtaaaagggggtttggtaaaattagtaaaagctggctctgtggctgagagcactggctgctctttcagaggactcagcatccacacgatgatggctaacaaacctctgtagctccagttccaggagatctgacaccctctgaggacaccatatatacatatgctgcccatacatatatgcaaacaaacaaacacctgtacacatcaaatacacacacacacacatacatacatacatacatacatacatacatacatacatacatacattccaacaacaaagaaaaaaataattagtaaaaggcacctcttgcctgaagcaggtgaatctttcttgtggtacatggctgtgtgaccagggctttgggttccatcctgagtcaccctccagtggacaaaacttgtctgcaaagtctcagagcaaaggtttccaactatgaaatgactttaggggtgtggatttgtatagtgaatagtcaagattattaattattattgtcattgttgttattgctattctacttcaacaaaatgaaaatgggtttatttgctctttagagggggatcaggcacaatcatctgttttctcaactatagctaatgccacctgccttttgctgagttaattataaaaacaaccaaccaacaatatcgctgattactctctggccacaatggtctccctgctcccgtggcttgccccaggtggcagtaccgccccaattgctgctgttggcttgccactgaacctctgtattctcagtcatctattccttgcggctagctgtcacaaatcctctgtaacccagtaaaatca

SEQ ID NO: 1826 - protein, 736 aa, Mus musculus
TQSRVPAPGGLWVGLGEFGCHPRVTDGWTVHERERRRHVGRSVWSVRVPAKQATGREGRGTEVKIRETRRAQPVTHCEPLDQLLTHLGSKMSLKLPRNWDFNLKAEASKIARSRSVMTGEQMAAFHPPTTPNPLERPIKVGWLKKQRSIVKNWQQRYFVLRAQQLYYYKDEEDSKPQGCMYLPGSTVKEIATNPEEAGKFVFEVIPASSDQNRIGQDSYVLMASSQVEMEEWVKFLRRVAGTPSGAVFGQRLDETVAYEQKFGPHLVPILVEKCAEFIHGVSEEGIFRLPGQDNLVKQLRDAFDAGERPSFDRDTDVHTVASLLKLYLRDLPEPVVPWSQYEGFLLCGQLMNADEAKAQQELVKQLSTLPRDNYNLLSYICRFLHEIQLNCAVNKMSVDNLATVIGVNLIRSKVEDPAVIMRGTPQIQRVMTMMIRDHEVLFPKSKDAPISPPAQKNDAKKAPVPRSSVGWDATEDPPLSRTDSFSNTASSPDATSPTGPLPSDQHQEDSGKAPRENPGDWKMQSRKRTQTLPNRKCFLTSAFQGTTSSKLEIFKNEFWSPSSEAKAGEGHRRTMSQDLRHLSNDQRTSTYDNVPTSPQSQGNPAGALSPPASDSKRDALVSTDSEMEAGSKNSGEDDLDSLQRTVQSLQKEIETQKQVYEEQIKNLEKENYDVWAKVVRLNEELERERKKFAALEISLRNVERSREDVEKRNRVLEEEVKEFVKSMEKPKTKTDP

SEQ ID NO: 1827 - DNA, 641 bp, Mus musculus
gcagttgtttatcacaacttcacttcagtaaggcctgagattctgccgagcagggctctgcttcccaagaggcagtgtcaactgggacatttctggtaaatctgaacgcaaagcagggtgccagcccctgggggactgtgggtgggacttggggagtttgggtgccatccccgagtgacagatggatggacggttcatgagagagaaaggaggagacacgtgggcagatcggtctggagcgtaagagtgcctgcaaagcaagcaacaggcagagaaggcagaggaaccgaagtgaagatcagagaaacaagaagggcacagcctgtgacacactgtgagccacttgaccagctactcacccacctcggaagcaaaatgtctctcaagctgccaaggaactgggatttcaatttgaaagcggaggcttcaaaaatagggctgcatgtatctgccaggcagtacagtcaaagaaattgccacaaaccccgaagaagctgggaaatttgtctttgaagttattccagcctcaagtgaccagaaccgcattggacaagactcctacgtcctcatggccagctcccaggtagagatggaggagtgggttaagttcctcaggagagttgctggcacgccctctggag

SEQ ID NO: 1828 - protein, 135 aa, Mus musculus
TQSRVPAPGGLWVGLGEFGCHPRVTDGWTVHERERRRHVGRSVWSVRVPAKQATGREGRGTEVKIRETRRAQPVTHCEPLDQLLTHLGSKMSLKLPRNWDFNLKAEASKIGLHVSARQYSQRNCHKPRRSWEICL

SEQ ID NO: 1829 - DNA, 167490 bp, Homo sapiens
  misc_feature (1)...(167490): n = A, C, G or T/U
agtttttgtacttttagtagagacagggtttcaccatgttggccaggctgctcttgaactcctgacctcaggtgatccacccaccttggcttcccaaagtgctgggattacaggcgtgagccaccacacccaatctaaaagaactttttgactgctaggaagaggttgggtcttcagatgaaatgttctcagcagtcaatcagcgtatccatggagacatatcaccaaaccaagtaagtacaccacccacctcagcctaccccagtagggtagttagagtacagtgatattgcattgcttaagtcttacttgtctataatacagcaggaagttctggcatgatcctctttccaactattgctgaggcttctgaaggtctaggtttcacacattcctttttgatctttgcccatcagttcagccagtcagctcactctggctgttgctgaagtctgtgggctatgcccctccacgagggggctcccaccacctgcatggtgtaggagcttgtctacctcttccaaaattccccaacataggagagaggagaaaaacctcccaccttcagttgaggaccaggcttcgtgcatttcctttgatcggatttccccatcttttattcactcataatggtttactatgagtgaatctcttattcactcacagcagtttactattctcaaaatctgaatatgttcagtatttaatgggtgggacaccagtagcccatctcagatagacttgtgcccatgaagcctaattccttctttcatccagtgtgaggtgaggagtagttggccctaattcatggtctctataatgtgatcttcactgagtaaatacttgggcagaaatatacacatacatctactaaaaataaacacttcttttcaaggattgctcacaatccacatttggggtgtgcctgtggtcgggcagggggtcttttctcactgcagggacacaatctcactaaagatatagctaattacattatgaaaaccacagtagtcgtggtctcaagcatcagcagtcaggtaatgaacaatgagtgagtattacatatacatataaatacacacacacacacacacacacacacacacacacacacacacacagaggctccagttgccaaccctacactgttatgctgaagatacctgccaagtccttccctgggaaacaaggcatttttgggaagtgaggttattgtttagggtaagatgaacttcttgtattaccactggatttctcctcatttgtttctctacgtccctcttataagtggggaattcataggagctgacagtgtaaatggtcttctcagaaaaccctccctgtggtttaaagaaaacctatcctacctcacattctggcatggagctgagagaaacctgcacagctgtgaaaggtagatcagcattgctgagcttcctccaaagaattctctctaaaccatcagccaagaatcactttcttggagaattcagctctttggggactgagaactcttttccctttgcagtgccccagtggaagcattttcttcacgcagataacaagcctaggcatcctgctggcttgtttacatacttaatagaaatgctgttttgctccccatctgtgcttgaggcttggccagaaaggagtcatctctgggactaagagaagaaatgtcagagcatactgcttagcccagatactatgcttgcagttaccccctccagggctcatgggtggaacaaaaatgaaaccagtttcttttagtttatacaacctttattatttttcagattgaaaattcaggaattttttaaaacagccagtgaagttggtatcattgttttcacccaaaattattcatgctactatgtaccagtaccatgtaggtgtttgggaattcagcaaagaacaagacaaagtttcagccctcatggaacttacagtctagatcaatcaaacaaacaaacaaacaaaaaaccaaaaaagagtatttcgtaaacataatttctgatagtggtaagtattgtgaaaaaaaggagagccgggtaaagggccaggaggtgacaattgaaggaatgaggcagaaaggaattgaaggtagtttagattgagaggtcaggaatagcttggcttcttgaacacggagactgttttaccggaaaggggtcccgaaccagacccgaagagagggttcttgaacttcactcaagaaagaattcagggtgactccctagagcaaagtgaaagcaagtttattaagaaagtaaaggaataaggaatggctactccataggcagagcagtggcatgggcttctcgactgagtatacttatagttatttcttgattatatgctaaacgaggggtggttattcatgaggtttccaggaaaagggggtatttactggaactgagaattcctctctttttagactataaaggggaacttgcagacattgccgtggcatttgtaaacggtcatggcgctggtgggacgtcttttagcatgctaatacattataattagtgtgtaatgaactaagcagtgaggatgaccagaggtcactttcatcaccatcttggttttggtaggttttggctggtttctttactgcatcctgttttaccagcagggtctttgtgacctgtatctttggttgacctcctatttcatcttgtgactaggaatgcctaacctcttgggaatgcaggccagtaggtctcagccttattttacccagcccctattcaagatggagtgactctggttcaaatgcctctgacaagatgaagaagccagcccttcaaatatctgggagaactttccgagcagtgaacttgcaagtccagagtcccaagacgggaagcttggagagatgaggaacagtaagacgctagtgtggctggagtaaggagggcatgagcggagctgacattggagaagaggccacacagcagatcacccaatccctcacaggtcatggcagagtgtaaatttttttcctaaatgtgagtggagtttgatggagagttttaaacaaggaattgacttggctctaaattagggtttaaaattaagcacttggcccattgccatgaaaattgctggggaaggcaggggagtgggcaaagtttggaagctgggaaaccacctatgactggctttaatttctggaagccttccattccatcaagtttttcacttcagtttctatatttttaattgctaagactctattagtgctccaaatattcaatttttatagcattcttttcttgtatcttagatgcaattttttctcttatctttcaggggatattattgttactttgtgaactactctgttctttgaattgtctctattgctaacaagtgtgttgtattttattaattattatcattttctaggcttagtggttaaggacatagacacgagacagattgccagcttagaatgacagcttctcagcttacagtgtgaccttgggcaagttacttaatgtctccatgcctcagttccttcactttttccatggatgtaataatagtatttacttaaatggtgattgtgaagattaagtgtgtaaatatacataaagtacttagaatagtacctagctcacagtatacgcttaataagggttaacccttattttttctatttgctttggtctgtcttttatattagatgctttcctcaagttgcctggttattcttgactcttccttcatatttaataatgaggcactgataggctgtcttggagctctgggcataaagagaaggcttgttcactatggacatgatactagggtctgtagctgggctagatcttttgggaacaagatttatcttcaattcttttctcttgggctggttatgattcagagaaggatctcctagtgtcctttttgggctctctacattcaggttgtcaactttaaactcaatcccctattttctgacggtaccccttccatcaactgtgttttatggcccaaatcttcaacatctctgtttaatcctcttcaaaaaatagccttctggttttatctgaataggtcagagcagatgtccaggtcagtaatgatgggaagagatctggagtcaaaattttttccaacagactttcttttcatctccctgctttcaaccttgtctttaccctcacttccaaagatgccaagtcctactaattcctggaacttcggagggttcaatggttcaaacatggctgcttctcagctttcctcactgattttggggatttagccttcttggacaactaagttcatttgctttccagcttctaaatttcattatcttatttccattcctgctttcattttctttgttaaaaaaaatctctttgcagtcattttcatgaggtttaggaaacattagagactcacgggagtctttaatctgtcatgtgtaactgaaggctggaggttcagcccctaattttaaaggtttgaggtttgaggtccagaaaggccgcacagctgcttggaaataacatggagtggagattggggtcttgatttgttgccaaaaacttatcctgctacttcactctgccccttagaagcctcaggagacctgatttgataacgttgagcaggttttcttctcaatctcaatggccaagggcaaagagtctactctggtccccagcctcggtaaagccccagagagcaggtaaagttgtgattcttcatggtctttgagtcctcacctatggagccatggtctgtacttgggggagcaactagacgttttaactttccctcacagtgggctaatgcccaagggaggctcttcattctaataagttctcataaaagggtaaaattttcctgtatttttgaataacacgatggatattttctctcaggaaaatgcaactaggttatgggacaacatgcagaagataaagcaatgtattgaaatatagggagtgagttgggaggaaatggcctcaatgagaacctaactagggccaggatcaaatgaagccagttaagaggagaagaggaatgttagagcaggatgggccagaacaaattatttggaaggttttatctgctataagcttttataatttttggttgtgaatatcttaattatgaaagagaagactttgcaagaatatgtgtcagaaggcttaactcttcattttgttgcaatttagaagaatatatgactacaagacttggcatcttatcagtttctcctgccagcccaagtacacctgtgtgtgaccctggtcagagccattcatgatacatgatgagttgtaaggaaccaaatccccagtggatctggacttccatttcagcaattgtcacagagcctccctcaacccaggttacactcttgctactcagtctagtattgatgctcccacctaaaaatacctcaatcgaaacttttacggaactttttttctttttcaacttttattttagattcagaaggtacatacgcaaatttgttgcctgggtatattgtgtgatactgaaattcgggatatgaataatcccatcactcacatagtaagcatagtacccaacaactgttgggtactagtttttcaacccttcttccccctcttcctcactctagtcatctccagtttctattgtttccatctttatgtccataagcacccaatggttagctcccacttatcaataaaaacatgcagtatttggttttctgttcctgtgttaattcacttatgataatgacctccaggtgcatccatgttgctgcagaggacatgattttgttcttttgtatgactgcatagtatttcatggtgtatatgtaccatattttctttatctagtccaccattgatgggcgcttaagttaattccatatatttgctattgtaaatagtgttgcaatgaacatactagtgcacatgtctttctggttggatgatttcttatcttctaactatataccctgtaatgggattgctgggtcgaatggtagttctattttaagttctttaagaaatctccaaactgctttccacagtggctgaactaatttacatttccaacaacagtgtataagctttcccttttctttcagcctcaccaacatctattgttttttgactttttaataataggcattgttactggtgcaagatagtatctcaatgtggttttggtttacatttctctgatgattagtgatgacaagcatgttttcatatatttgttggctgcttgtatgtcttcttttgagaagtgtttgttcatgtcttttgcccatttttgatggagctgtttttggcttgttgaattttttttagttctttacagattctggatattagacctttgtcagatgcatactttgtgaatgttttctcctattatgtaggttgtctgtttgctctgttgatagtctcctttgctgtgcagaagcacttcagtttaattgtcagtttttgtttttcttgcaactgcttttgaggacttagtcataaattattccccaaggcccatgtcgagaatggcatttcctaggttttaggattccttttttttttttttttttttttttaaaaaaaaaaacagggtctcactctgtcacccaggctggagtgcagtggcacaatcttgactcattgcagcctcaaccttcctgggctcaggtgatcctcccacctcagccttctgagtagctgggactacagttgcctgccaccatgcctggctaatttttgtatttcttgtaaagacagagatttgccatgttgcccagtccggtcttgaactcttgggatcaaagtatctaaccacttagcctctcaaagtgctgggattacaggtgtgagccactgtgcctggccttattctaggattcttataatttgaggtgttatactaaatctttaatccatcttgagttaatttttttaattaatttattattattatactttaagttttagggtacatgtgcacaatgtgcaggttagttacatatgtatacatgtgtcatgctggtgtgctgcacccactaactcgtcatctagcattaggtatatctcccaatgctatccctcccgcctccctcaccccacaacagtccccagagtgtgatgttccccttcttgtgtccatgtgttctcattgttcaattcccacctataagtgagaatatgtggtgtctggttttttgttcttgcgatagtttactgagaatgatgatttccagtttcatccatgtccctacaaaggacatgaactcatcattttttatggctgcatagtattaccatggtgtatatgtgnnnnnnnnnnnnnnnnnnnnatcgttgttggacattcgggttggttccaagtctttgctattgtgaatagtgccgcaataaacatacgtgtgcatgtgtctttatagcagcatgatttatagtcctttgggtatatacccagtaatgggatggctgggtcaaatggtatttctagttctagatccctgaggaattgccacactgacttccacactggctgaactagtttacagtcccaacagtgtaaaagtgttcctatttctccacatcctctccggcccctgttgtttcctgactttttaatgattgctattctaactggtgtgagatggtatctcattgtggttttgatttgcatttctctgatggccagtgatgatgagcattttttcatgtgttttttggctgcataaatgtcttcttttgagaagtgtcagttcatgtcctttgcccactttttgatggggttgtttgtttgtttcttgtaaatttgtttgagttcattgtagattctggatattagccctttgtcagatgagtaggttgcgaaaattttctcccattttgtaggttgcctgttcactctgatggtagtttgttttgctgtgcagaagctctttagtttaatgagatcccatttgtcaattttggcttttgttgacattgcttttggtgttttagacatgaagtccttgcccatgcctatgtcctgaatggtaatgcctaggttttcttccagggtttttatggttttaggcctaacgtttaagtctttaatccatcttgaattgatttttgtataaggtgtaaggaagggatccagtttcagctttctacatatggctagccagttttcccagcaccatttattaaatagggaatcctttccccattgcttgtttttctcaggtttgtcaaagatcagatagttgtagatatgtggcgttatttctgagggctctgtcctgttccattgatgtatatctctgttttggtaccagtaccatgctgttttggttactgtagccttgtagtatagtttgaagtcaggtagtgtgatgcctccagctttgttcttttggcttaggattgacttggcgatgcgggctcttttttggttccatatgaactttcaacccctgcctttttttgttttccatttgcttggtagatcttcctccatccttttatttggagcctatgtgtgtctctgcacgtgagatgggtttcctgaatacagcacactgatgggtcttgactctttatccaatttgccagtctgtgtcttttaattggagcatttagtccatttacatttaaagttaatattgttatgtgtgtatttgatcctgtcgttatgatgttagctggttattttgctcattagttcatgcagtttcttcctactctcgatggtctttacattttggcatgattttgcagtggctggtaccagttgttcctttccatgtttagcacttccttcaggagctcttttagggcaggcctggtggtgacaaaatctctcagcatttgcttgtctgtaaagtattttatttctccttcacttatgaagcttagtttggctggatatgaaattctgggttgaaaattcttttctttaagaatgttgaatattggcccccactctcttctggcttgtagagtttctgccgagagatcagctgttagtctgatgggtttccctttgagggtaacccgacctttctctctggctgcccttaacattttttccttcatttcaactttggtgaatctgacaattatgtgtcttggagttgctcttctcgaggagtatctttgtggcgttctctgtatttcctgaatctgaatgttggcctgccttgctagattggggaagttctcctggataatatcctgcagagtgttttccaacttggttccattctccccgtcactttcaggtacaccaatcagacgtagatttggtcttttcacatagtcccatatgtcttggagggtttgctcatttctttttattcttttttctctaaacttcccttctcacttcatttcattcacttcatcttccatcgctgataccctttcttccagttgattgcatcagctcctgaggcttctgcattcttcacatagttctccagccttggttttcagctccatcagctcctttaaacacttctctgtatttgttattctagttatacattcttctaaacttttttcaaagttttcaacttctttgcctttggtttgaattttctcccgtagctcggagtaatttgatcgtctgaagccttcttctctcagctggtcaaagtcattctccctccagctttgttccgttgctggcgaggaactgtgttcctttggaggaggagaggcgctctgctttttagagtttccagtttttcctgctctgttttttccccatctttgtggttttatctacttttggtctttgatgatggtgatgtacagatgggtttttggtgtggatgtcctttctgtttgttagttttccttctaacagacaggaccctcagctgcaggtctgttggagtgcctggctgtgtgaggtgtcagtctgcccctgctgggcggtgcctccctgttaggctgcttgggggtcaggggtcagggacccacttgaggaggcagtctgcccattctcacatctccagctgcgtgctgggagaaccactgctctcttcaaagctgtcagacagggacatttaagtctgcagcggttactgctgtctttttgtttgtctgtgccctgcccccagaggcggagcctacagaggcaagcaggcctccttgagctgtggtgggctccacccagttcgagcttcccggctgctttgtttacctaagctagcctgggcaatggcgggcgcccctcccccagcttctctgcggccttgcagtttgatctcagactgctgtgctagcaatcagcgagactccgcgggcgtaggaccctccgagccaggtgcggcagataatctcctagtgcgccgttttttaagcccgtcagaaaagcgcagtattcgggtgggagtgacctgattttccaggtgccgtctgtcaccactttctttgactaggaaagggaactccctgaccccttgcgcttcccaagtgaggcaatgcctcgccctgctttggctcgcgcacagtgcgcgcacccactgacctgcgcccactgtctggcactccctagtgagatgaacccggtacctcagatggaaatgcagaaatcacccatcttctgcgtcgctcacgctggtagctgtagaccggagctgttcctattcggccatcttggctcctcctcaatttttgtatatagtgaaaggtaagggtccagtttcattcttctgcatatggctagcaagctattccagtactatttattgaataggggatactttccccattgcttattttggtcaattttgtcaaagatttgatggctataggtgtacagctttatttctgcattctctatttttctacagaaattttagggtttataaagtgaacatatacaagctggaaaacaatgtagcaattatttaatctaaactctttgttttatagaaaagaaagtttggctctaggaatttgctgaagattgcataactaattggtagtaggattttagaaaaattgttttcccattcagttagggttgcagtgtaagttcaaagttgttacttcatgcattcacttaacaaatacttattacaggcctactatgtggcaagcagtgctctaaacactagaagtctggtgggtgggaaaatcagaaaaagctttggcttctggagtttatatccttgtggggatagacagggaataaacaaatgaatatatactgtagaaaatgaagaaaatgaagaccaacagcaattggggatgatggttattttagattgatggctgttttagatttagttttcttgaaagaggtggcatgtgagcagacacctcaataaggtaaaggaaaaagctgttggcatatctgggcagaaaattccaggttgaagaaaaagtgcaaaggccctgaaatgggaaaaagactggagtgtttaaggaatagtgagaaggccggggtaggtggtgcagagtgaatagaatggaggaaaattagtgatagaaactggggagccagaagccaaattacacaagaccatgtagtccgtggaaggactttgtattttattctaagtgtttgagaagacataggggaatttcgagtggaggagtaatcaatacgaagtgcctttaacatgtgcattctccctatcatgtgtagaatagactgtggttgcaggggtgggacaaggaggccagttaggaagcgctagtcctggtgagatataaatgtgtcctaggcaagtgtattagtctgttctcatactgctaataaagatgtaccaaagactgggtaatttataaaggaagaggtttaatggactcacagttccacatggttggggaggcctcacaatcatggtggaagatgaaggaagagcaaaggaatgtcttacatggcagcaagcaaagagagcatgtacaggggaactcctctttatgaaaccatcagatctcctgagacttattcactatttataagaacagcacctgaaagacccgtcccacccccatgattcaattacctcccactgggtccctcccatgacatgtgggaattataggaactacaattctagatgagatttggatggggacacagccaaaccatatcagtaaggtagtcatattcagcttcacttaaaaattgatgccataaatgtagttaggttttaatggaaagttcacatttttctagcaaatccacagtcattaagatgttctttcctgcatgtgtggtgggccaggggcagaacacacatgcacaggtatgtgcccatacgtgtttgacagctcaaatgggacattggatctatttgggaggactatttcaatgggaaaagtggatggattcaggctatattttgaatttgaaactaataggactttaccagtattaaatataggaagacagaagagttggggtgcttccaaggtttttcctgaaaaacggggcaaagagtggtaacatttcatgtattgggagtgctggggataaccaggctttgggagagtagtaagatattcaaaaagagtaagtttaagtgttaagttagaatgaaggaattgagaaggtactcagatataccattctggaaatcttgagaaaaacggggactggaaatcgagccatcaatgtctagacaatatttaatgccattggatcacatgagattgtctagaaggtatgcatagaaagaagagatggccaatgattaagtcctggaacactagcaaacagaggctgtgtgaaagaagaggatgcattaaatgttaccgagagggaaggagttaagaattaaacaaatgagtcctgtgtactaacatacaccaggttgttcagcatacaccaggttgtatgctggaagcggcacataaacattagttgtttcatgtattcatttacttaaatacttatttagagagaaaaggtcctttcctttcccacatggaacttagtctttcatggtggaaggtatgccacagcttagtaaacaaaaatttagaaatcagaaattagtaacacagaaaacaataaaaattaaaatgtggatggtcaatgaaaccagtaaagtttgttctttaaaaagacttgtagaagagggaaatccctgtcaaaattgacaaaggacacaagaagaaaaggcaggaaaaaaaaattatgaaagtacgatataagtacaaatagagtagctcttttaaaaatcataagacattatcatgaacaactttatgccaatatatttaaaaagcttaagtatccaacaactacaaaatacacattgattttccaagatagattatcggctgggtcataaaacaagttttaataaatatcaaagaattgacattatacagagtatgttctctgacaaatgtgattggataataaatcaatatcaattatacagctaaaataattcttcagagtttagaaattagcacatttaaaaataatccaatgattcaaagaagaaattataaggaaaaaatattttgaactggatgataataaaacataatatatcagtatttgtgggacagttcttagaaaaaatttatagttttaaatgcttatacttaaaggaaaatggtttaaaattaatgacctaagttttcacatgaatacgccagaaatgaaagaaaaaggtaaatctaaaggaagtagaagaaagtaaataataaatataaaaacaaattttaaaataaaaagaaggctgaaaaatggacacatttaaagtttgttccttgaaaagattaataaattgatacatcctcagcaagacagagaagaaaaatacaaataaccaataccaggattgaaacaagagatatcagtgaagattctatatttattaaaaagagggggtaatatgaacaattttatgctaataaaatttaaaattcagataaaatgaatgaatttctagcaagatacaacttaacaaacttacacacacaaaaaatggaaaatcttagtagcttgccttccttccttcctttctttttttttttctgagacagtgacattctctattgtccaagttggagtgcagtggcaagatcatagcccaccatagccttcacctcttgggttcaagcaaacttcccaccttagcctcctgagtagctgggactaaggtgtgcaccaacacacttggctaatttttaaaatttttttgtagagatgcagtctcactatgttgcccaagccagtcttgaacttctaggctcaagtgatcctcctgcctcagccttccaaagtgctaggattacaggtgtgaaccactacacccagctgaaaatcttaataacttcatatctatttagaacactaggtttgcaatcaaaactcattcgccccctccctcataaaaacaaccaccaccaatagcagtaacaaaatctctgtctcaaatagttttatgaggctagaataacattgataccaaaacctgacaaagatattacaatgaaaggaaattatagactaatattcttaattaatttagatgaaaaatttcttcataagatctaagaaaactggatacagtaatatattcaattgtattaaaatatatttgaatgtatatatgtattacatgtaatccagtaatatatatgtgtataagtgtgtgtgtgtgcatgtgtatgcatatgtaaaatcacaacaatgacatttagcctgggatggcaagattggcaaaacacttggaaaacaaccagcataattcaccacattaacgaataaataattagtaattgaagtaattgaagtgagcatccttaacctgataaggagtgcctactaaaaacctagataaaatataaatgtttttcctttaaatctggatcatgacaaggctgcctgctcttaccacttccattcaacattatgctacagttctgctagtttaataaggcaataacgatatttaaaaaggcataaagattggaaaagaagaagtaaaaaggttttgctctgtttcccaggtttgagtgcagtgatgcgatcatggcttactgcagcctcaacctcctgtgttcaagcaatcttcctgtctcagtctcccaagtagctgggactatagtgcatgccaccacacccagctaatttattaatatttcttttgtagagatgggggtctcactctactgaccaggcttgtcttgaactcctggcctcacatgatcctcccacattggtctccgaaagtgctgggattacaggtgtgagccaccacatctggctggaaaatacaattttaaagcaatactatttacaatagtattaaaacccatttgttacttaggaaggaaagatgtgcaagacctctgtacttgaaactccaaatcctgttgttattaaattaaagaagacattgagttaactttttaagaattaagtggatcatccaatcaaccatccaatgtttgtggattggaaaactcagttttgttatgatacttattcttctcaaatttatagatttaacaaaattccaattaaaattccagcaagctcttttctgtagaaattgacatgctgattctaagatgtatataaaatgtgaaggatctagaaatttaaaaagaagaacagagttggaggacacctaccacttgatttcaaaacttaccataaaactatggtaatcaatatggtgtggtattggcataggacagacaacttaatcaaaggaccagaaacgaaggtccggaatcagacccgcacatatacgggcaatgaatttttgacaaaggcaccaaaacaattcaatgtgaaaaagcaacttgtgtttgtttgtttgtttgtttgtttgtttttcaacaaatggtcctggaacaattgaatagctaaatggcaagaaaagaacctcaaaccttctttctatagatacaccaaaattaatttcagatggctcaaaggtttaaaaatataagcaagaactaaagggcttgtagaagaaaacataggagagtatcttcacagtcttaggggcagaaatagatttattggacagaacataaaaacataatataaaataaaattttatagattagaattcatcgaaatgaaaatgttcagctcatatgaagacaccagtaagtaaataagtaggcaagccacgaaccaggaggaaaaatttgtaatacgtatatctaacaagaactttaatccagaataaagaattactaaaaattaacaatgaaatgccaacccaataaaaagtagcaaaagccttgaacagatatttcacaaaagaaaatgtatgaatggctaattagcacatgaaaagtttctctctcattatactataatctccacaaggacagagaatatatttgttttgttggtattctttttttaaattttattttactttaagttctgggatacatgtgctgaacctgcaggtttgttacatatgtatacatgtgccattgtggtttgctgcacctatcaacccatcatctaggttttaagtcctgcatgcattaggtatttgtcttaatgctctccctcccctttccccccatcccccaacaggcccttgtgtgtgatgacttaaaggtgagcagaacttagtctggtgtcttagtttattcagtctgctataacaaaataccttagactgtgtagttcataaatgaaactcacagttctgcagggtgggaagttcaagaccaatgcactgtcagattcagtgtctggtgaggacctgtgtctcatagatagcaccttccatgtgtccttatgtggcagaaggggaaacacgcctcctcaagcctcttttataagggcagtaatgccattcatgaaggctgccctcataaccctatcacctctcaacggccccacttcttcacgccatcaccttgggccttaggtttcaacataagaattttgttgggggcacaaacattcagttcacagctcctggtatgggatatgcaaaggtccagggaaggaagcaggccctcccacagagaggcgtctgaatggaaacagagcaagctagggtaggagagaagcattctacttagatggaactcgactggttaagaatctattagacagaactggatttttacatgccaaacaaaagggcctatgtgattatttctagagtacccagaaagcgagtagcacatgcctgagatttcatccagaaatggagaaaagagtaagtccagaaatgttggtttaaatgtccatgggagaaggaataaaattgcttaatgttttcacactaaaaaaaagaaaagaaaaaaaaaagaaaaggttctcaacatcattagttattagagaaatgaaaaataaaaccacagtgagatggcaatttccaccaactcgaacgtctaaaatttaaaaaatattggcaatactatattagcaagaatgtggagaagactgcaactctcatacattgctagtgggaacacaaaatggtacaacccctaccacaagatgccgacttctgtggtccttctttatagttttccattgaaacagtcctcccaaatagatccgatgtcccacctgggccgtcgaacacgtatgggcacatacctgtccatgtgtgttctgcccctggcccaccacacatgcaggaaagaacatcttaatgactgtggatttgctagaaaaatgtgaactttccattaaaacctaaccacatttatggcatcaattttttttttttctatagcagtgtttagtttaatttacaaaatgctcaagtagaatacacatgacaatgttaagcactgtatacagttaagtgtcaaattatgtttcactatagaagtgtgacggcttcacaacacatgattgatatgatgctattaaagaatcagagcagacatgctacatgatttttattttaaaccaggcaggcatttccttctctatattctttgttgcagtctactgtataaaagtcagttggaagtttttgtgttttagtaattttgctgaatttaccattgtcaatttgagattattcttttaaatgttgttaagtccttttcttcccatttacaatttcaactcagtttactaaaattcaaaataaccagtgaaaatacattttcaaagatgctttaatatattttatagtacatttatttgtcattctgtatgaaaacttccttttttttttttttgagacagagtcttgctgtgtcacccaggctggagtgcagtggcgcagtctcagcccactgcaagcttcgcctcccgggttcacgccattctcctgcctcagcctcccgagtagctgggaccgcaggcgcccaccaccacgcccagccaatttttttgtattattagtagagacggggtttcaccgtgttagccaggatggtctcgatctcctgacctcgtgatccgcccgcctcggcctcccaaagtgctgggattacaggtgtgagccaccgcgttatggcatcaattttaaagtgaagctgaatatgactaccttactgatatggtttggctgtgtccccacccaaatctcatcttgaattgtagctcccataattcccatgtgttatgggagggaccctgtgggagatcattgaatcatagtgttgattaagtctcacaagatctgatggttttataagaggaaaccccttttgcttggctctcaattctctcttgtctgctgccacgtaagacatgtcttttgccttctgccatgattgtgaggccttcccaggcacatggaactgtaagtccattaaacctctttttctttataaattccccaatcttgggtatgtctttatcagcagcatgaaaatggactaatacacttacctttcaccatttactctattttctcttttcaaactaaataataatctcttaatttctgtatctccagaacctattattatagtttctggactatgatgaggtgcaataaccatgaatttagtcactttcatgtggaacataaatggcaggaaataaattgtttggaaagtattacatgttttactattcatttactcaaaagtatttttgagctcttattttctccttcttaatttaaaaaacctcaggctgttgaaggagagatcatgtattcatttatttcttagctactgggcagagcaaaaatcaataattagaagaagtgtgttttccatgaaattttacactcaaatcaacattataactgtagtgaaattggcatcacattctaaataagggaccgagctattcttgtaggaaatataaacctggtatgaaaagtaagtgcttatcaataacacttccaggaagcaatttttactccggggcaatttgctgtgcatgctgggtcactgctgagttcaatgcttcagaactttagatgatgaaaatgcctttcttccacattacgtgcactgctgagtttcagttggaagggtccttagagaccacctggtccaacccccttttgctttttattttctttctttttttttttttttaggggacagggtctcactccattgcccaagctggagtgcaatggcatgagcacagctcactgcagccttgaactcctggttcaagcaatcccaccacctcagcctcacacacagctgggacttgtcaatgaaaagagtcaaactcagtaaaatatttgaaaaaaacgtattctgagccaggtttgagtgacccatagcccatgacgcagccctcaggagatgctgagaatatgtgtccaaggtggttgggccacaacttggtttcacacattttagggagacataaggcatcaatccatacatgtaacatatacattggtttggttcagaaaggcaggttaaatggaagctgcgggctttcagatcataggtagatccaaagattttctgattggcaattgattgaaatagttattatctaaagacttagaaagagtgttttggttaagataaagggttgtggagactaaggttttattacacaagcgaagcctctaggtagcaggatttagagagaatagattgcaaatgtttcctgtcagactcaaaaagtcttttctatgagtaattccaaaagggaggagggtataatggagcatgtctagcacccccttcccatcatggactgaactggattttcaggttaactttggaatgcccttggccaagagaagaggcccattcagatggttggggggccttagaattttatttttggtttacagactataggtatgcaccaccatgcctggatcccccttatttttcaattaagaaagcactccagggtggttaactacttacgcaaatattacagagttatttgagatttgtgataagaatctggtcttgcaattcttggttcattattctttcctttactgcaagtaggtaagaagataaatcatgggtatggtttattgtcagtgtcctagggtgacagagaatcagttttggggaaaataggttaattacaaagctttccagaagacttgttcctcagaaactaaattacatatcttcttttcctgctcccaatcattgcctctcatgcaggattaggccaagcaggtgggaagagaactgaatactagagggtcttagagaaaatgaagtttagccagtcattcatagaagaggaactgaaacttatttcacagagaggttaagcaaccttcattctccctttagtgaaagaggcaaatattctttagaaacccatgtgacagcttcgttctcttgcagctgattttgaatcttgcagttaatcatgatctctgggccatgggccttattgtcttgaggctctcattttactgattgataaagcagaaaaacagagaagtggtgtgatgtggcgagaaagtgctagcaggaaatgagatagctattaccacccagggctctcctgtttctctctgcaagactcctttggaaatcttgcattgccttcccctttctgagtaattccgcggggcttcatttagattgtgctcatttgcattaactctcataacgaagaggtgtattaccaactgaaatggaaaaaggcctgtggttactttgtgtcttctctgctgtctctggtctctgggaccagaactcatcctcagtaccgagagccaaagaggagctgaccatggattagatgaaataaggtactgtgtacctgacacccaggaaatagtcagtgtttcttacctcctagtattgttgcaaaatgaagcagaatacagtatatcttttgattcaaaggtgtcattaggccttataactattaaccaattaacaggttaatattttagcttgcacttttgctttaaaatctgaatattgcatgttaatttaaaatatggtttgttaggagtgtggtaggaatataacttgtttgaaattgacatcaatgtctaaaatgaaaaaccatgcatcccaaaacatggtgattaccagcggaaggtcaggaaaacatgcttctcttctgcagatggaggtacaatgaggtgtttgacaggggcttatgttcccaacacacctggcctggactctgcatggagaaaaaggtttgttcactagactgagatttcgaagggtagagtatttgtagagagaagccaggtctccagtgttgctgggtttggggaaagcctgcaatggattcaggtgtccaggtgagaacagctttctgacaaatgtgctgctgagggtgatgttctctcagcatgtggcctgtgagctctcagtgatgctccagccagcaggagtacaccaataagcctgactctctgccaatagctggggccagaggtctcgtcctcatttttcactggtacctggcaggcaaaattcctatccaggagggaatggtagctctggacagttgtataaatatgctatcaaaatttgagaggcagaaagcaaatgacaggaggccagaccctccttggagtcatcagtccactcaaagtccctagaccccttgctcaataatttcactttagtccacataattccaagaggactaactaaggttttcattacagtggtctcttctggcagtaagggtctgctcaaatagctctagtggacagaggccacagacatctgttagtgccaacctcagaaaatcccactataagtttctgttatatttttattttttcaatgaagctccttacctagacacaaaggtgatggagaagtgtttcctccctatcaaaaaatactttgaatttttcaaagaaatttcattttccttgaacaatacagacaaaatcaaataatgcataagcactcataatctctgaccctccctttgcccataaagaacattctggaaattctagcattgttaacttggtacttcccttacactatcctatccttcctaccttccttctctctcctctattctactctccttggtggtcatttttattattatgaggtctagtttattggacaagaggagaagtgttagctagagaatttatactggaaatgaaagaaaaattacaataaatctaggaatgagatggagtccagaagaacccagtaggatagatttcagggagtattaacttaggagttgagaatgcaaaagagaatagtctcaagtcacttccatctacatggaagatattgagaaaggataaactagaagagaggacaagacatttgactatgggttgagtaggtgaatccttaagaaatggaatatggccgggcatggtggctcatgcctgtaatcctagcactttgggaggctgagatgggtggatcatgaggtcaagagatcgagaccatcctggctaacatggtgaaaccccgtctctactaaaaatacaaaagattagctgggtatggtggtgggtgcctgtagtcccagctactcgggaggctgaggcagaagaatggtgtgaacctgggaggcggagcttgcagtgagctgagattgcaccactgcactccagcctgggcaacagtgcaagactccatctcaaaaaaaaaaaaaaaggagagatggaatgtagttgaattatcttaaattgtttttaatgactattaagttgtctgtttttctttaagtcaggaggcattatttagagtttatgccacagagcagaggcaattataatattcatgttcttcaaaaataaaaacagtgaagctatctttgcacctatgccaaaatcctgcactaagagagaaggtgcacttcttccaataaacagatgtgtgaccagtgccagtgtgggctgacttcatctcatccttccaaatctctcatcttagggagctgggtgaattgactattgtagctgctccttcctcctgcagtaacacttccctttttgctgctgacagtgcttcagaggtacagtccttttccaagaaccaccgccatgccattgccactggtacctctcctcactcaactcctctcctggtggtgctttgaagatggctggaactctagtctttactcagctactaaagttggctgtcttccagcagccttcccaactcctgctgaaagaaggaaaaaggtagaaaggaacatgtgagatggtagagagacgtgcactgttcaatgtaactccacatcttcagcaaatcctgttaaactaaaaaaaaatgatgctgacttctaagtccaggtgaatgcacgacagagacaacacatgcagattcaggagccattggcggggaataccaggagaataactcctggaaatgcacaaaaatcataaggagggctttggatttcaaggctttggaattggaagttttgcatcaagtttacatgtatctccaggacagctgatattggatactcatttaaaagaagacttttcagtacccagttggaaataaagctttagaatccaagtatccctgagggagatgactctggcaaaaatgcacactgaggtataaagaactcatgccattcaaaagccttattcaaaagtacatgtgggagggcagcaggaatctgaagtagaagaggagaagagatgctggtatgggaagggaggtggtgagaaggaaggcatatctgcaactgggccaattaaaatgtgcagcatgtacaggaggtgggagaataatcaaatgaataacaagtattaacttttctgtattgctaagttgtaaacttaaaggagacattttaaaaggatcttaaattctgttcctcaatctcagtgacatgagataatatgcatattgctacatcttttctttttaatgacctataaaagcaatcaggtgtgagaacttgaaattttgtgatctgttacagtatgcgcgttatgaagctcacactcattttcacttttaagtgtctctgttgtttctttagttttcatttttaacattgtacccataaaaaataacatatgttgttgtaaaatgcttttattttctcttcaggttcattaaattacttccaaaaaaatgatttcttagttaaattgtttgaccttttctgttcttgacattggatacatatggccctccaccatctcactgctcccgaagataagaacctataaatgtcagtttgtatgattaaaatgcaacaattccaactgcactgtgaatgtttgaagctgctttgcatttttctaagttcctctgggggaaaagcacctttgctaatgaaaaacatattttcaatatggaaattgcaactggaggcacagcctactgtgaagagttcagacatatttggttaattggtgaacagatttgacagatggctatttgcattggggacaaaggagtcttctaatttgtgctgtgtgtccctctgtgggattcaagctgtgcacactgctggagtacagacataacttgatttttctggtgggctgatgggatggcctacttcactccgctttgtgaagtcgtagcctgaggcaagagggagccaagcatgaagagtttgaaccagtgaaaagatatatttcccagggggattagggattcagagaacataaagactattccttaaatcttcccttagcttagatccccacatgtccatgggggaataagattgaagggaaaactggaaattctgtaatacaccaggatccagcaatcctgctttgggattcctcattcagcacataacacaaaatggagtgaaccattctcagtcattcctcttcagaacattgcacagatgggtgccctgtggctcgctcactgtttgcagcaggatagcccgggcagcagagatggtcaacccggatgagctgtgctggagcagaggcaggatcttcttggcaatgtgatggtgaccacaagtcaggaaactgctgttgaaattgcctttgcaaacattgtatcagtgagaaaactatgacagtgaaatagatctgatctaatcaacccccatcttgcccttaacttccaaacttcccttggtcattcctgggcttgggctaactttgggagaaatttagtttatagttcaaatgataatagccctccccaaaactaaaccaccatagcaaaactaatgaaagaccaccaggttaggaggatgagatgaggctaaattctgctaagatataggcataaatgattaccagccattattccatacacaagatttgcagcatccctaattactcctgcagataacatcattgttatagaacacactggccttttgaaatgtcttttcagggttttgtatttctgatgaccagatggccccatccaaaccagatactcttgactcaacaggccctgtggccccacccagaacctgactcagtgcacagggactgttttccacaatcctaggattgcatcctcaaccaatcagcagcacccatttccctgcccaccaaactatccttgagaaaccatagcctcagaattttcagagacactgatttgagtaacaaaactccagtctcctgttcagaaattaaactctttcttttccgcaattccctcccccatcttgataacctggctgcatctggacagtgggcaaggagaaccccactgggcagttacactgtgtgcagtggagatttgaaggaagacacagctaatggcagtgtctatggaactatacagataccatgagagtgaaacttccctatgtacacagcccacgaatactacctgctcttacctgctcacactggtactccagaaatacctagactannnnnnnnnnnnnnnnnnnnnnnnnnnnnnnnnnnnnnnnnnnnnnnnnnnnnnnnnnnnnnnnnnnnnnnnnnnnnnnnnnnnnnnnnnnnnnnnnnnnnnnnnnnnnnnnnnnnnnnnnnnnnnnnnnnnnnnnnnnnnnnnnnnnnnnnnnnnnnnnnnnnnnnnnnnnnnnnnnnnnnnnnnnnnnnnnnnnnnnnnnnnnnnnnnnnnnnnnnnnnnnnnnnnnnnnnnnnnnnnnnnnnnnnnnnnnnnnnnnnnnnnnnnnnnnnnnnnnnnnnnnnnnnnnnnnnnnnnnnnnnnnnnnnnnnnnnnnnnnnnnnnnnnnnnnnnnnnnnnnnnnnnnnnnnnnnnnnnnnnnnnnnnnnnnnnnnnnnnnnnnnnnnnnnnnnnnncccgtggtgaagacgcaaataaaaagaaaactaaaattttaaggaattcttaatggccaaagggttcctaccacttccttccacttagcatgaatgaatacatactcttttgtgcctgggctcccagaatactaaactgtcatgctaggagtcatgcagctagaggccacaagattctgaacctcgccaattgctcctaaggataatataactattgtaaaacctaacattggcgttcgagatatttttcagaccccacattctgatgcattagctggttccacccagactggttatctggcttagtcagttctgtgataccacttaggaacccactttgaccagacagccagaagaaaccactttgaccccctacaatttaatctttgacctggctaatcagcactctccattccctggtctcctaaacaccaaattattattttaaaaattccagtctccaaatttttgaggagactgatttgagtaataaaactctggtctcccattctgctggctctgcatgaattaaactcctttgctattgcaattctcctgtcttgataagttggctgtatctgggcagtaggcaagaagaacccattttgaggctagagaaagaatgggggctagattctgctaaaacaggttatgagaggtgggggaagagacttggctagcaaaggtggccttgttatgtagatgaaggctgtctcagagagaatagctggtaaacggagtcagactctcaatctctgctggatacagggaaagaaatagaaagggaaggggcgtggctgcattaacagagattctttacagatgtaaaacttccccacttgagacagctttgcaaggccacttctgtcagccaagtggcagccatttcaaaataagtcaaagaaatatattttggggtaaaatatttaatttccctcaatattcatacaaatatagagtcaattctcattattcatggtaattatgctctataaagtcactctaaacactgaattagtgaattaaagaaccatcggtcctagagaaaatatagagttaggttcctatgagtctttggctataacatgtttgtcaactgatcaatatataaccttgttttatatatgtttctatttaaaggcatcttatttaatatatattgttgattttaacattgaattcatggtcaatagcactgtaactcatgctcaaacaaagcttatttaacatatattttctccacaaggcacattaccataaccacccagtgggtccttgcctgctgcctagacagagctgatttatcaatataggcgaattgcaataaagaaagtatttaattcacacagagtcagctgtacggaaaactggagttttattattactcaaacaagtctccctgaaaacttggaaataggggtttttaagaataatttggtgggtagggggtcagaaaggggagagtgctgattggttgggtcagagatgaaaccatatggagttgaagccgtcctgttgcactgaatcagttcctgggtgggaccacaagaccagatgaaccagcttatggatctcggtgctgctaagctgaaccatagagtatggctccgtaaaaatctctcaagcactggtcttaggtttaacaatagtgacgttatccccaggagcaatgtggggagattcaggatcttggagccacctgctgtatgactactaaaccataatttctaatcttgtggctaatttgtcagtccccacaaaggcagtctggtcccctagcaagaaaggggtttgttttgggaaagggctattatcatctttgattcaaagttaaactataaactaagtttctcctaaattagttcagcatatgctcaggaatgaacaaggacatcttggaggttcaaagcaagatggaatcagatatgtcagagctctttcactgtcaaaattttctgttataatttttgccaaggtggtttcattactgtgagaaacacactcacccgtccacactcaaagaatggacccagaggcatgaagaacagcgaaagtgagacttttaatggcggtcttgcaagatggggtgtctggtaggcagacacactgggggcagctacagcaggtaatttatctcctagcacacaagtccttctcccagttcgtcactggttgagtactatggggttacaaacttcctggatgccgcctaagttttatgattccccttataaggttataccccagtccccttccccacttgagtttcaacttcccaataatgaacgtttcttcccttttatgggctgaccgctcctctacattctgttcgcttatcatgactttctaggagcatgagccatgccgttggttacatccacaggctggctgccagtccttagatttatcatgccttgaaaatggaccattcaaaatattttctcacaattacagccttcttgtgcttaggaatgacaggtagcatttcagaactacacttggggatcatttaaaaaaatgataccaccaataaaaatgcaaaaacatagcattaaacagatcgtggaaaggacatgagatcgcgctgagaaaagaaggcagagcattgctttatttaaccttagtgagacagcctattttaatggtgcaggtgtgcagagtttgccaaggcttgagggtaaggcaagagtacctagtaaaggttatttaatctcttggctctgtatgaatacaaggtagtaattatctgccactcagagagtcaagataatctgtatgctttcacaataagaaacaaaacccatctgcttctgggaatagggagggaaataaaactgcctacatcctggacttcactttatttgatgtgaggtgaagtcatctgctgccagagttgcatctcccccatccctattacttccacctactttcctcttcccacatcccctggctggccatctcatcccaggcttaagttggctgttgctgaagagggtaaaaaagactcctgctcttccaccttgcctggacactaggaaaaaaatctttctcctcctggggaaggaacagaaaatttgcttggagtgacatcattcactgatacaaaaactgaagtatgctgccactgaaggagaggcaagaaactggtttgcccaaaacctccctgccaatacaagccagagttttgttgctataaggaggagtagcaggaaacctacctgtgtgttaggccctggacttcgtagaagacaaaggttatctggcactggaggaagacagacaaagagaaagccatattctgtgattcaggaagacagagactgcctaaaactgaggctgaagcagaacagagaaacagcccctgctgccaccatgagcctcaactgaagaaccagcaactaccactgagtaaaagtgagtacagagaccatctctgtgacacaagaggccaggcctggctaaaaactgaaggcagggtggcattattaacaaaaaccatctggaactcaagactgcttaccacaaggtagcaatgatctaccactgaaggaataggaagccagtgcagtggtacactaaaactatagcaccaaaaagaaaaagaaaatccaaactaagctcaattattggctagatcaactcactcctttacacacacatctacacacacacacaaacacacttggtctgaaaaaataactgtgtcaattttccaacataaacattatttaatttactctctaccattctttaacattcattgtttggcattcaattaaatattataagacagagaaaaaaaaggaaaaacatattatcaagagataaagagaacagaacaagactcagaaatggccaagatgttgaaactatcagccaaaggatttaaaataactatgattaatataatacagaatatagtaaaaaaggtggtcagcttgtataggcagatgagaaatttcagcagaaaaaaaataaaactgtaaaaaagtgtcagctgggtacagtggctcatgcctgtaattccagcactctgggaggatgaggcaggaggatcactcgagacttggagtttaagagaagcctgagcgacatggcaaaaccccagttctacaaaaatattttttaaaaaattagccaggcatagtggctgtgcctatagtcccagctaatcaggaagctgaggcaggaggattgattgagcccaggagattgaggctgcagtgagctgtgctcatactactgcactccagcctgggtgacagagcaagaccctgtctcaaaaaaaagtgtcacatcaaatgttatagattttaaaatctgtgatgctaaagaaatatacttcttttggttagaatgtcatagagaagcaggagagaaaataaccagcaaatttgaagatatatcattaggaattactcaaaataagacacaaagaaaataaagcaacagaaaataaacaattaaagaactcaagatttctgaacaatatcaaacatctaacaaaggcagtctgctaagctgaagagaaagacaatatagcagaagaactattggaagagatagtggtcaaaattttttcaaaattaataaaatataacaaaccacagatccaaacagctcaaagaacaacaatacaatgaaaaaagccaaactgttgaaaactaaatagaaagagaaagtcttgaagagaagatagaaggaggggcaaacccatcgcatacagaaaaacaaatacaagaataacagccaactcctcactgggatcgatgcaagccagaagacaatggacactgtcttaaataaaaaaaaaaaaaaacaaaaaaacctgtcttcctagaattatatacctagtgaaaatatatttcaacaataaaggtgaaatgaatattttttaggtgaacaaatcctgagaaaactcattgccagcacatcagcactatgatagaggttaaaaattttttttttaggtagcagaatataatactagatggaaataaaatttggatatacacagaggattgaagggtgatagaaatggcaaatatggtaggaaatcttaaatgacttttattcttctaaatttcttgaaaagataatggactgcttaaagcaaaaattaaactttttgttgtatttataatatatataaattaaaatgtatgacagtgatagcacagtgacagagcaagggaaaataagagtatactgttgaaaggagtttatgctacatgtaaagtggcataatattacttgaaggtagacagtgataagtttaagtactgtagtcctataacaactactaaccaatacataaataaataaaagagttatagctaataatccaataaataaaataaaatagatttataaaaatagcaaattaattaaaaagtgcaggaaaaaaggaacaaagaccctaataacagaatttcaaaatataatttttaaaaacccaacctgataaaacagaaaacagacaaaggcaaattcaaaattacagctaaaggttttaatactttacccttagaaataaataaaatgagtagaggaaaagtaagtaaggatatagaaatctgaacaaagctatcaaccagttttatctactttacaattatagaaaaatccacttacaacgctagaatacatattcttttcaagtgcacatacatcatttatcaagataggcaatatttaaaataatttttaaatgattcaaattatataacgtatactccttgaacatatgcttccattaaagttttaatatctaggatttataaggaacttaaacaattgaacaagtaaaagacaaccccattaaaaaatgggcagaagatataaacagacatttctccaaagaagacagacaagcagccaataaacatgacaaaatgctcaacatcactaatcatcaaagaaatgcaaaccaaaaccacagtgagataccatctcacacaaatcacaatggctattatttaaaagtcaaaaaacaacagatgctggtgaggctgcagagaaaagggaacatttatacactgttggtggaaatgtaaatttagctcagccactatggaaaggattttggagatttctcaaataacttaaaacagaactatcactcaacccagcaatcccattactgagtatatatccaaaagaaaataaattgttctaccaaagagacacacatactcttatgttcattgcagcactattcacaatggcaaagatatggaatctacctagctatccatcaatagtgaattggataaagaaaatgtggtacatatataccatagaatactgcccagccgtgaaaaagaatgaaatcatgtcttctgtagcagtatggatgcagctggaggccattatcctaaatgaattaacacaggaatagaaaatcaaatactgcatgtttgtacttacaagtgggagctaaacattgagtattcatggacattaagatggcagcaacagaccctggggactactaggaggagcagggaggcggtggggcaaggggtgaaaagctaagtgttggatactatgcttactacctggatgaagggattattcatatcccaaacctccgcatcatgcactatactcatgtaacaagtgtgcacatgtatccactaaatctacaagttgaaattattttttaaaaatagaaatgtgtcagaaacatcctcaaataactgaagatgaaacaacacattttaatttatgatcaaagaagaaatcaaaagtgaaattagaaaatgttttgaatgaaatgaaaataaaaaggcaacatatcaaaatttgcaagctagacttcaagtaatgcttagagggaatcttatagcattaaaatcttttttcagaaaaagaataaaaggtcttaagtcacttatttaactctccattgtaagaaaccagaaaaagaagagtaaatgtaataatagtagaaaataatgaagagtaggaaatgataacaacgagagcagaaaacaaaagcacaatagaggaaaaatcaacaaaaatgtaataaaaatttcattatctgaaaagatcaatgaaattaaaaaaactctagctagaaaaaaatagaagagactaggtaaactagtaaagttcacttaagaagacataggtaatctgattagcccatatatatctattaaataaactaaatctgtggttaaacactttctcacaaagcaaactccagtcataggtaagtttattggcaaattctatcaagcatttaaaggaaaaataatacaagtcttgtacaaacttttcctgaaagtattagagaagcaaatagttcccaagttatatgaggccagtatacagtacagactataaccctcatgaagttagacacaaaatcttcagtaaaatattagcaaatcaaatccaacaataaataataaggaaactatatcataatcaaatggagtttatctcaagagcacaaagttggtttagcattcaaaactaaatcaatataactaactctgtcaatggaatagaaaagaaaaatcgcatgatcatcttgatagatgccaaaaaggcatttgacaaaactcaatattcattcatgatcaaagctgtaagaaaaccaggccagaaggaaagtttctcaacttgatataacacatctgcaaaaacaaacaaaaactatatctaaattgtgatgaaaatgtgaatgtttttcccttatgactgggaagaaggcagggatgtccaatttcaccactttttaaaaatatatgtagaaagagacagagtctcactattgctgcccaggctggtctcaaactcctggactcaagtgatccgcctggcttaatctcccaaagcgctgggattacaggtgtgaaccactgctgcgcagtgaatttcaccacttgtattcaacattgtcctggaggtctgagctagtgcaatagtcaaacaaaagaaataaaaggtgtaaagcttagaaaggggaaagcaaaaggcatttttattctcggatgtgatcatctgtgtagaaaatcctaaggaacctacaaaatgttagcagaattaatacatgagttacgcaaggtctcaggatacatggtcaatatataaaagttataattgtatatactagcaatgaaaaattggaaattggctgggcacagtggctcatgcctgtaattccagcactttgggaggccaaggcaggcagatcccttgagcccaggagcctgggcaacatggtgaaaacctatctctacaaaaaaatacaaaaattagctgggtgtggtagcacatgcctgtagtcctagctactcgggaggctggggtgaaaggatctcttgagcctgggatgcagaagttgcagtgagccaagatggtaccactgtaatccagcctgggcagcagagccagaccttgtttcaaaaaggaaaaatatttaaaaaaaagaaacaaggctgggcgcggtggctcacacctataatcccaccactttgggaggccgaggcagattgatcacgaggtcaggagattgagaccatcctggctaacacagtgaaaccccgtctctatttaaaaaaatacaaaaaattagctgggtgtggtgggcgtgcgtgtagtcccagctactcgggaggctgaggcaggagcattgcttgaacccgggaggcggaggttgcagtgagccaagatcgcaccactgcactccagcctggtgacagaatgagactccatctcaaaaaacaaaacaaaacaaaaaaaagagaaagaaacaaaaattggaaattgaaactccaaaaagtaccacttacgatagcatacaacataaaatattttaaaatgtgtaagacctgtataaagaaatctataaaacattgctaacagaaatcaaagaagtcctctattaaaagacagcaagtccctgagcactgacctagagctctctcttaaagaaagccaaatccagtttcagagataagcctgcagatggaggctaaatagctgtgattgatgaatagaaagatgataaattagttaaggtagctacaagtcagaggaaaaaaactgactcatgtcttagcctggtttccctaaagggaagcctttggcaaaggcttgtgtcaatatttcactagggattccagttccagggaatacgagtgaagttagtgagacaggaaaggagagtcaaaatgagggtgcattacctgggtagccattacttgcaatcaagctgactgattgcttgataacatgaaactctctttgaagaagccatatacatgactatttctcagaactttccaattgaggtagaaagggagaatttgttagctgatttctgtctccctccactcaaatttctgccctacagggtattaattcacccatctgtctgagttgcacatgcctaaatatgagagcagtcacactgtctctcttgacttattgccaacaggcaagctctgggacacctgaagaaatcggtggtcacgaggcaagatggttttgagttgtgcctccatagagttgttttggctccacgctgagttggcccaccatcttttcactctgctttcctcattctcattgtgtcagattttatctcagaccagacccttcatgcttgcaagaggctgcagcagttccaaggattgtatctagaaggtttctttctgcattgtcttccttattgaggaaatcctttcaaaatatttccagaaggcttctaattgggtacccttggccagaattgagtcacatgcccatctctaaataacaagtaagagaaatgagattactgtaactgaattactagaaccagggtatattccctgaggcttgtggtaggagcagttttccctgaaatgcatgataggttgtagaggggatggtaaactgcatataattagggttctattaggaaggaagaaaggaggattaagaggatagatagacaacacagagtatctgccatagatttaaaggcaaagatcgaagatcacatggattatgcctgtattctattttcaatagaaaaccaggaacatttttcttcttgaaaaatcttcctgactttaatataaaccatccatctatccatccatccatccatccatccatccatccatccatccatttatccatccacctatttatccatttttttccacttgtattattttttacacatattaattgccttgatgctgtgaataagcacagaatcacctagaatctgatttatgtgtatctgttgtaagtagactttcatagacgtttcattttgttactaatcttctttcagattctgtgcctaagggatctgtcacacgaagtgcaactagtttagttgttagaaggctattccttttctctgtgtgccaatcaatttagtatcagcatccctgcacgatactggccaagcaaagtcagacactggcgaagcttagcctctttatcaatctgaaggatagtcctgaatgctcatattaagtaggtcgctttagaagttaccaaacatccaaacttaatgacttccttttaaagaaatgacatgtaaaatttgctcatttgatattccttcaatgaccttgtggacttttcaaactgaaaagtttcaaactgaaaagtccaggatgcaactctggacctccacccctccccgacaaatgtgttcctcttcccagtcttcatcctctcagtcaatggcattgaacgcttattgcccactgtaagaaagggacaagcatcttattctccttcttcctcatctttctcttttagtccaacagcaagacctatgactcctatttccaaaaatagatctggaatctgtccctccgttcctattgtggccactgtggtcctcctccaggatctctcccctgagctactgcagtagcttcctcggtggactttttatactccttctcttcttccagtgtattcccttcacagcaatcagggtaatcttttgaacatacaaatcaggtaatgctactctctgcttaaatcccctcatggctatacaatacactttaaataaacttcaaactcctaattacctaggaagccctaaatgatctgacatttgcctatccctacaaatccatctcaacctgtattccctctagccaactggagtctagcattgctggccttctgtattagtccattttcacactgctataagtgtatgtaatttataaagaaaagaggtttaattgactcacagttctgcatggctggggaggcctcaggaaacttacaatcatggtggaaggcaaaggagaagcaatcaccttcttcacaaggtggcaggagagagagaaagagtgaagaaagccacatgcttttaaaccaacagatcttgagaaaactcactcactctcatgagaacagcaagggggaaatccggtcctatgatccaacaggctcccaccacatccctaccctgacacatggggattacaatttgacaggagatttgggtggggacactgagtcaaaccatatcaccttctctcttcctggagcacatcaactgatcttccaaggactctgagaatacccttctctttgccattttaactaagtcagcttcattcccaccctcagatccctccgttggactcttccccccagagtttataagtgcatgacagtgagagttcatgcccatgttgtctaccattatatatctagttctaatacaatgcctgaaacctagaaggcattcaataatgacctcaaggccttcatatctgtgttttctgttctgaagtacccttcctccacatattcacaccacttgctccttcatatcagttccctgagctcctctcccctgtcacctcttccaagagaccttcccatcacactcacccatagctctctttacctttaggtaagccttcattatgtgaactattttatatattcccttaaggaacatgagctccatgaaggcagtggctttgttcattgctttatgtccaacactgaaagtagcacttagaacatagtgatacttcatagacatttgttgaatgaatgaatgtagaaagccagggaatgtaacattaaaatccaaagtgaaattgctgtgaagaagactagaaaataagtttgcattaattgccaattattagcagcgtgagaacagactaatacaaatgcaaactcatttttcaaaaaactccctgatttaaaaattacaggtatatgtataaatatatgtgtatgtgtccatatgtagacacagacacatagtaacaaattataacaaaccagtgtaacaaatcagtatggttttgtagtgtgacagttgactgtaaaacagtattaatatgctttgtaaagaacgaagggttgccggaaggtattatattatgtgtttataatatcttcctagatagaaaaaactatgtaaatcttttgttcccttgtcctatgtgtgctttgactgacccatgactacttgggcaaattttggactgcttcctttggtaggaaataactgagaccatacatttgtaaggcatctatctggccaaggtcatggacatagcctagagccttgaaatcatttttcttggggagctctaactagtgtaaatagtgctctggccaatgacaaccaaccttttagtctctgaatcgacatgaaaaaatctcttcttttgccagggatggatttgatccatagacctcaggactatgggctcagtgtgctctgtgtgtcattcagcactgtgccctggcttccctgccatcatgcacaatgaatggctgtgaacaggttgggagttgttgggaaaggctaagacctgtcttcccagttgatgtggaccggactttcctaccagctcacatttggcaagaagatggccctcgatgtgtacaaagctcagatgcaattttgtcactgggtgggtcagctggctgctcaccagcttcagaaagaatgcagtggaactaggaaaatctttagggacaagaaataagaaagctcaagatgagaaagcagcaagatctttggaaatttgggtatattgctgaaaatctctcggaattgctgttattggttcctgaaaatcttttaggagaataggaaccatgaagaaaagataacataattaataacatttttgttgttgttcgaggaaacaaagctataggtcccatttaaataaccaaacatattgagtcaggttgatcaaccgttctccatttctttccctactaagcctgaataagtgatataggtttaaactatggcagtcagagtttgcattaaacctaacacatagcttcgggaccagagtaaacatgcctcagtcttatttctttgtggggtgggctggagaatctgtgtttgaatttggacttgccacggggaggcccctcttccgttctcatcttttgaatcaccaggttccttgagaagccaagatctgtcttcctagttgatgtggaccggactttcctaccagctcacatttggcaggaagctggccctccatgtgtacaaagctcaggatgggatcctgaggggacaggtggttttctgaaagaccagcagagggagctaagaaacaagagttttttccttttgtcaactattcccagtggttaccgatgtggataaacagtcttttctctaccaggttatgatctggaacatattaaaccaagatccaaacaccccgtaatttggcaagtgagtgtgccttgtgtatcagtcactctgtgcctccctgagccagccatgtggtctttgtctctgagtgctaggaggacaaatgcaacacaggccagtctatgtggatgtctgcactgctttatgatcctcctggggtggaggcaaagagagcagaacccaatcgcattttggattatgagactgtttcgccaatagatttctcctcaattcttttgttctaataaattaaagaatggctttccttaaggtaatagtgttaacccttctgagatgctttataaaagagtctgatgacaatctcttcataaaggaagcagccaattacccagggcagatagcacggggttgattttatgttaggtcagtcagcaaatggaccaatcaggtaatttacaaattaaaaaaaaatagccatagaaaggcaggaaaaaaataataattcaacccagaattgcaattgtaaagagaaaaagaaatgctttttaaaaagtacataaatttgaattctcgaagaaattcatctatgaacagaatccattaaatctccaaacaaatggactaataacaataattttgcactaatggaagacctccagattatttcctgggcattagtggggaatgatgactagaaccaaatggaacataagtattatttgaatcagtctttattcttcagatgtgaatgaaataatgattatggactgaattgggctaaaaataactacagagcttttatttatttacttacagagtctcctgcaatgattcagacttggctttactggcttcttccatagataagcaccagcctaggagctctcaaagttgttccagctaaaggacacactcagcttttggtctacagtgacttccagcctaagtggctctggacactgctggaaccccccgctccatctccctccataaatatgtctctgcagcaggtgagtgacagctccttctcagaaggtcagagtcctcagtcatctggtgatttcacaaggctcaaatatttggtccctgacataaacttggtggctttttctagttcttatataactgagagttagctagggggctgcctgctgcttgagatggaggcaaaattggcttcaactctctaataaatgggcctatggaaagtgaaaaccaagatctctgctacatctctctagtgtggactcaccttatatggttctcagagtcttttctgcctccttggacttccacttcctccctggttgtctaggtcatcctatgtcaaacttgaacttggccttttaagtttccaccacaacaaaatcattcatacagaatgcagccccctccctctcaatggcacccatttaacttgccttcttttctgtgctgaatttgccgaggaaatccaatgtcttctccttttatttgtagtgcattcagctgctttctcttcagccttggtgctgaccttcatgaacatccatggtgctggttgtggtggatgggggaggaatggaggtgaattttcccataagtccttctcaaagtatttccaaaggggaagagtgactttgctaagataaattttggtgcaaaccacaggttgatattttgccaacctcattatgatgattttaactcaattattagtatttattttcattttgagatggagtcttgctctgtcacccaggctggagtgcaatggcatgaattattagtattcttgaaagaatagctactctcacctccattaagctccattcacaacctccatctttttaaaaaatttttttaatatactttaagttctgggatacatatgcagaacgtgtaggtttgttacataggtatacatgtgtcatggtgatttgctgcacccatcaacccgtcatctacattaggtatttctccgaatgctatccctcccccagccacccaccccccgcaggccccagtgtgtgatgttcccctccctgtgtccatgtgttctcattgttcaactcccatttatgagcaagaacatgagatgtttggttttctgttactgtgttagtttgcttagaatgatggtttccagcttcatccatgtctctgcaaaggacatgaactcatccttttttacggatgaatagtattccatgatatatatgtgccacatttctttatccagtctatcattgtgcatttgggttggttccaagtctttggtattgtgaatagtgctgcaataaacatacattagcatgtgtctttatagtagaatgatttataatcctttggttatatacccagtaatgggaatcctgggtcaaatggtatttctggttctagatccttgaggaatttccacactgtcttccacaatggttgaactaatttacactcccaccaacagtgtaaaagcattcctatttctccacatcctctctagcatctgttgtttcctgactttttaataatcaccattctaactggcgtgagatggtatctcattgcggttttgatttgcatttttctaatggccagtgatgatgagcttcttttcatatgttcgttggccacataaatgtcttcttttgataagtgtctgttcatatccttcacccactttttgacgggtttctttctttgtaaatttgtttaagtttcttgtatattttggatattagccctttgtcagatggatagattgcaaaaattttctcccattttgtaggttgcctgttcattctgaagatagtttctttttctgtacagaagctctttagtttaattagatcccatctgtctattttggcttttgttgccattgcttttggtattttagtcatgaagtctttgtccatgcctatgtcctgaatggtattgcctaggttttcttctagggtttttacagttttaggtcttatgtttaagtttttaatccatcttgagttaacttttgtataaagtgtaaggaaggggtccagtttcaggtttctgcatatagctagccagttttcccagcaccatttattaaatagggaatcctttccctattgctcgtttttgtcaggtttgtcaaagatcagatggttgtagatgtgtagcattattcctgaggactctgttctgttccattcgtctatatatctgttttggtaccagtaccatgttgttttggttactgtagccttgtagtatagtttgaagtcaggtagcgtgatgcctccagctttgttcttttggcttaggattgtctgggctatacaggctcttttttcattccatatgaaattcaaagtagttttttctaattctgtgaagaaaggcaatggtagcttgatagggatggcattgaatctataaattactttgggcagtatggtcattttcacaatattgattcttcctatccatgagcacagaatgttcttccatttgtttgtgtcctcttttatttccttgagcagtggtttgtagttctccttgaagaggtccttcccatcccttgtaagttgtattcctaggtattttattctctgcagcaattgtgaatgggagttcactcatgatttggtcctccatctgttattggtgtataggaatgcttgtgatttttgcacattgattttatatcctgagattttgctgaagttgcttatcagcttaaggagatttggggctgagacgatggggttttctaaatatacaatcatgtcatttgcaaacagagacaatttgacttcctctcttcctatttgattatttctttctcttgcctgattgccctggccagaacctccgatactatgttgaatcggagtggtgagagaggacatccttgttttgtgctggttttcaaagggaatgcttctagcttttgcccattcagtatgatattggctgtggatttgtcataaatagctcttattattttgagatacattccatcaatacctagtttattgagagtttttagcatgaagggctgttgaattttattgaaggccttttctgcatctattgagatgatcatgtggtttttgtcattggttctgtttaagtgatggatcacatttattgatttgttgatgttgaacccaggaatgaagccaacttgatcatggtggataagttttttgatgtgctgctggattcagtttgctactattttattgaggatttttgcattgatgttcatcagggatattggcctgaaattttctttttttgttgtgtctctgccaggttttggtatcaggatgatgctagcctcatcaaatgaattagggaggagtccctctttttgtattgtttgaaatagtttcagaaggaatggtaccagctcctctttgtacctctggtagagtttggctgtgaatccgtctggtccttggctttttttttgataggtaggctattaattactgcctcaatttcagaacttattgttctattcagggatttgacttcttcctggtttagtcttgggagggtgtatgtgtccaggaatttatccatttcttctagattttctagtttatttgcatagaggtgtttatagtattctctgatggtagtttgtatttctgtgggatcagtggtgatatcccctttttcattttttattgcatctatttgatttttctctcttttcttctttattagtctggttagtggtctatgtattttgttaatcttttcaaaaaaccagctcctggattcactgatttgttgaagggtttctcctgtatctatctctttcttctgctctgatcttagttatttcttgtcttctgctagcttttgaatgcgtttgctcttgcttctctagttcttttaattgtgatgtttagggtgccaattttagatctttcctgctttctcctttgggcatttagtgctatacatttccctctaaacactactttatccgtgtcccagagattctggtatgttgtgtctttgttctctttggtttcaaataccttatttatttctgccttaatttcgttatttacccagtagtcattcaggagcaggcacagccttcatcctgatacacagaaatgcctggttggagaagggcaaaaagttgaaaatattccttagtagaaaaaaaatgtgcactaaaaagtattttttattaaaatacggaaggaaagaaaaatacaatgggttcagatgggcatatgacaataataaaatgtctcacttcccttcctccccttctctcccagcactcccctgaggttgccacttttggacatttctgcttttagctcttctggtggttagaatcatgacttccctgactgagaggcatgactagccctgagcatgagggtggggcttgtgcgctggaaggcttaacttgaaccttgtgagcaggaagtcaggctagaaccactcctaaagtgcctggggaggatgggacttttcactgttggttgcttcctcaaatccagtggttctcgaactggaatcctcagcactgcctgaaaagttggtagaaatgcaaattcttgggccctaccccagacttatggaatcagaacctttggaggtggcgcccagcaacccatgtgctattttaacaaattctccaggccattctgatgcctgctcaagtttgagaagccaatcttctcaaacttaaagttaagacagccaatcaaacaaccaaacaccaccaccaacaacaacaaagagacaaaactcatttcttcttccagtgattggtttggggtgggcacgtgaccctgctctggctaatgcagtgcaatgggaggcttgtttaggggcttccgggaggcggtcgtgctcttgaaaaagatgcttgggaagagtaagaggcattgcaccgggtgctttcccgtgtaggtgagaggcatggggctgctactgccatcttgtggacacactgagtggaggaggtgaaccgagggaagaacctggatgcctgaggaatgaatgccagagccccaagagtaaccatctgggagccatcctactgtggacttcttgtatgatatgtattattttttaaagttaagaacatgttgagtttggtttagcagtgaggcacccgaacacagttccattctggaactgtatctcctcccagacatagataagtggctgccaagaacagctctctgggtaggctgggccataaaagccactattacatgaacaggtgagggcggttgggaggagaaatgaatctacttcactctttattccataggtattttcagtcgttttcacacctgccatttctgagtccggggcccttctggcgccctgccctctttcatccttctctgggccatgttctgagctgttgttccctctgctaatgttacttcctgagtgtaattccatccactgacaggcttccagaagttaatgaaaatccttggcctgcccatcctttcctgtgcccgccattcttcctatcttccttactgccatctatttggggaaagcagagagataaaggagtgtttggcttgccaacttgaatgggaaggcccagattgtttcattgtttgcttttactgagacttggttatcattctcccttttcaaaagaagaaagaaagatgaaatagtggaggaggagagctgcccagcaagattccctctgggacatccatgtaaccctcttggaacatacgctaatgctatggaaatgattcttaactcttcattttgtggcttcttccaaaatgcagaccattcaaggtagatggggacactgtggtgagtcagcttgatggggaggggctctcagagctcctgagtttgccctagattatatctatccttccctggagcttgggtggacatctttctctctaagaagatgaagaacatgggtccctttgccttcataagtttgtgaaactgaaatttcagttgtccagcacaagcagattgagaatgtatatacatcgttttattcaaaccttcaaccacatgatgttatcttgaggtagcacttacactggtgagaaaccaccgtgggatcttagggtcatctcagataggcgtccttattctactgtataagttttctgaaccaaacttccttcattgtgacatggttttgccacagctggtcgttctctttactctttgatcctggttgaacgattcatgtagattctatctctctttaaatgtcagaatgtgacattcaatatttttcgcagtatttgttttatgtgtattccttaatgtttctgttttagttaaatacagtcacacatcatttaacaatgaagatatgttctgagaaataggttgttaggtgatttcaggtgatttcattgtgcaaatgtcatagaatatacttacacaaaactaggtggtacacacctaggccatatggtacgggctattgctcctagactacaaatctgtatagcgtgttactgtactgtaggcaattgtaacacagtggtaagtatttgtgcatctaaacatatctaaacatagaaaaggtacagtaaaatacaatattattatcttatgaaaccactactgtatatgggatctgtcatcaacagaaatgtctttatgtggcacatgactgaatacatcaaaccttaggttcattgctgtgtgaatcagggacctctatgttaaaaggcacagtatgggagaagcattgtgatctggcccagggtcaggatgttgaggcttttactggctctagaactgagtcaattcaatcttttctttttaagctttagacacttcctctgcaaaagacgataacttaatcacagcctctgacaggtttgtggagttgaggcttgacaagggtgttaggtaaaaactgcagtcttgcatatgtgaagccaaaggtctgagctgtgagcaaacctatcatcaccgctattgagtgacagcagtcactcggcctttcacattccaacttaaaaagcagatgcatattcctatggcttttctttgtataaacactatccataaagcaatggcagaaaagttctggtttctttaaagtgggagtgaaaactaagacatattttaaggtgttccaagtgtaggggtttttatgagtcccccttccacttacccacatgtgaattgacatatttttgccaatataaatttattcttcctttccaaagccattaacttaatattcataaaaagagctctgttttttcttttgcactcatatttcattggtttaagtaacccactttatcatataattagaatagtaagtacggtttatatcatcttggaatgcattagctgggcaacagataattcacttggtgggagtagaagtaaatggtgtactaccagctgtgaacactcagcagctactatgcactcatcaaagagtgttataaagggttacagagaattgggaacttagttaagggcagatttgttaaaaaaaaaaaaaagtatcttctttgccaatcaaatgtgtcccctcaaagtagacctctagagcctggctactcaaagtctgatccagagaccagcagcatcacatcacattttctttttctggaggatctaaggggagaatcattttctcacctttcccagcttctagaggcttccagcattgcctgatggcccctttcttccatctttctgaactttgttttgtactcacactttctacttctacagtcaaatctcttcttacctccttcttataagggcacacttggataatccagcatggcatccccatctcaatatccttgacttaatcgcatctgcaaagtacttttaccatattgtgaaataataagaaatatataagtgtgtgtgtgtgtgtgtatgtatagatagataaatagatagatacctagacagatagataggtacatagatacctagatagatacatagatagagatatttgtctctgaccctggttcctgacatagagctcctaaacttttctaattccctaagtggtacgggtactagcagcatcatttgttcttaacatttggtctttgagtccagttcctgacacagagctcttaaatttcttggtattttctgggtgataagagtgtcttttattcaaatgaaacaactcttgatgaggccttggatagctttaggataggggcttgtcatcagaaagacaaggccatgattagaagcttagcacttttaattcccaaccttcattctctggggagggcagaagagctagagattgagttagtaatagatcaagcctacatgatgaagcctccaagaaaaaaaaatttccctcaagtatgggttttggagagctctggggttggtaaacacatccatgtaccagaagtgtggtgcaccccagctccacaggaatagaagctcctgcactcagagcccttccagacctcatcctatatacctctttatgtcctttattataaaagaaaatggcaaacacaataagtgtctccctgagttttttaaactattctagcaaattatcaaccccaaggagagggtcatgggagccccagtttatggccagtctgttagaagcacaagtgagaaccctggacttttgactggtgtctgaagtgggggcagttttgaaagactgcgcccttcgtctgtggcacctgatgctaactccaggtagatagtgtcagaaccgaattgaattgtaggacacccagctggtatcagggaattggtcgacatggcaaaaaaaaaaaaaaagaaaaaaaaccccacaaaacaaacaaacaaataagaacaacgcccacattttggtgaccagatgcaaagtgttgaaaatgtagaggaaaaaaataacttttttttttctatatacatgtaaaggaacacattctcatgttctagggattaggatgtggatatcctcgggggctgttattcagcctaccacaactttgctgtcagataccattttaaggtaacttaatgattattaacactactgtttaacaagtgcctgctatgacccaggcactttacatatacatgaaacctacttcttataagaataccccacagtagatattatcaccctatccatgtagatgagaagtctggggttcagaaatcccagtaatgacagagcaggggttggtacccagacccccatgggtcccagcctctgaccttctcttggtacctgactcatgccaccatcataatcacctgttttattcccaaactcagaataaggtacgcctatgtccaggtttgtccagtgacctgtcgcgttcactgatctaaagtccatgcttaaagatttccttttgaaaaggaatctttaatgttacatgaagaccaaattgatggtttcggtaaaaagccagagcaacttcctgtgcactatcagctgactgatcagggttcttttctagaaatcacacacccagtcagggaaggtctccatcttcaaaattacaggagttagacagaaatgctgtcccttggcaggaagtggcttgagagatgccactctaatgggcttccttgataaactgtgccttaagggtttagtggagccatgggatgaaactgggaaaaaacaggaattgcagacatagaaacatttcagtcaaaaaaaaaaaaaaaaagaaaagaaaagaaaagaaaaaagaaaaaaaaaagctcctatacttgctctggaaactttactctgtacagagattaacttcttcttaattatgtagccattatgtagccataatcactttgttgttggtatcatccaaaaggacaagttctggatgcataatggccacagtctgttttttgccttttcttcaccttcctgattcccaaagtcctacagtaaggtgggcaaaaatctatgtagttttaaaatttgtaggctattttctaatagactttctctacgctagatgttttggggcatttgaaggtgatcccagtagattcctctgcttgaccaaaattatctttcaaaactgaaatcgatttttatctggtgtcaggattataactcccccctctcctacctaccccttaccacaacacaacttcctttcacctggtgagtctaagctgatcaaactgcatgtgccattgtttgcacacgtactgggccactgggcaggcaaggaggggctccttaaaccacaccagaggtttttggtccagaactggtcaccaccctcagcatgtcaccatgcagtgctttgtggactgaaatccatctgtactcacagatgtggctgaacgcagaaacactcaaagcacccccagactccaaagccttactgtggcataatatcctcattgctttttccctccttatgtccctggagctacacatgaaacttcttgggggcaacttcaactaatgccaacttgattaacattggaaatagttatgtttcaaataaaaatgtacacaagttttaattgcactggctacctcaaattttctgaacaaagcttttttgcataagagataaaggttggtgacgccttttatgaaattggtccaaactcatcagaactagcaatcaaaaattaattccttgttttattttgaattttatacttcattgtaatgatcgtattgtatatttctgagcattaggtttgcaacaactcatggataaagtatggatttctgacctgacctgtaagcaaattactcctccattccacacctcttttctgtgaaaagggatgacttaatctctgccctatttacatacaaagtcatgatgacagtcatgagaaggaattggatttgaaatggcaatgaaagtcaaagtgttatctttgccagtgtgtggactcagtttacattaaagttacaggttcccaccagctcctcctctccccaggaggtctggtgttctacgtgtaatcactcaaggtgaaccatgactttcatatcagcagtgaaatcagctgctctagttatttcctgttctggcagcaccctgctgagcatctcgtgatttcaggagagtagaagctgggtggtggagcagtccaggtttgtcttaaaaatacagttctccagctgttgtattggatttcctctcacagaaacctaaggtcgacagaggattacaaatttgcctttccataacttggatcccttgctcttctctaggtgtcgagattataactctctcctttcctacctactccttcccacgacaccacttcctctcacccagtgtgtccaagctgatcaaactgggtgtgtcattgttcgcacacttgctgggccatggggcaggcaaggagcggctccttaaaccacaccaaaggtttgtggtccagaattggtcaccaccctcagcacctcagcatgcagtgctttgtggacagacagcgtcctttctcactcttttgagtgaccctccccagctggctcaagttggccttgcagcctgataggccttttaaacaaggaaaggaaggtctctcagcacactttaacttactagttattcagcttattttcttaataagccacaagctctaagggctcttcagaactcctaatttcaacactggaaattattttcttctctttattaagaatttgcagccaggcgtggtggctcacatctgtaatcccagcactttgggaggccaaggcaggtgaatcacttgaggtcaggggttcaagaccagcctggccaacatgttaaaaccctgactctactaaaaatgcaaaaatcagccaggcatggtggcacatacctgtaatcccagctattcgggaggctgaggcaggagaatcgcttgaaccagggaggcggaggctgcagtaagcagagattgcaccactgcactccagcttggatgacagagcgagaccctgtctgaaaaaaaaaaaaaaagaatttgctacattccagacactatattgagtgctttttatatataagaagtaaagcttaaagaggttaagcaacatgcccagggtcacccaggcagtgagctgaagaggtaggatttgaacccactctggctcgagggcccatgtctcaccctagctcaggctcctgaacctcccaatttttccccatcaagctgggcacatgagccctcaaggacagctttgcaaagcaccatgcaaagtgcttgaggcaaatacgagtgtcacttggtgcagacaccctcaggccaaggtcaacagccacataggctccccactctccaaacgggagaggtgcgctaggtctggagttcagctggaaacacgtgggcctgtgctccagcagagggctcccatcacctctctgctctctttttttatgaagcaagggtgacagcgcctctgttttgcttcttgaaccggccattccagtgctcatttagatgcaccggtaatggttcataggagtgtagaatatccagcaaattccacgatgctgggtgtggtcatgggaggcagtggtcataaatgaagttcttgctgtgggattgtcagggaatccagcacatgacaaagggagttatccatgatcatagtagtctgtgatcattcccttggaagagacagacaacttcatgccttgagaatgttttcaagaaagtgaagttccctaatcgggggcagggagcctataaagttagccttctagttgtgggccatgccacatcctggtgggatgcagcccagctcactcaaaccacatgccgcttagctggtaagcagtccatctctgtgtcacatagattccctgttgggcttcccagtccttggtggctgtttcatgactgtgctgagtcctgcaggcctctatggtctgttgtataatattatggctcctgcatccagaggcttcttgggcttcttcattccaaatgcttttctcagaagctgtcttttctgtgcggcacagtcccacactgctagctgagaggatggggactgtgagcacctgctaactcttctatccctagtcccagcctgtggaagtgatggccctggtgttttctctagcagagtataccaacgtggaatgaatgatgcctgactaggcctgcagaaggggtcaaccaggcccttcagggtggtttatttcattttggaaggaggaggagagaccctaattgttcaggtgtagacacatctgatactgggaaatgggtgatgtgggagtaaatctctctctctctctctttctctctcggtggggcaggctctcactcggttgccttgctggggtgcagtggcaccatctcagctcactgcagcctggaccttcgggctcaagtgattctcccacctcggctacctgagtagctgggactacaggtgtgccaccacgcccagctaatttttgtcaaatctctctcttctttgaggtctgagtatgacaggacaatggcctccattgatgagccactggggcctgagagcagaaccatgcagctgagaaggaccgtcagatgagtgacctctggagctctctggacagcctggaagagtggcttctttcttccagggagaaagcctcagtctctcctggactgggccccaaactctctgcacttcacactggactggccctgaactctccaggtgttaaggagctgacattttcccccaactctctaaacatctggtctctaagcttagactacctgacacctaaatctataatgtttatttatcctgagcaaaacctctctcatactagcccctctgcaacagcagacagctgcctcactggggaagctccacagtgcatgacctctgtgggatgctaagaggatgggactatagccacctgctgaccctcagaccattaccaattgtatttgctgatgttcttcctgagccactctgagtgacaaaaaatatttaaggttgaggaaagaagcctttgacattatttaactatgctccaatggactctgccctaaacaccagatcagacccagctgcctactgcttcaccacgggctggaagtacnnnnnnnnnnnnnnnnnnnnacccagctgcctactgggtggcagtaggatctccatttggagatgtttactgggcatctttggcctaatgcggacctatctccagcctctgtccagcctgctccttccctgtctttcccatctcagcaaacgggaccttctcctttccattttctcaggccgtgctcgaccttgtcatttttcccttgacttctctctttctgtcacgcctgtcatccaacccgttgggagagcagataagattgatccaggatatatatgaagtattggccacttctcatcaccttctggctaccagcagagcctttgctggtctatattgtgttgcttttctacaatttagaaaaacatcacccccatgactgaatgggtggcagagcctttgagtagagaacgatactccttccttggatggctgaagccccacagttagactctgggctgatgctcagtgccctgactagactccagccccacctatccatgaggctggtgccttgctccctgcatcacctgcacaatcatgcgcagtgagctgagcaggccacgctggtgcagacctgctgtctcactcacctagaccattgcagtcagctctaaggtctccgcttttacccttgccctaccacctttcagtctgttctcaatgcgaggccacagcgatcttttattattttattataataataataataattattgaaacagagtctctctctgacacccaggctggagtacagtgatgtgattgtggctcactgtagcctcaaactcttgggctcacacattccccccatctcagcctcctgagtagcggcgattacaggtgtatgccatcctacctggccaatttttttcttttcttttcttttagagatggggcctcaactgtgttgaccaagctgtttagaattcctgggctcaagtcatcctcctcagcctcccaaagtgctgggattacaggcatgagccaccatgcccagcctgattatttaaaagtatacatcaaatcaaggcactcctctgctgtaaacctcactctaagcaaaagccaaagttccagcaaagtcctatgaagccccatacaattcgtcccctattaccttgttgacccatctcttgttatcttccccttcctccttttgctgtgaacacaagacctccttggggtctcttgaagtgctaggcctcctctcacctctggcagagctcttgcactcacacctccatctgctggaaggttctcccacataggtttacctggctcattctcaacctggcttaggtctttactcaaatgtcacctattctgtgaaatgtcaccttcgctgtccaactatttaaaaatgcaatctccctcccctctcccctcaatctgacatttctttcaccccttcccgtagcactttttctttttctccacagcccttaccaccatctaacacgttacatttatttcacttatttattttcttgtctctttcctcattagaacaagctccacaaaagcaggcattttcatctgtcttcttgttggctgtgttctcagcacctagagcactgcctgatccctaataggtgaacggttcctttatatttgttgaatgaatgagtggcaggaggcagagtgggtctattatgtggaaatatatgagattgttcttgccagtcaaaagctgtcaaatattggcagcttcacgtggttcaaattaatgtaacgtaatacagaacaatggccaaaaggaggtgttacgtgagggacatttgctcctgatttgctcagtgtgctccttcctgttggaaaacatgagattcttttataatcccctgggaacgaatttcccatataaatagacatttcccttcctgagcccatcattcacagagcagccttcttccaggtagagcaccagcagtaataatgcccgtcttggccttcaggcctccagatataaattttttggctatgggacaattttttttggctatgggacacttagaaaaaataaagatcaatagactatcaaactgtagccagacatcagatccaatgccagggaccttggcaaaggtgacatcagtaacgagaggaggtgcctccaactgactgctcagggctgggaggaacaagcctctgtggtctgagcccaggagcctgcaccccatccactgggctcacacagagtgttcagagcccagaaatctcttcctctgccaggtctgcctctgctgagcttgcaaaaaggcatagtcctattgcacaaatcttttttttttcttttcctttctgttttttttccatatacccaagggaatgggaataaaaccttaattttgtgccttgtaaatacagcttttaaaaagatatagactattaaaatccaaataaaaaagatctttacgtttggtgtctccaaatgctatattccaggacgtacatgctgaggcatctgtcagtcaagaccacaagatacagccatccggcctatgcacttagtatttgctaaaagcgtggttactggttgagtgcgtctgcaacacgggggcccacgttcaaatgcctgcacgagccaggtgggaaatacaagcgagtgaaactggctgactcacggccacaaagaaatgtgtttcctcccaatctgcttgacttcaggccatctttttttcccctcacttttggttaagatgtgggtacaaaaagtattatgcttttcttcttaaatctattagaaggaaaatatcaatacaagtgtgaccacaatagcacctggcacagtctcccaggaatgtaaaggtttgtgccaatttagggcacttgatctgcctcagagggtctgcctctgcggagcttccatctgctgattaacagggcatcaccctacttcacaaaggcctgtgttcagagaaacctcccccggctttgtgccatggccagggacctcctgacaaaggtagaccctcaccttctgactctcctggagtctgttcttcactctgacccaaactatgtcaagttcagaaaactgatttctgcctctccctccatccatttatctgatgctcatccgtgaggcagctggaataggattgctccattcccctgcccaggcattgttttaaatccctgcagaaaacaacagctacaaccatcatggtaatgagggatgacggtgacaaccacaacctggagagctcgatggagaaggagagggagagatctggtgacaagtgactctcttcagcagatctaatcactcctagaaagatgtgactgccttttcatgcacagcatcacttaaaagttctagagaactaggcaaggggtaggggaaatgcagctgaagtacatagaaaaaagtctgctggaaatttgaaatgatactgagtacaatgtacatcagaaggattaaatggaaataaggcaaaagtaggaaagtttcagtcaaagttgaaggcttgagttttagctggatgtggtcttgaggaaatgcaggttcagtgggactacatcatcggatgtttcacgaagcaggaattctgctttggaaaaccaaaccagccaataagcaaatgaaaagatgcttaacatcattagtcatcagggaaatgcaaatcaaaaccccaatgagataataacatttcatcctaaccatccactagaatggctaaaataaaaaaagactgatgataacaagtgttggggaatacgtggaaaaaaatgaaaccctcatacatttctggtggaaatgtaaaatggtgcagctactttgtaaaacattttggtggttcctcaaaaatttaaacataaagtcaccatataacccagaaattccactgctatgcccatacccaagagagatgattttttaataaaaaaaaaacttgcttattcaattgaaaataatttttaataaaagcaatgataatgccattttgtcaggggaagataatagtttataaaacttgtgcacaaggccaggcatggtggctcacacctgtaattccagcactttgagaggctgaggcaggagaatcacttgagcccagaagtttgagaccagcctgggcaacatagtgagactccaatctttataagtaatataagtaaacataagtaaataaataaataaataaaacttaaaaaacttgtgcacaaatgttcatagcatcatttttcataatagccaaaacctggaaacaatccaaatgtccatccactaaatgaacagataaacaaaatttgatctatccacacaatggaatattatttggccatgaaaagaaataaagttctgatacatgctgcaatatgaatgaaacttcaaaacatgcaaagggaaagaagccggtcacaaaagaccacatattacagtatatgacttcattatgtgaaatgtccagaacagacacctttgtccatacacaaatctatagagacataaagtggttgcctagtgctggggaaaatgaggagggtctgctaatgggtatggagtttcttttgtggaagatgaaagtgttctacagttgattgtggcaatggttgcacaactctgaatgtactagatcactgaattgtacactttgatgggtgaattgcatggtatgtgaattatgtatcaatacagctcataaaaaacaagcagtcaggtgaagaacaaacatgagaaactgtcttcaaatgcagataacagtaacagagatgacaaaatgaaagacaaggaagtgacagagtggagagctaacatgcagataactgatgctcctgaagaagatcctagagccagtgggctgcaaatcagaaataaagatataagaaactccccctgcactgattccttgcaaaatcactcagacacatcgacacctagacacatccaacccttacaaatgcccaataaacacattaaaaaataactttagttccactatttaataaaaaaagtatttgcttattcaactgaaaatgatttataataaaagcaatgataatgccaactgttagtgaggctctgagggaactgggccctacatatattgttaatggaaacataaaccgtagaactttttcatgtttgttcttcacctgactgcttgtttttttatgagctttattgatacataattcacataccatgcaattcacccatcaaagtgtacaattcagtgatttagcaatttgagagcacatagcaaaccttagtataagtatattcttattcactttcccagcatttctatctctaagaattccccctgaggggggaaaaggactagatttatccagatatttagctataagaatattatgaaaatttatgcatatctccaatgctcaatgacacagggatttgttaaattaattttgctctcatcatataattaaaaatcatgaggccactgatgatgttttggaaaaatgcttaatgacagatactttttcatgacttttttttgttaaaggaagataacggtttataagacagcatatgcaccatttaaaaaatttacaatacatgcatacatacatatattacatgtacacatgagtagaaagtgagggagaagtaggaaaccaagaatgggaaaagttcttattacacattaagtggtaacaatgatttttattttctttttgcttttaaaacacttgtatggtgattatgcacggacttctgtaatggtaaaaataataacgaaagatgttttaagagttctccaggctggacacagtggcttatgtctgtaatctcagcactttggaggccaaggcagaaggatcacttgaacccaggagcttgagaccagcctgggcaacatagtgagacccccatctctacagaacgagtttttaaaaaattagccgggcatggtagtgaaagcttgcagtcccacctgctccataggccaaggcgtgaggattgcttaagcccaggaggttgaggctgcagtgagccatgattgtgtcactgcactccagcctggttgacagagtgagaccctgtctcagaaaaaaaaaaaaaaaaagttctcctcaggctagagtccaacccttcagcaagtgcatcagaccctggccccagcagctcctgcaacttcaactagtgggtatggggcatctttgggggccatacatcatttctgatacttccctaaatgggggccgtatttgtgttttcacagcgatctgccatttcatttgcctggagcgttctcctctcactcccccacctggcttcctgactattgtctcatgggtcgcctttcctgggatgccacccaagcagagggaaccatttcctgctcccactttaccctgtgcatgcactatttttgtatcttgcacggcaagtttacacttctctctcatgactcattggaggattaggctgggttcttaatcatccttcttgtttaatcagcatccaacgcaggcctgtacaaatgtttatggagtaaacgagtgaatgaatgaatgagtctgtttgagctctaggctcacatgagccttgagtgcagaagatctgcactcaagtgccccttgggtccctaaatcaacatgccccaaactaagcccaccgttttctccttgttcctcattaccaatcctcactgtttttgtgcgtgccccatctctgtgattggaactacacccttccagtgacgagctgggatcttgggtgcctcttttttctgctgtaataattctcctggggctatcaattctgtcactcacatgactcctgtgttgttttcccttctttccatgcccatgctgccgacctctctccctcactcttcctctctcttagatatctgccacagcctcctcacccctatcctgttgaaaactccctagtgacctccgttttccccaggatacagtcagaactctttgtcaaggtttacctgccctgtgtgatccagccctgctcagccctgactatctctccagcttcgtttctcctcagccccacccctttcatccttcttaggagcgacctgaagaactttcttctctccgtgcctcattcatattgttggttttgtctggaatcctttttccaacccccttgcctccctaactcatttgtcaagccttactttaaaagacacttcttccaggaacccttccttcactccccaagtccagttaggcccctcgcatatacaccccccctagctccctacactttccccaacatagctctctcacactgtatttaatcgttcacttaattgttcttctcccccaacagactgtaagagacaacagccggtgtcagggcggtgaggtggggaagcagaaaacacgtctgcttgttcacgaacgttcttccaatgtccagcaaaaatttggtccttaataaatccgcttatcattcaacaagccaacagatggaacaatgtttgcttgcgctactgcagatgctaattcaaactttgggaccaggcaaggcatttggctcttcattttatgaagatcagagagagggagcgcagtacccagttgactgaccgagagagagctctgtggtgggggaaggctgctgtgttgggcccttgtggggagtgtgctttccatctgattgcctttccgcatctgcacaactaacttcccccatgggtcacgagtttttccaagactgacaggaacctaccctgaaaagtaaaggaagttccctgcgtgtttcttagtgacaccttcaaaatattttcaacattcctcagtttaaaggtcccaggactgaaattttagatggtgtcgaattcccccgtggagatgctgctgggccgggccagacagctacctctctcacacccgcttaattaagttgggatacgaaaaagagcagtggtgtttgggtcaggcaggcagtagtgcaatgtctccaagtagctgagtcaagttcagcggaatccagctccctggggaggctggagggtagctgggtagactgggtgagtgtggtggattggagtcttgatcagcaaacactccggcccttcttccacccctccggcccttctccctccccactgctgctgaggactgggtgtacttccggcctcactgactttgagcttggccatgtgacctgtgttggccaatggaatgtgagcagacagggtgtgcgcagaggcgttaaatgcgcttgcaaggttcttctctcttgtgctcctttcattcctgaagacaggagtatacaccaggtcaccactgttccttcagcctcgttctctggatatacagtttggatacatttagtttgagatggctactatagatctaagcagagatccatgtgatttggagttcagggggtctgggctggaaatacacattggaatcatctgcaaatatgtgacatttaaagccttgagacagatgagctcaccaaggtgtgagtgtggatggaaaaagagtccagtcgagtcttggtttccttcaatatttagaggtcagagagatgagaaggaatcagcaagaaaacagacacggaaaagccagaaaggcaggcagacagccaggccaaccatgggccgtgggagccccatggacagagggctcagagttggagagagctatcaaatgtgtccgacactgctgatgggcccgtgagatgaagatgaagccctgacctgtgagtttagtgacagggaagtcgtaggtatccttgatgagaatatattttgtggagtcataggggcaaaaacatcaaccaagggattcgggagagaataagaggagagatatttgcaagttagacaattcttactaaagcttggttcagaaatgaaggagagaaatgggactctagcccaagggggtggtggcatccagagagattttttatgggataaaaaatagtaagtttgaacgctgacaggaaggatcaaagagagagaagaaattgatgatgcaatagggatgggagagtgttaacagccagttcacccattgtaccaagaataaggtcagggatacagcttgcatgcaggtaggtgagcagatagagtgagggaagcttgtggacattctctttcagttacattgattttctcaatgaaacgggaacccaggtcgtcagtaagagtaagcaagtggcaggtgaagaagaaagtatgacagagtcatctaggagagttggagaatgaatggagcaaggcgtgcagcttagatgctggctagcagtgactgttctgagcactttgtactggcttttctactaaagcctcacaacagcctatgaagtaagccctattatttgccccatctacagataagaattgaagcacaaagtggtcaagaaacttgtccatagtcccacagcaggaaagccaggatttgactaccagtgatctgtttccagggcccaaatgcttaagcactaggttaggctgacccagttaaacatgaaagcttgtcacagaactgaactaaatagaatagaataaaggttgaattaatgtgtgtggtgcaaccactctgtgtcaagctctgcactagattcctctgcaaaaaccctttgagttgtggttattatcaaccccattttactgatgaggacattaaggtctggaaagattcagttgcttgttcaaaagttgaagagctagcaaatggaagcccacaccatgtatacagcccacacaccctgattctaaagcccacaccctgtgtacaatgccaaagaacccttaggatatgtgagtgggtcgacctagcttaagttgcttcattaagccaaatacatcaaaaccctccctacatcaggctgagatcacttgcaaactttatcctgagcacctggagagcttgcgacatggtccttacagcaggaagaatttaaaagaagataactttgggggaatgcttgttgtttttctgaccatttttggatgcttgatccgttaggtgaggaagaggagagcttagagttgaagtagatgatgggagtttcgacattttcttctaattaaaactgtaatcttttataacagaagcaaccattctggtttttcaagcatttccaaaaaccattttctcaagaaagagtgctcataatgtatcatcttcactgaacagccacccacttcctcaaatgcaaggaagcagacagttaaaaaagaaacacacacacacacacacaaaaccaagaggcagcagttgtttatcacgacctcaactcagtaaggcctgagattctttcgaaaaggagctttgcttcccatgacgcagagggaagtgtcaactgggatatttctggtaaaactgaaagcaagaaaagcagggtgctagcccctgtgggactgagggtggaggctgggggagtttgggtgccatcctccagtgacagatggatggacctttcatctaagagaaaggaggagacacgttggcaaatcagcctcaagcctaagattgcttgtgaagcaatcataaggaggaacaaaaacagacacaaaaacagagggaaagagtgaaaagacaagaagggcgcaaactgtgacagactcaccgcttcactaactactcacttaaactggaagcaaaatgtccctaaaattgccaaggaactgggatttcaacctgaaagtggaggctgcgaaaataggtatggttggtgtcttttcgttgcctctgtgattcttacatatactcgagcaccatttgcatgttggtctgcagggagcatagtctacttaaaaatggatctcgcagcaaatctgagtttgagggaccatttgcatttaagttggcatgccaggtccaagttctaaaatgctgggagggggttctctttcatttggacaaaacagtgggatggcactccttggtgtgcaggatctggggtacttcggatgatttaaggctacagactacacacaaaactgtgagtttttagcatattccatttccttcctgtttggaaactcatccatattttgaatggttctgaacaggagcacaaagactagagtcttttgaagtgctcaatctgtaagtaaattcaatgggtgttctgttttgtgagcccaggagtcaaggtgtattaaaaggtagtagcaaaaggtagacaacaaaaacaagacaggaacataaaaacgtactaaagtataataaagaccttacttaataaaaatataattaaaggaacagaatgggagggaattcttagatgagttggaaaagagatgtattttttattattttaagggagactggcatattttctgagatagtctggcctttaatccataccctgtccttctaatgatgatagtgatacattaagtttaatctatatattcgttatgaagttctttacatagatttcttctattgctaaattggtcacagtaattcacatcagagcaatcgggctgaaaactattgcctacatttatgtatctcacccatacatgagataacttccttgatattagatatagataagtattaaggtgtttctaacagcttggaggaattttgcttggaaaaaggtttagatttgaacctctaatggggttaagtgtgctactaaaataagtgctccattgaaaagtcacaagcggagcattaatgatgtaggtctgagaaagggtttgaaagaaaacagagtaatcagagaagccatttatcttgataactaggggagattagcgttccctaatcaagctgtgaatgattgtatgctgaggtcagttcagagaaaaggtaatgttcatacctcttacaaaagcaagagattttcctcctaactatcattgatacaaatgtacttggctaatgctcaatctatgtcatacaaattatatggttctgttcctttgaaagtgtcctgcttctacataaataaggtcattctgccttctctccacctatgtttgaacacaggttattagggtcttactctcctttggtttaaaaaacaagaaagttgagacaattaatagttaaatgatttttttcacagatataggaaattaccacactagagctcaagactgcatatactcaggtctgggatttgattgagtgaatttcatgatttttaccaatgtttcttaaagcatggtcccatagataacctatatcagactcacatcaagtgctggctaaaaatgcagatttctgggcaccatccttacaaaatcagaatctctggaggaaggcccaggatcctgcattttgacaagcaccccccactttcatcctcacctgaggaagaattcctgctgtaggtactgtggtctatgttcactagccccagcagacagttttcacccatttagtatagggcacagtgcttgttcttaactgggcacacaataaatatttgttggctgaatgaatgcttcagccaacaaaaacaagcagatgatgttatttagtattacttaatgaaaaaataataataaggacataatgaaatacagaggagcccttgtcattatccatgctatctataagtttgtcaccctgaaggactggactacagtaggatgcatttataagtgtcacatgaactagaattcagatcataatctgagtcctctgatgggggagagcccttgactcagtcacaggacttccagtcccctctccagcatcctgtgtccaggtgtaactgtaggaactggcttaccaatatatcaaagaaacttacctctattgggaagacctgtggaactgggagttatgtcaggaaagctgacaatctgtggttttaacgttttctcaacctagataccattgacatttggggttggatagttttttgttgtggggcctgtcctgtgaattataggatgtttagcagaatccttggcctctaccttctaggtgatggtaacacccccctaccactaccagttgtgacaaataaaactgtctttacatatagccaagtgttccttggggatgggggtgagggtaatatcttctctaattgagaactcctggagtagatgatcaccaaaagggtggaatataaggtcatttgggactagaacccaaatattaactcatgattcactctgtagctcaattttttggaggcttttattgagatctgtcctcagggagccaggccatagcttaggaaggacactagaatgggcccttggtgaaatagcaagacactgacccagaatgtgacccaggaaaggggccctagctttttttgatgagctatgcttccagtttccccagaatcttgtgagctggagtgaaagtgaaagtctctgagagcgaggggagggactctccactgtacttccatctcagagctgaagagggtcttgctggatggcagactcacctgagtccactaccatgagtctgacagattttcatgcagtgatgaagaaaagtcacagaacttcctgaatctgacctattgatcctggcaggaataggggttggaagaaaaaggaaaatgcagaacaaacagtcttgacttgaggtggagccaagagcacacacttcttcctgtgatcctttatcattttcaattttagaatcatgacagcctttcactgccttcacgcagttactcaaatattttgcctttttaactgaattgtcatcactggaggacaggtccagactttctggacctccagccccaggttacagggctttcttgaaagagttacatggcttcccaatgaccaggccagtctacttgagcacattttgtaccttatttgaacactgaaatgctggttccccagtttcaggagaatcctgaaactatatagcccatggtgaactgatttgtgtttgtttgatgttcagctttctgaacatcagaaagtggtgagtgctttctttacaattcattaccaaacttactatatgctaaccagaccagcctgggttatggactgaatgtggtctgtttgctgtgcccaaagtatttgctttccatgagtagcctccggtccctgatagataaaggtccccgatagataaaggtccccacacatgcaagtagagtcactgctaaaaatacaaaaaattagctgggcatggtggcgggcacctgtaatcccagctacttgggaggctgaggcaggataattgcttgaatccgggaggcggaggttgtagtgagccacgatcatgccactgcactccagcttgggcgacagagcaagactctgtctcaagaaaaaaaaaaaaaaaagaatatgaacatggccttctgtagacagtgaacagctacacaagggagctgttccttccagggcccactctatttttatgcagaggttacattgccattggttatttaagtaaaaatgtctgtccgtaatgttgctgttgacttaacatttaggcataaattaaattctctccacgaagtgcatgcttcctgttgcccaggccaacagccttctggccatttgaggaaaaaggactgatgtcacctctgggccttctgcagcagcagcagagtggggaccaacctaagtggtgatgggaaaacaggacctggttttatatccactcatgcacaaaattccccctgtacatgccagatgaggtcagcttagattctgtactttgtctgagactgtgcacttggattggcagaggctagcttgatggttcttattgcctatgtgtctgaaactaggccagggttaagatgcccaatggccctggcgtgggtatacatcactataagtcacttcattaatggtagtgctgccatctccctgtctctcacctcacagttatgaagcatcttcatgtagcatccaatgggagaactctgtggagactccaccagctggaatgtgatccttttgagtaaggcccactatgggggtgttggaaagatgctgggaccaattgagagaagtaagttgatgaaaatggtcctatcacacacaaggcagcttgaggaaagaatctggcatgaaggtgcaccccagtcgagtggtctgaacttgtgttaagatacaagacatgggagggagtgaagagcagaagcaaagtcccactggtggccacagcaattgagaccaaatagtaccggaagagcatgacggagagccacagcgaggcacaggcagattgtggggattctgtcacagaggatggcatggaaattttgtagagtccccagacaggaactgagatacaaaagttacaaagagagaaaataattgacattttttgtgttatgctttactcatcatcctttttctctttgaaagcttgtttaaaaaccaaaagtcactttgcaaagaaaaaaaaaatgatacccataggtctggcagacctagaatataactttgtcttctttgagggactgcagtgcttcctcatttctagtaagacaggagtgcaacttactgtgttctctttgtcttggctgccaggaagctgagctaaatatgaaatatgaagacagtcctgtagggcatacagttcagtgggggcagagacaaagaaacaactgcaaagcggtgagacaggtgctgtgatgatgagaacagctatgggagtcccagatggtgcctaagaggaattctggccccaccacccctgttcccatcactgccattcaccttctttaagatctaggtgcagatgttcttgagggggccccagactcgctgtctttctcacagtgattttcctgcacattgtatctacttttttggagaaacagaaggctttatactatgtatagaccctctgcatgaaggaattaaatggaaagtctttatgatctggcccttcttacctgcccacctctctcttgccaccttcccttctcctgctgcacactggagacttcagccacatcctcccttctgtagcttccagctctttctcatctgcctggagccctctctccatctgggtctcccttaccaccaccagttcctacccatgctttggtcacaatgtaaacatcttgtccacggggagtctctaggtcttctgatcactggagagagagtataaaaatcctttcccaggccatttaaacagagaagtttacagctctcaatactatggacttccttttagataagagccatgaacatttctgaacatgcatatatgagtcaaccccacaagtaactgatcctttggcttttgaacaaaatgagttgttcttaatacggtatgtaacaccagcactctaggccctcactggggagaataacctcagattgcccaaagaaaggggctaaattgtccattgactcttcttgataaaaattgtgaaagaaaggaggacgtgtgatataggaaagtgtgcatgagcttgggactctgctttaagcagtagtgaatctggggcaagttgcttagcttctacaaatgagagagtaacacatatgctgagaggaagaaaatatttcatgcgtatgacatatattaggtgctcagcaaacatctctttcctttctttataggcagtctcatttccaacctcagatcagactagaagctgtacttggattacattatcttgctaccctcgcagaatagggctcactgagttgtcttttaatgttatatcttcagtttatagcttccctgcaagtaatgatttcatgaaatctgctcctaattgtactggaaaaatgagaatgaagaatggagaacgccagcaacttctatgtataactctatgtgagaaagttgcttgggaattcagtgctcagaaaataactttgtcttctttgagggactgcagtgcttcctcctttctagtaagacaggagtgcaacttactgtgttctcctctttgtcttggctgccaggaagcagagctaaatttgaagctgagtcacaacttctaacgcccatttgattagcatacttttagtctttgtctttgatcagagtttatgtgttcattgcaaataatttccatactttaaaaaatgttattatttaaaaatatagatgggggagtctcactatgttgcccaggctggtctcgaactcctgggcccaagcagtcctcctgcctcagtctcccaaagtgctgggattatatgcatgagccaccacactcagcttcagatttcctactttttagtagtgactgagcattgcaatttatctaagaaaggttcaaggaatattaaaatgttgaaagttatttcttttagttcataaagtaaaacgcaattccatgaccactcatattctttacctagagttacataaaattatgcaatcttcagtacattcagaccagtcatttcatttcatgcactcattgagtcactcatcataaaacatgtatttgctcacttgtatgtgagaggtacttaagcagcattgccctgctgtgcctctcatgctgcaagcacccctcaccacccctccacctttctaaaagtgatgctcaactttgctactaccatctattctccttaagctgtgactgactaaggtgacagctgccgcactgtctcctttccacgccgtactatccatccacccccaaaatatgcacacatggatctcagctctggatggggctgcgataccccactgctggaattttggcctatggtggctgaaccatttgcttccttgttggtttggagtttcaaagtgaaagaggaagcagtaagatatagagttcctgagtgtgatgtgaatactttttaatattttaaaataattttataaagttgacaaaaagaattttctgacaaagtgtaaactaaccataatggaatgagccagctatcatacagtggttaaaaagctggctttggggccagaatgcctgaatttgaatcccagtatcatcgatcggtcactgtgtgacgttggacctcaggttttccaactgtaaaatgagtgcaatcctagtgctaactcatgcagttattgtgagggtaagagaagatgatctatgtcaaactttagcataagagctggtgtctagtaagtgcttcataaacactagtaattatcattattgttatggacattagctataatggagatctgatatcagctcctttgaatcaagtcattggtgaaaaccacagccagcagtgccaaggttttgtttgtcttgattaggtttagttcttcattcttttctttagacatatggtctttacagcatctgcagatatctcctttcctgcccagtgtctgctcctggctcacagcacacatgctgatctgcagttgactggttatgttctgcttcttactctttatgcttccaaatgccatgtactcacttccttctcaatttgcatgaattgtgtcaattttgtctgcatggctattcttgttttcttcctttttgctttgttttgtttgtctatttttgccagttattttccaaataagtaaaatgcctgagttgtgactttctaataaggataatgatcgcttctggtaagtttcctgcagaattcctgctgtagaaatgtcattgtctctgtgctatgacaggagcagttcctcaaactttccttgctttgggtaggcaaagagtgactctgggttgtttgctgtgtggaagaccctcctccatgacttagtgcttcctcctccagagctgcccaccatctcctactgtcatgcgtacctctggccactgaagtgaggttggaagttgttagtgtgggcttcaggggctcagtgtttaactgcttgtgatcacttacacaagtgggttacagcattgctgtgggttacagcaatggcagagcagtttttcctattagctctaagagtcctgtacctggcctaccattctctttcagatcattatttgtagatataattgtgggggaagagcaggaccttcaaaatgaggctcccgcctttcttgtcctcaattctgctgttgctacccaaagattcttgtgcatgcattcttcctctttgactgtcattctgcatttgattccatgcacctggtcattcagaagccagaaatccactttattagtgagtgaggaatctccttatgcagacatctcagagtaaaaatgatagcagatgtagagttgtcacctccagtccattctcagcccagcccttgtgctctgtcctgagaccaatctgtttgatcttgattttggcactgatcttcttcctgtgagcgttcctcattctctttcccaggtagagtgacagctggcctgatttgtctgggactcagggggctcgtgggacatggaactcagtgtgaaaaccaggaaagtaaccctagaatcaggtcgctaggcccagggaaacaaagctgtaattgtgttaggtgctttgtatgtttcttgaattgaatttcctgagaagccacacaatttatggcaaaaattgatttaggagaaaatatctttaaacctggagtcattattctttctttttagtactcatggttagaaatccttccaaattcatttttcagcctccttgaaactgtcatgctagcttcctccatctgtttttatgaaatcttttagtcttgctcacattttctccagaaagatcgggagccacatctgtcagtgtattgcaaggtacttctttctaaaatcacacaaaaattcctacccttgtgggtcctatatctggcccgtaagtttgctattctgctttctggatatatatatattttttccaactctatctctccctccccattaccagggccaccacccagcttgtcctgggaaggcttcctgaattacccaggtacaattagtccctctcccttctgcgagattgtaccgttttgctcatttttcttctattctgattgacacatatttattggacacctactatgtgctggacactttactaggctcagaattaagaagatgaaaaagattaagattctgacagtctcattagagacactctgaggaagcagggctctcccactaaagggaattagacataggcagtgtgactgtgactgtgacatttaaaaagctgacacagggtttgttctgtaacaaaagcttttcttgccccacttgagccatagcccctagatatctacaaggggcaagtttttacatgttcattcaagtctatatgctccttccaaaaagccacaaatcaagcttctaatgccacattgttattctgatttaagccagtaaagagtgcccgcggacaatgcagttgcatttccaccaataaatgtggtctattttcattatttctccccagaaaaccctggatttaaccagttttctggccagcacaaaattatcccaatctcattcttctgtggcctgaaatgcccagcatggtaatgaaagtgattgataatgtagtcaaccttgtgtcttcacagataaaaaataagattccagataaaaatcacttcctgaaagaaaaacaaaaaaggacacttgacttaactacgaagacatacctgaatgtagtaggcagtctttgagaatgaggcccctaaaggcagatgagcctgggtttgatttccagctcaaccttttctcacttctttgactttgggcaagtcactttaatgtctctgtgtctcagttttctcatctgaaaaatggggccggtagttccacctcctttgcagagctgttaggtaatacttcctccaaccagctcagccactcatagtcataaataaaccatgtcacctcctacaattgtaccacctctgaaatctcactttcagacttcccactctgtgcccaccacatcctatgtgcccagctcacccactccagcaattctctgacattacctcagtgagccaccattccattggtcccaccattttttcactatcagtcaccccattaggtcctccttaccatagattcataactagcattaaatctactactgaatatgcacccttaaattctctggccatttttcctcatcataacccctaaccctatttaaacctaataatccaccttcttagtgcctgtaactggacagctgaacatcactggagaagatcacccctgagctgcctggattcactttgagtttgtgaccagtcatttgaggtgggcactcaacagagccagacaaacttactacgtctactgtcttaagagtccactagtgctgctgtaactaaatagctgagactggataatttatacagaacagacatttatttattacagttctggaggctggcaagtccaagatcaaggtgctttcaagatccatgtctggtgaaggctcattctttgtagatgatgctgacttggtggtctcacacggcagaaagggatgggagggcaaaagggaggagtgccgtgacctcacattatggaagagcagaagagggtgaacccactccttcaagcccttttacgaggatcttaataccatccatcagagcagagctgtcatgacctaatcacctcccaagggccatacctcttaatactgttgcattggagatgaagtttcaacatgaattttggaggggacaccatcatttaaactatagcacatagctagtaaattcactttcattttccccaaagcttttatgcctactttttaattttctcctcaaggtcttaacacttccttctgccgtcactctcactgataacattcatagagaaaaatatgtacaactaagtgagaattactcaattttcctaccaccaaaagttttcgtctacccacatctttatctccattgctgcccataggcctggacaacaggggcctccattggaaacatgtattttagagggtcctgctcttttcttgctccatctgtactccttcctcctcacagggcaaggagtctggtcaagcggacatgcccacctagaccctgtgccctgcctgccttctagaccatctgagattgtgaaattccctacgcagatggccaggagctgcaagaatgttttctaggtcctcccagtggtttttctgcagacggttgattgcagagaggcccagaacaaagttcggatgtctgggctggggtgtccacattcatgtgtgtaaggcccctgactgtgaaaaatggaaatggagatggagggagaaggggcatgggcatgggtttaaagacagggaccacccccccccccatccccacagggccgggcgcggtggctcacgcttgtaatcccagtactttgggaggccgaggcaggaggatcacctgaggttgggcgttcgagaccagactgaccaacatggagaaaccccatctctactaaaaatacaaaaaattagctgggtgtagtgacgcacgcctgtaatcccacctactcgggaggctgaggcaggagaatcgcttgaacccgggaggcagaggttgtggtgagccgagattgggccactgtactccagcccaggcaacaagagcgaaactccatctcaaaaaaaaaaaaaaaaaaagacaggtgtccccatgtatcttcttgacacaggctttcaaatataagtgatagactgattccttctcactcatcagtcagcccaattaagcatctgtcctcgtcttactcaactgtcctgcagcatttgacacaatcaggcattttctccttgaaaaaaaattttttagacttccttgacactgtgccccctggctttcccttacctcattagttactcttcctgagtctgctttcatgaagtctccttctctaccagatctcttaacaatgaagtgtcccaagcaggactggccacatcattcgtggagcctagtacaaaatgaaaatgtggggtcccttgatcaaaaattattaagaatttcaacatagtgacagcaaagcattacaccaagtgcagggaccatctaagcatggagtgctgtatgactgtacaggttttctgtgaagctggctccggtcccagggctcagtcccccgtcctcttccgtttatccaaccttaaaacctttaaagccctttccatggctttaagtcctaccttaactttcatacattagctccaacgtctcttctgggttctggatggccccacatctccacctgaatatctcacgggcttccctcccccagtgtgtccaacacagaattctgaatcatccctcttcccacccctccacacccagttcacctgccctttgcaaaaggctctactattcaccgagttgctcaggctaaaaacctagagtcatcttcattcatgttttccccttccactccagatctaatccaccagaaaagacttttggattcaccaccaatttatgtccttaatctgactatttccgttatctccaatgctgtaaacactgccatttcttgcctagtctaggaaatagttagctgacttggcttcctgcctccactcttgtcctggaccatgtattttctgcacagtggccagactcgacatcttttaaaagtggaaatcaaatgtgtcagttcctcattaaaattttcagtatacttaggattaaattcaaactcatgatctatgcccgtgggatcaggccccttcccctctctctccacccacctgtagtcctctgctcctcccacactgtgtcccagccacaccctccttctattaacagttttctgaacatccagtgctcatagccaccatctcaaggcctgtctgctgttctccctgaaatgtgcttcccagatcttaccatggcctttcctccactccatccagttttagttcaaatattatctcttcaaagaggtctttcctgaccctagcatataattagctgtaattagcccctgcaaatccaatctctctttatcccattatcttacattttttctttatactgttatttgtgcctgaaacgatctcattcctttgcatgtttgcactagatcataagcttctgaaggcagggctttgcctgtttcatgcacttttagatagtcactgccaagaacagtttctgtcacattacaggtatcaaagagatttttgtggaatagcctgtggcctgttaacttttctgcagcccagtgaaattaagtaagttaaaatgagtccaaagcatttttttttcctgtccttattagtgattgaacaacagtttggtccagagagagatatttctgactttcttatggagagggaagtggggattttggtttctgaagctaatttggaacagcatgtgggtgactgagcatttagctatccctgagggcggtcaggtcttaagtcattaaggcttagactactgaacagagctacaaggggtatgtcttgctcctataatcaaagtcttcttgatgattgaaactcaagtgtgggcagagaaatccttcagactcaggggccctgggaaaagtagctctgctcaggaatccaaacatgagaattaaacctcagttttgtagtatgggcagttaggtttagtgggtaactgtgattagaggcgaggatgggcaagggagaggaagaaagaaagacagagaagcttagagagagagggagagagataccagcatacaggggtgagggagaggcagatggaaggaagaaggaggaagaacaagtggaggatggatgtgggtggaagagaggaccaattacattgggccctatgcttagaagggttccacactgaatttgatattttgttgtgaccatcctaaaattcttaatgatttttgaacaaggggctctacattttcattttgcactgggctctgcaaattatgtaactgactgacattctgccaccttgtatcacaggaactaggtcatctttgagccatcccttggcctcatgacctcctccttccccaactgactgcaccgtcagtcctgtccacctcctacctagatctcacattcatccacttctcttacctccctttcaagcctagattccactgtaagcctcttaaccatttcccgtcttgcagttttcatggcctttaatttattctctgtgagcaccccagtgcttgcgagtgtcgatagctttgtcgatcagagcagtcaccctgaggctaaagggaatcatgcaaaggcagcctcagtgcttgagctgaacattctcaactcctgcactaagttagtggttaccaaacgtggctgtcctggggaggtttaaaaaaattcacctgctcaggttccactccagagacatggatttaagtaacaagggctgtggtctaggtattcgaacttttctaagctcccaagtgactggatatgcagcaaagtttgtgatctgtgccataagtgttgctaagacccagagccacagcacaatggcaacacattcccaaaatgtttgcaattttgttactttatcatagtggttttgagttttgcaaaattttcttctctaaaaatatacattaaaacattatttaatattccagagtacagctttgagtaacctggcccttttttaaattttattttttaaagagacagggtcttgctctgtcacccagtctggagtacagctgtgtgatcacagctcactgcagcctcaacatcctgggctcaaacaatcctcccaccccagcctcccaagtagctgggaccacaggcgtgcaccgccatgcccggctgattttttttttttttctttttgtagagatgaggtcttgctctattgcccagctggtcttggactcctggccccaagtgattctcccaccttggcctccccaagtggtgggatgacagacatgagccactgcgcccagccccatgaagccactttttttttttttttgagatagagttttattcttgtcacccaggctggagtgcaatgacatgatcttggctcactgcaacctctgcctccctagttcaagcgattctcctgcttcagcctcccaagtagctgggactacaggcacctgtcaccatgctcggcgtatttgtatttttagtagagactggattttgctatgtcggccaggctgctctcaaactcctgacctcaggtgatcctcccgcctcggcctcccaaagtgctgggattgcaggcacgagccaccgcaccgggccgagcactttttaatttttggaaaatgtgtacctccactgtgagaggcgtctgtgtgtgtgtgttgtggtttgagtgccctgaattagttaaaggcattccttcttctctgaggttccctgcagaccggactgtctgtgattctgcagatgtcagggctgcacagaagagggtggaggccgggccggccccagatcctgctcacacagggaattagtgtcagaagtgacgtgttaaggggttactgaaaccaaaggtgaaagctttttgcttataatgtgagtagtgaggaggaggcactaataatagttattaatgccacttgtcaacagacccctggaaaataggacaatacatcctttctctcccagcaagtccagctgacatttatttcacccgctttaagcacgaattacctgtggagtatcctagaaggacttgtttttggaataacattgcagactccaaaaattgtctaccgtttctgactctttcaatgtctttcacttgtacacagtgtctcattccatcctaagaggggttaaaggatgctcatcctcacgctgagcccagggagggtgcaggacttgctcactcacccagccaatggggggtgctggcctaatcccaggcagtattctgactcccaacccaaacctattgttggtccactagagactttggatagaaaccagaggagaataggaagggccaggaaaaactcaggcatgtaaaacaaggaaccaattttaagggtggaaagctaaggtggagatacatagcatgtataaatacaactaaagagccacgggcatttggcacattttagaggacagttaagactcttactatcctccagttagcagtagatttcctcctattcgcacacctgccattgccattttccctttctgttccaaacgacttcagaatggcttacaattacacccagctaacatctgtatcaggtttatattcagtgtctttccctttgtgtccatggattagcttcagtaagcccaaaaccctctagaaattgtgtgaaaaattatatgcatataggcagattctcaaaggggcctgtaatctcacaaaggttaaaaccattgctttatgtttccaagtacagaaaatctcctcattaagtaatcctgtaataattagtcttcctggtctggaccaatccaagagcgacagctaaccgggaaaatcctagaatggcctgctgaaggctggtcctggccagccacaggcctgcttcctgttcattgcgaggtgtaaactgacgctgggagtggccactagatggcggcaaactcagccaagtttggcatgggcttccgttggcgctaccaactggcaagctgtgcaggttcctggcatccatttcattagcttcaaaataacgcgaccacgaatagttgattgaattttagaccccacgtaaaattcttctggacctcacttattgtgttggggcagggatttactgttctttcaattcacttggtctttaaagcatagagggcaggcagcaaaattaccctccacgtcctgacatctctaagggaataaagcttgggactgctataaataaggaaaacttgttaaagttcatgaaatcagctatggaaattgtggaacataagtcatggttccatttgttttatagaagtgtaaaaaatgaaatctgttcttcaagatagaaaaaaaagagaaatattatgaatgccatttaaaggagacacctgccatttctgtttccaagttcccctggggcccacaaccttttatttgatagtaggtctccagaagagcggtggcattattgttatctcatagataaatgtaatgggcctccttagggctgttttcccaactccacctttctaagggctcctgacccagtctccaaggatggtcactggcttgaactttggcttgaacattcccccttggacatagccaactagagcagaatgaacagctgactcaagctgtgtctatttcatttctcctcagtctgaggttcacagagaatgggcatttgtaagtgagtcctggaaatcagagggcactaagaggaaggcctttgaactctgttgagaactcaaaacctgcaaaatgtgccttgatttctactcttcctgagccatgatttccaaccccccaaatttccctagattttgtgaaataatatactatgctttaaaaattacacacacataaatattatatacatagtatatatacacagagagagagagagaaagagagagagatatcagggattcccaatctcatcactattttgatccagataattctttattgttgggggccatcctatgcattgtagggtagtccctggactttacccagttgatgacagcatcaatcctcccagttatgacaaccaaaaatacctctagacatagccaaatgtccacttggggtggatgggggnnnnnnnnnnnnnnnnnnnncccccagttgagaactattagctatctatccttctatttatctgtatctagattaaaccaacttgatttggtacctgtttcttgcaaccaagatattaactgagacaatgggaaaataaagacgtagagaaattatctgaaatgctcatatagtaacacagcaagttgctgtatggcggaatcaagactagatcccagagctcctgaacattagtgggttttctgctactttccacaagagaactcctgtgcagggtctttaaccacaccaacttgcccagcatcttgctttcctttgtattaaaacccagtactacttgaattatggaaggaaacactcctggctacattttcttatttgtttgggtcatcaaaataaataatgtgggtggggatcatggtagggctttcttcacaggaagttgaagcagtgtgggtttgttgccaggcgtggcatcgcatggctttccttagcacctgtgaaaagaacaaagctaaatgaaggggtgctatctgtccactctgaaatgttactcccagatcactggggtagatttagcttgatgttgctcttgaatgtagtctttcccacgttctcatgttttttcaggttacttacctcaacaagtcgctgtagaatagtaaatatcacttaatttttttcattcagaacttcagaacttgcattatctgtggaaacatttgaaggtcaggaggaggtgagaatgtcagctctgtgtaacaaatgtgcaataaatgtgagcaaatgaaaacaatgtttttaaatggtcattcggtaagatgtattttttttttttttttgagatggagtctcgctctgtcacccaggctggagagcagtggcccaatctcggctcactgtaagctctgcctcccaggttcacgccattctcctgcctcagcctcccaagcagctgggactacaggcgcccgccaccatgcccagctaatttttttgtatttttagtagagacggggtttcaccatgttagcctggatggtctccatctcctgaccattttgaactgcaatcaggtgggttttgttaaatacatacagccacgtaacaaccaccacaatcaagagttccatcactgtaaaaaaattttctcctctcatctatttctagtcagcccctctcacccagcccaaaccttggacaaccactcatttgttatctgttcctatgcttttttcaaaatgtcatataaatgaaatgataatgtgtgttttttgaagcctggttgcttttattcagcacaatgcatttgagattcacccatgttatgacttgtatagatagttttgtcctttttattgttgagtggtattctattgtgtgaatgtatctattcatcacttgaaagatattgggattgtctctaacttttagacattacgaataaactgttgtaaatatttgcttataagtttgtgtgagcataacgttttatctcttttgggtaaatattgaggagtgctactgctggatcatatgataggtatatatttaactttataagaagctaccaaattgtttcccaaaggggctgtatcattttatgttcctactggccatgtatagaaattctggctgtttctaattctcactgatccttgatattgttagttttttaaaaatttatgttagttattctaatatatttgtagtagtatctcatcttgattttaatttacattttcctaatgactaaggctgtttggcctcatttcatttggtaaagtctcagatcaaaattttgctcattaaaaaattttcttgttttcttattgttgagttttgtcctttttcagatatgtgatctgcaaatattttctcctaacatgtggcttgcttttcactctcttagtgtttgcttttcattctcttagttttaattttgatgaagtcaaatatcatgtttttcttttatggattgtgcttttggtgtcaagagttgtttttgataacctcaatccagtatattctgtaaatattgaatacatttcataaatattacagactctttgagtcttttgttcaactcctgcttgcaatggtttgcaaacattttcttttattttttctctccagcactgcccacatgaacacacccacacacttaagcattataaacacagatttcctgtgttactctgaactctcaaccctccttttccaggcctcctcccaaagatcataaaagccacattttccaaaatatcttttatcactcagagaaaagtgctggaagattgtaatgaccagtgctatttttatggcagaacactccaaaataaaaaaatatatatcatactggattctctttttcaaaattatgcaagttaattcaaaatggcattctgaaaactcaccgcccgccaatccatcaatcccaggtatagcataatacatgctatgtattaactgaatttaatgttaaagtcaattaattagctacatttatctatttgtattttgaaacctcttcccatatattaaaaggaacagaaatttttgcatgctttttcttgagtctgagtacaacttctacctaccgctcttgcgtctgattttaagttggcttgtttcacagttgatacaataagaaaatgccaagaaagaggagtgggggtaatggttgagttaaaaagttgaaagaggaaaaatttgatttgttcttgagcacacggagcaaatccctttcttttgtttctacaattttacgttaagatatttactatttcttttctaaatgtatcctaaacaagcttattataaaacatgttattttatgtttgatgaatctctatttggtatatgcattaaatttaatgaaattatacccttaaaatatagctcatagaggattatgtgtacatggcagaatctatcccgccacctagacaacaattactctttccaagtctgtctgatgtatctattttgggaccctggtgtctaatcaaaattggcaacttccagaaggaggcttggacagtgagttgtacttaatttcagtgagtttcagctcttaacacaatagtggctgcacatcctctacccctagccctgtggcaggctttccagatgtgcatacattccagtagcagcttgtgctcaacgtgcaggggccgaatgggaaaaaatgaaccctgtcctacaaataacagggatctatgttgtgatcactgatgcctgcctctgatcacaaaggtacagacaaagaaatggcaaccatgtgtttgcaactctccctattgttgtaagcacctccccctctggctgaagtgacttccaggggatttaaagagcttgtgccttttcctgtgtctccttcatttttctccttttccctttttgggagccagacattgaagactaagacattcaaaagcaaccacatatatggggtaagttggaaagacattgaacttgcccaggggaaggtgcagcctcagaaaagacctaagaagactcttaagtgtgcagttcaggctgatccttggcaacctacaacaattacaataaacaaacaaaatccagcaaatccttgaggaagggagacaatctgatttccagagttaccatatcattagattcagatatccagtttttagcaaaaaattatgaggcataaaaagaaacaaaaacgtatggcccactcaaaggggaaaacaaagaccaacagaaacagtgcctgatgaagacctgatggcacatctactagacaaagacttttaaaaaaatcttaaagatgcttaaaaaactgaaggaaaatttggagaaagtcaagaaaatggtgtatgcattaaatgaaaatatcaaaaaagagatagaaaacataagaaagaaactaaaaagaaatgcgggagctgaaaagtacaataactgaaatgaaaattttaaaagagggattcaaaggcagatttgagcaggcagaagaaagaatcaacaaacttgtagataagacagtgaaaattatcaagtatgagaaatacaaagaaaaaaatataagaaaagtgatcagagcctaagagacatctgggttaccattaagtggaccagcttactcattgtgggagtcctaaaaggaaaagagagaagggtgcagagagaatatttgaagaaataatgatggaaaacttcccaaatttgatgaaagacatgaatataaacatccaagaagttcaatgacagctgatgaactgaaagagacccacatcgagatacactataatcaaactatccaaagtcaaagagaattttgaaaacagtgagggaaaactgatttgtctcatacaaggaattttcaataagattatgggcaaatttatcgtcagaaactttgaaggccagaagtagtggtctgatatatttaaagtgctatttttttcagctgtcaactagaaattttatacgcagaaaaaatattctccaaaagcaagggagaaattaagacattctcagataaacagaagctgaaggagttttttacttgtctttgcagtaaatgctaaagggagtccttcctgcaggttgatataaaaggacactaaacaataacttgatgccatatgaagaaaaaaagatctcagcaaaggtaaatacatctatgattataaaagtcagaattactataatgatggtatgtaactccacctttgttttctgcatgatttaaggggcaatcattttaaaaacaattattagtctggaagctagcattattgtcagtctggtttgtaatttcacattttgttttctacacaattgtggagacatgaaaaattattagtatataaagatgtaattctgagacatctgcaacttaaaggggtggggtgcagagctgttaaaggagcagagtatttgtatgttattaaagttaagttcatataaatttaaattagaatatcatcactttaggatagtaagtgtaatcccaattgtaaccaaaagaaagtagctaaataatatagacgtacacaaacacgaaggaagaaagttaaatctttcactacaaaaaaatcaactaacacaaaagaagatagtaatgcagggaatggaggacaaaaaagctgtaaggtatgtagaaaataaatagcaaattacagaagtaagttgctgcttgccagtaattacattaaatgtaaattagactaagctcaccattaaaaagacaaagattggcagaatggataagaaaacagcccacctatacgctgtctacaagagactcactttagacccaaagatacaaatagattgaaagtgaagatagagaaggatatttcatgtaaatagtaaccaaaagagaatgagtgactatactaatatcaaagaaaatgaactttaaatttaaaaaatgctacaagaaacaaagaaaaacattatacattaatagattgctcagtacaatgagaagatataacaataataaacatttacacatcaaataacagaccataaaaatatataaagcaagcattgataaaattgaagggagaaataggcagttctataataatgttggagacttcaatactccactccaataatgaatagaacaaccagacagaagataagtgaagaaatagaggacttgaacaacacaataaaccaactagatctaagagacatatacagaacactctatccaacaacaaaatacacattcttgtcaagtgcacatggatattttctaggatagaccatatattaggacacaatttaagtctcaatcgattttaaaaggtaggtatcgtacaaagtatcttctccagccacaatgggataaaattagaaattaataaaagaaggaatagtagaaaattctgaaaattgtggaaattaaacaatacactattaaacaaacaatagatcaaggaagaagtcacaaagatggttagaaaatacttagaggtgaatgaaaacaaaaacactacatgtcaaaactatggaaaacagagaaagcaggagtaagagggaaattgatggaagaaagatcccaaatcaacaactgaactttataatttaagaaactagaaaaagaaaggataaactgaacccagagctagcagaaggaaggaaataataaagatcagaacagagacaaatgaaatatagaatataaaaataagagagaaagttaacaaaaccaaaacttagctcttcaaaaaggtcgacaaaatttacaagccttttgatagatggataatgaaaaaaaaaagaagattcaaattactaaattcagaaatgaaagtgagggtattaccacctattctacagaaataaaaagaattataaaagtactataagcaattgtacaccaacaaatttgataacctagattcaatggaaaaattcttagaaacacaaaacctatcaagcctaaactaaaagaatagttttagtttagaaaagaataaaatctgaatatgcctctaaccaaggcaattcagtcaataatcaaaaatctcctaatgaattaaagacctgatgtcctcaccagtgtgttctaccaaacgtctaaagaagaactaataccagtcgctttgaaacttctcaaaagaattgaaaaacaagggaaacttcctaactcattctacattaccttgatattaaagccagacaccaacatatctaaagaagaactaataccagtctctttgaaaattttcaaaagaattgaaaaagaagggaaacttcccaactcattctacattaccttgatattaaagccagacaacattacaagaaaactgcagaccaatatcccttattacattgatgcaaaaatcctcaacaaaatgctacaacagaaaaatgacgcaactgcacaataaaagattataaatccagaccaaatgggatttattcttgaaatgcaagggtgattcaacgtagaagaatcagtcaatttcattaatacatctcattaacagaatgaaggggaaaaacatatgatcatctcaaatgatagtcatgtattcgacaagattcaacattctttcatgataaaaacactcaataaaccaggaatagaaggaatctacctcaatgtaataaaagtcatatgtaaataacccacagtgaacatcatactcaacgttgaaagactccaagcttttactctgagatcaagaacaaggcaaggatgtccacttttgcaacttcgatgcaatgtaatacttgaagccctagacagaggaactaggtgagggagagaaataaaaagcatccacattagaaaagaaaaagtacacttatctctatttagagataatataatcttatatgcagaaaatcctaaggattcgaccaaaaagctgttagaactaataaacccagcaaagtagcaggatacaaagtcaaagctcaaaaatcagttgcacttctatacactaacagtgatcaatctgaaaagaaaattaagagaatagtttcatttacaataccatcaaaaagaataaattaattaggaattaacttaaccaccagaaggtgaaatacttgcactacaaaactacaaaactgcaaaacatttctgaaagaaattaaagaagaacagaataatgggaagacatcccaggctccctaggttggaagacttaatactatccaaaccaacctacagatttaatgcaattcctatcaaaatcccaatgactttttgtagaaatagaaaaactcatcctaaagttcatatggaaactcaagggatcctgaatagcaaaaaaaaaaaaaaaaattttgaaaaagaacattgttggataactcacatttcctatttgaatcacataattcaaaaattatatgattagttacaaaatttagagtaaaccaaaacagtgtagtaatggcataaagacagaaacagatgaatggaatagaatagattgtctggaatagaatagatgtagaggtcacatacacatatatgacctcacatatatgtgtatggtcaaatgattttcaacaagggtgccacgataatttaatggggaaaagattgtcttttcaaaaatgatgctaggaaaactggatatccacatgcaaaataataaagttaggcccttacctaataccatatacaaaaattaactcaaaatggacctatgaactaaatttaagaccccaaactgtaaaactcttagaagaagacgtggggcaaaaacttcacaacactgaatttggcaatgatttcttggcttcaacatcaaaggcacaggtaacagaagaaaaaatagtcaaattagacttctgaaaatttaaaaaattacgtatcaaaagatactaccaacagagtaaaaaatcaacagaataggggaaaatatttgcaaatcatatatctaacaagggattaatatccagaatgtataaaaagctcctaaactctacaaaaaaaaaccccacaaacaactcagttcaaaaatgggcaaaggactcaaatagacatttctccaaagaagatatgcaaatggacaataaatgaaatgatgctatcaatattagtaatcattagggaaatgcaacacgaactacagcgagatagcaactcacacccattatgatggctgctattaaaaaactggaagataacaaatgttggtgaggatgtggagatattgaaacccttttgcactgtcggtggaaatgttaaatgttacagctactatggaaaacagtatagcagttccacaaaaaattaaaaatagaattactatctgatcccacaattccgcatctaaatatatactcaaagaattgaaaacagagtcttgaagagatatttgtacatcacgttcatagcagcatcatttgtaataactaaaacatggaggcaacccaggtgtccattgacaaatgaactgacaaacaaaatgtggtatatacattcaatagaatgtattcagccttaaaaaggaaggacattctgcaatatgctataacaccgatgaatcttgaggacattatgctaagtgaaataagctgcttcaaaaaagacaaatgctgtataattccacttatgtgaggtgcttcgaggagacaaattcatagagacagaaagtagaatggtggttaccagggctagggaaagaaggaaaaggaagttaactctgtaatgggcacagaatttcagtttttcaagatgaaaagagttctgaaaatggatggtgatggttgcgcaataatgtgaatgtacttaatactactgaactgtacaatcaaaaataagatagtaaattttatgtgtgttttactggaataaaaataattgggaaaaaataaatcacgcaagttataatttgagaaaaatagcccaagtcaaatattacaactcatttttcatcttcaaaagctctcgtatgctattagatgtgctaagccagagggatttggaattaggaccgcatcctggggtcctggtgttagcctgttgagtcaccccctcatggttctccttcttttacctcctgtttgtgcatctctggttcctgcttcttcagcctttgcacaaaagcttagttggtccttcagtgactactggctaaaaacaaacagaaaaagaaaaaagaaacaaaaatggtgttcttctagttcttccatgagaactgtgaaggagtggccagccaaaaagaaatgtcaagcagaggctagtgtgtgggccaagaaagtccaggtcagacagaaacactacagttgctcacagatacatacaaaataagtcctgacatttttgtgaggaccttgggtgataaaagggaaaccccctaacacatttttcaggcagctgataatgtttgacagctttgaagaggaaacagaactaccagatgtcagtggctgaatcacagggaaaatactgcattctgcaaagccttactcaagcatcatgaagtgtagcccaaagttgatagaaatgctgataaataataaaattttatgaaaaagtaaaatctcgatactttttcacaagtcactagctgtaaccaagacaatgatgttggcttttttgtatttgatcatctttcatgaattttagaatgctttctttatcaaactctaaaaaatctttaacaaaattgcaaagtgtcacagcagtgaaaattttcataaacttcacagctctcaattatatgacacagtagaagtatcagaagtattctgctgtgtcattttctgtttctttgaagattctctgctgtacttcatcatttttccatatacagttaaaacaccaagcaaatatttggcctgaatcctaaaaatgtttaattcttccaattttctgtagttgcattttcagcaatacagagcgttccttcaattcttccctccccttttttcggtttgagatacactttaacacctaagaatgtgatcttctgttctttataactaacatttaatataaactaatgttgaatttatcaaaagcaagttcataatctttgaaaacataagactttttaaattattgatgggctaaaccatttactagttttttaaatattgaagtattcttgcattcctggaatattccagacatttgagtgacaaaacagtcaaaaatctctaactctgcagagtttctggcatgtttcaccacataaaaagtgtagaaaattattctcattttttctgcagaaactgttctactcttcactgtttccatggtgggttttttgtgtgtatggcagttatatatattatttagtttctaatctttcttttaaaaactttactgaggtaaaatttatatgccataaaattccttcattgtaagtgtacaattcaatgatttttagtaaatttatagggttgtgtgatgattaccatagtccagttttaggacatttttattaccccaaaaagttctctccagccgttttgcaatcaatccctgctctcaccctcagtcctggcaaccactgtctctacagaattgccttttctggatatttcttatgcacagactcatataatttgttgtcttttgcattcaggttctttcacttagctgaatgtttttgaggttctttgtgtggcatgaatcagtcctttgctccttggtgttgccaagtagtattgcgctgtttggctttcccacattttgtttatccagtaacctgtttgtggcttctggattgttttcagttttgaccatcatctataatactgctagaaacattcacattcaaaaactgttatggatgtgtgccttcacatcccctgaatagattcccaggagtggaattgctgggtgctatggcaagcttatgtgtaactttttaagacgcatccagttaaggggttaagggagggtagctaccctctctgttgaaggaaagttcattttcttcttgtttttcttcttgtgtagctccaggttaggtggacaggcaccctctgttctcactggtatcgtgacctggttgaggagccagcaggacagagctgttactttttgtctggcctgactttgggcacccagggtaaactggaaataacatgccccagccagacctctgtgcgcacttggaaggagctctcaggtctccatctgttccctgcctccatgctgctgctgttcctctctaggtgttgttagtgcaggattttcttgggccctttccgctccctctggggcaggctgttccatatgcattgagttgtgagaccaacagctttcttcaggttagccttgcctatcctacatcttgcagaaatccgtcttccccccaaatggcatgcagatagaatccttctttacttttactttcattttagatctccccttgttattattgagctagtccctttgtcattttaatggaaatttggaaatggaagctcttgccatgaggtcacctagaattctaggtggtcattccttcctgagttccctcacagaccacccttgggctccctccggtttctgctgccctttctctctctctgccagtaagtgttggggtaaaagctgactttacaggaaatactatccatactggcagcctcagtaagtccctcagttcttcccattcatcagctgataaagtgacagtgcagggatatggaggcggatctgtctgggagggaatgtgtacgtaagtggtataacatctgtgtagtgtcattccgctgtgctctgaggagtaacaggtctgaaatgcagaccttggaaaatagacaagttgaagtttagagcaatagttgacatgtaaaaaaaaaaaaacccaacaagcctattgaatttatttttaagcctaataaaatatttaaaaagatcatttattatatcaacattccaaacacaacagagaaaatataatgaacccccatgtagacccactactgaagttcaacagaatatttcgtcacattgttttatctatccctttctttttcttttattcccttttatgctaagatattttaaaacaaatcccagacacattttccccatgcttaagtatgcatccttaaaaatatggaaattttattttctagccacattgtcctgatcacgcctaacaaaactaatcaataattcattggtatcatctatcctttatccatgatcaaattgtctcagtttttaatgaaatctttttatcaggttgtagaataggagaaacatattatgactcgtttcctgggcccaccccactgctagcattattcattggtcactttaactctcagtagtgttaaagtttaaaatcactgttccctaagacctgtagaggccccagaaactgactggagtgacgtctgttaggctgtaatggcttgtagcctcctcaagggccagtgcttgatggtagttgccagtacttgagcattgccctggaagggtccttcctgtgaattactcaggccatataattcatccatgcttatgcaatacaaatatttcaagcatcctaatgcacttatttatttatgaatgctagtgactagtgaaccaaaacctcttacctaaaataaatgactagctttggcaatggaggggtcagtacttcgattgctcttcctaatgtaacacaccactagggtgttgggcagagcttactgcactaattatcctgcagtcctacctgatgagaattgttcttccttacactaacgcctgggaaagcaggtagcttgcatatgcagttaaccagctacattgtcaaagaattttctacagagaaaatttgccctctgattgccaaatctccactttgccttgtgctgaggaagaggcagctctggggcagtgttcttccgcaagcttcttgttattacacgtggcttcctgttatgcagagacaggcggagagggctgggtaaggtgttgcaactgatggagacacacagacccacaagaggcaactgcactctaaattcctaagaaacacgaaagccacaaaacatgaacactggaggggtggccctggagaggcaccctaggtgaaacaaatttgctggcgtgcaaaaaaaccttgcaatatttgttgctggctcaggtttccagagctgctgataagaaagaagtaacagaaagccagtactcctctctctctccccttctctctctctctctctcttgttctcactctctgtcattctctctccctctctcttgttctcactctctgtcattctctctccctctctctttttctctctctcacacacacagataatttctctccctctgtctcatattgctaccaagacagcattttttacctcttcctgcagaacacatagttattggtgccaagcccctttccaaagcagattcttttcctttaggttgacatagtcacttgtcaaacaataaagggcatttctagaatccatagaacatgggaaaatgaaatctgcccaattccggagtattgaggcaggcatttagggaacaacttttagatatttctatgaattcggttatacaaatttgtctcaagggtgagtgccctgggaagacccgtgtggtttaatttcagggtacagagagaaggctcctttgctgtcatcagtctcacagtaaagatgccttttgaaggggcagtgcttttcatactaaagttaaaaacgaaactcaaaagaatgatgggtgcttttcaatgggggggtggcgtttgctttgaagacagaaaagggatacagaaagcgagcctgaagtttctgaagtcacatgtcctaatttccttctgggtggaaactgagggccgtcatcccgcagtctgataacaggataggtggggggtctgcatgtatgtatgtgtgaatgtggcaggggcgttgcgtgtgtgtatgtgtgcggggtgtggacagggacgtatgaatctgtttatcattttcaggtggtagcaatgccaggtctgctgtttcagagagctccccagtcggctccttcctcagctgtggtgtgggcctgactgccggcccacggtagcttagctcactctctctccctcccatgcctcggccacgtgggaccttgctcagaatccctaggtctctccacatgagcttgggtagcagctggtaagacgtggcaggattacctaatatgtccgttttcttgttggggtatcagcacagcctcagtggtgggcttgaggtttcagtaccatttctctgtcactgtgttttcgaggcctgctgagccttgcagagcatacactggcggaaatagcacaaaattgtttgtgcacaatctagaggcaaaatgggtggggctgaggcagctgcttcacatgataggttaggagtagtggctttgttcccagctcagtgaagggtggcatggtctctcctgtccacttcactctggattctttaaccctgtgaattactagacatggattccatctccaatgtggatgcctctcttcaccacaagaatacatgctcctttctgggctgtggcttaggtatggatattgggctttgaaatcagatttctagttgttaactggagcagatcatttcacctctgtgagctttggttcctggtctgaaaaatgagggtgacagtatggtacttacataaagagcatgagcattaaatgacacagctctataaagtgcttgcactgtggctggctcgtggtaagtactcaatacataagtaacttgatattcattattgttagatcagggattatatcttccatcgtccactctgctcaagtggatgcagtgaacatatccagaaatcccgccaataggtaaattggccaatatttctcgcaaatacaaaatgcctgcatggtggctcacatttcgttctaaaacatttattttattaactcagcaaatatttatcaagatgcttcaattgccagatgcttttctaggaagtgtggagctttactaaaaatcccaaggaaaacagcacccttttctgtcttgcatctcagtttatccccacagcctcaagttagaaatgcttccctctgtgctggtttcctctatgccatcttttctttggttcctgaacgtctatgcaaataacttttctggtctgagattttcacgtcactcaaatcttctggctttcacttgcacctcttttctccccctagtctctttcttaattcataagccttacttatcaaaagcaaaactctcgggaagcttgaagctctcagtccaccctcacactttatcatgtccagaactggactcacctgcctgttcaaactggccttgttctctgatttcctttcttgcttccatgaatgggtctcccagatccatcagggctgtgtctggctgatctcatatcctcaggacccaaaattgttctggtgcatgtcaagtcctcaatcttgaatgaatgaatgaatgaatggggaaggctaccttaccagagccactcaaaccccagacctcacaaaaatctttgtctcctgctcctccttgttcagcagggggctgagtcctctcagtgttagcctctcatattgtttcctcttccatcctaatccaggcttctggctttgcacctggaatattgtgcaatgtccagccaatctccctctataccatctctctccctcttttcatccctcccctctgtaatattctctttcttttctctcatttagaataaaattgagtccatactataataataatgttaataataatagctttcatttaatttctatgttttaagaagcaggcactggctgggacctgtccacttacccttactaatccctatggatttatcaccccataagatgcatgttattatcacagctttacagaggaggaaactggccctcagagatagaatacggcttacccaaggctgcgtatgtagaagcctgtgcacttctgctactttctccttccttctctctgttaggcactgtgttaggtgcacgatacaaggatgagcaaggccaaacatcaagggagtacccctgtcttcttagagtgcaagtggagagggaagacaggaaaagaaaaaagtaccaagcaaggcgacaaaggctacgatacacatgtgtctccactgacaagggtccagagccagggagcaactaagtctggcagggccaggaaggcttctcacaggaagtggggcctgaagggattcttgaaggataagtaagagttttccaagaggtcaaattggatgtaggtgggggtgggtagggaggacattccagcagagagaatagcatactgtcctggataaagagcaggatgggcatggagaaagagcaggaaatgcagcagaaaaagccgcaaaggactccaactccatggcagtttagacttcatcgtttaggagggagatgctgggggtcatcagaggcttttaggcaggaaggtaacatgatcagaattctgtttgcgaaggctcacgtcataagcaatgctgtcagtgctgaatataaggaacaggcagccttctgtgttgattggttggctgggagaatgtcactcaagtacatcagagagaccagcggaggtaaagcaggtttgggcatgtgtgtcagtgttagccagaggaatggtagaggtgagaaggggaaaggtggtaagtttgatgaggtggtaagcatgatgagcttgacattctcatggaggtgtgttaggaagctggatggatgggtctacagctcagaaaagagggctgggggaagccatgcaaattctactcccttttcaaatccatttaaacatggttcccaaactaatgcacagctcatatcaacatactgggaaaatacctgaaattgtttccccagctctgaaagaactattcacacctcacccacacatttacagccatccaaagtggaatctagactgagtcagaattgagagcagattattttgagggttcagcggcagaagatgaagaaaggaagtgataacgtttctcagctgacttctctgttcgtacttccttctttaattttcctttgccccatcttggggcaaaaagcagctaacttctacagcagaaacaacatccctaggcatgtggcacttcttctatttctcttctttcctttccagtactctctcacacctgcagactaaaattcagcaccaacagtccagtcatacaactatattttatcatgggcctcccttgctcaggaatatgaaatagctccctactacctctctaatcaagttgaatgcctcactctgtcatctaaagcatcttcttctctgggccctccagcttgatttctctatttgataaaatgctgcctcacttttatggcccatttccaccccacgctttgtaatgatagcactcaggttctgggaagtgctgaccagcagaactttctgtgatagtggaaatgttctctatctgttgtccagtactgtagccacgaaacacacaggcttactgagtacttaaaacatggctagtatgacggaggaactcaattgtaacttaatgtaacctatttaattcatttaaatgtacacagccacttatggttagtggctactgtactagacaatgcagtgctaggggcttgctcatcctctctctactagaataatgtgaggtttctaaccttattgaggccctcatttctcacttgccccaaggtgttctgtaaacactgagcaactgccttcccacctttccccgccctggtctgcctgcagccccctctccaaccctccgcctggttcagacctgcttcctgaagggctgggaatgtgcactcagggtacaatgactggctcacaagtgaagcttatcatggttattattttcattatgagaaacagctccattaatagtaacagatctctttgtttactttatccggaacaagtcccacccacaaagaagagagactgttcaaagaacctaacaaggaaagttggtcaaaaccatgacaaactcaaggcccccagactttcttctctgctattttaatgatctcatgctaggcctggctggtgagcaacactgtgggctatggagggagatggctctgcacttgggatggaaagtgcccctgcttaatccccagctcatctgagaccccagctgtctccctaccctcagggtttgggcctaattccagcagtgtggaactttgtactgagctatccccactctctaacttataacaggtggcccagtgcccatagttacacaaactatggtgggatgttaacaggcactaaagaaacactggttggatgtagagtgagtggtatcctttatggatacaaaacatggccaggcagagccttgttcatatgtaagcagacaagctggttgcctttctgctacaagggcatcaaaggtccccttggccaggtctgggaacataagatcctcgcacttactcctgcctttgccaggtcattctgcaatgcacacgtgctcctaggagggttttttgtttgtttgtttttcttatagttgtttttgccacaacaaagcatgaaaaatttcacagaactgtgaacaaaataccagcaactaatttcttctatgctgagtgaattctttccaatctgtagtatctttttctcttctgctaaccgcttcccacttcttcaatgctgttggagaccttcagtttcccctaacccccactgtggtcctaatgatgtctgtgggcctctgggggtggcccaaggggcctgagtccttctagccaccatgtggcacttcccctcactcctgagttggctccatttgatggcatcacctcagaagccaagtaaaggttcctcatatgccactgctagaagggggtcctccctatcatgtctgatgttgctacagttggatggtcacaaaagccacaccgggatagacttcactgaggctactgaagtgggggagaatgcctctgcatctgctggaatgcctcactcttcgattttctccaaaagttttgtgtgtaaactatctttttcatttttgcctactctctgccctctttctaggacagataagagtccttgcaaggtatagtctctgacttagagagatacagaactgtatacagtccttcaaattccctcctccccattgtattctgccaaaatctttctgtagttcttttgggatcatttccacagccttagagcaagtgatcagcccacactggctgctttttaattacagatagaaggccttgaagatagcaagtaactgaggagcaagatctcagataaagttcttaactgggatgctaagacacactgatataaagcaaatcctttgtaagcaagctaccaaattgtcatcaaaatatcaaattatcttttctacatctgagcataagcactcttgtgatgatgtctgtccaatgggaagctgaatcaaatatgtcttgcaacgtgggatacaacctagtatgacctcaccaggtccctggtgggaggtaagaagtgactgccagatggaaccaggtataagggcatattatgggaactcagaccccttgtgagggtcaagggagcccagttacagtggagtcctcttcagacagcaatattggaccgaagggtgaaatgtggaaatagggtgataactccagatacaattggagatagctacagaaagactctgtaatgccatataaaactctggtgtttgaaagtatgccatgattataaataaagattgagaatcacaggcgtagaaggagatagaaataagagaatcagaaagaatgaaattctgtcctttgcagcaacatggatggagctggaggctatttatcctaactaactcagaaacagaaaatcaaatatcccatgttcttatttataagtgggagctaaacaataggtatacgtggacataaatatgggaataataggcactgaggactccaaaagtggggaaggcaggaggaaggtgaggattgaaaaattacctgttggttacaatgttcaatatttgggtgatggatacactagaaacccaatccccaccattatgcgatggactcatgtaacaaaccagcacgtataccccctgaatatatttttcaaaatcaatgaggagatgttggcaatttaatgcattaaagataggaaagaagaaagagaggaagcttgatgatggaatgacattttgaagtgaagagggaagttgaagaagctctcagtgatgactcccatccttttagtaggaagtaaagtcacctgttgataaaaacagcaagagtaacatatacttacctttgaccagggactgtgctaagtggtttgcgtatgtttgtttaatctctacaacaattccataaacaaggaagtattattatcctaatttagcaagtgaggaagccgaggctcagagaagcataatttatccaccgtcaaaaagtcaggaaaggtagaactagtctccaatcaggtgaaatgaaatgggttgggagcagagttgatagcttagtttagctgtgtcgtgagtggtccagggatggacaaaagctgaaaaagggggttggaagatggagccttcctccagcaacacttggcagaaggagaggggtgcagacactgggtattagcaagtgtggagggcagtgcaggccaaggagacaagggcatcattgaactggctgggaaataagatggggctcagaaggaagtgttgaatggggaccagggtgatcgatggagcgctgtggagggaaggaaaggagagcatggtcctgggtgggggttaccatggagacaagatgtggaggtacaggctggacttactcgaatgacaggcagaactcctgtgtgaaaacaaaagccaaatataccatgctgagtgcatgcaggttcaaggggctctggcttcaaatcctgcttctgagttctattggcagtgacgatctaactgtaaaggtcataggaaggcagcagcagtgagcgccttgtacagcataaagggctgggatactctccgtgggcaggggacagaatggcactgggcaggagaattcagaaggtgccaactccctgcaggctggccctgtggccgggggctggggtttgagtggggtccgctggagggggcctgcgttccacagcgaggttggagctaacagcttctgtcttgcggcccctcctctagccggccgctgtggaagagtgcccaggcagcttccggcggcctctgcagctgcgtgggactcaccccgagccttcagagtgaggcattattttctcctctctcttgtcagatactgactcccacgcaggaaaaaggaagcaccttttgtcagatgctgtggccacttcctcttcagaaggctccagccaacctttcggtttgcagaatgacggggcccgccgcggtgccggactgcctgtgcacggggccaccgactgcagcctgggttttattcttggcctggccctgaccgggagctggcccctcggctgcttctctggctcgggggggactttctctggctcagatccggacccctgaactggacctggttgtcgtccccccgcttctcagccccctctggggttcctctgtcctctccgcccactctttgctcactgccccatgtccctcggtcagtcggcctgtctgttcctctctatagctcggtcaaggagtgtgatgactggcgagcagatggctgccttccatccatcgtccacccccaacccgctggagaggcccatcaagatgggctggctgaagaagcagaggtccatcgtgaagaactggcagcagaggtactttgtgctgagggcgcagcagctctactactacaaggatgaagaggacacgaagccccaggtaccagccaggctgtttgtcccgttcataaggcacggaggaggcgggcctggagcccgctgggatttcacttaaactcacaggggccttctcaataggaccagacacacccattggaaaggaaattgcttttccctttacaccattttctagatacataaactgagttgcaaagatgacagagtggtcctccaggaagcaccaggacgggcactgtggagtttcctacacatggctctgagtcaagactggcaacagggcggtgatggtagtgacactcagtcaagggctcagagagagtggatttgggttcaggaaaaccgattttgggactcattgatttgtttgttcagtaagtatttattgagcgtttattatatgccacacactgttctaggtacttgaaataaactatgagcaaaacagataaaaatctcttccatatgcagcttagaatgtggaggaaaagacacataaacataacaaataagaaaagtatgtagtttgtnnnnnnnnnnnnnnnnnnnnagccgcgcgtaccttccagccccgggtgaattctatgaggaaaaaataggatgagctagcagatgtcaagagttaagggaagatgtaattttaaaaaggatggtcaaatgacctcatgaagagggtgacactggggccgagactaaagaggagagggaataagctgggtagatctctggggaaagagtgttccaggcagagagaacggccggtgctaaggcaccaaagggagcatatctggcctggctgcggaatagcaaggagggcactgtggtgggagcagaactagcaggtaggaatcagaggggatgaggtctgagaagcaagagggtagtcaggggtcaggggcacagactgctggggcactgcaggccactgtaaggacctgagcattcacactgagggccacagggaggcattgcagggctctgagcagagagtgacagtttttggtttaaattgtaaaaagacagctgtggctactgtgctcaaaaatagagccagaggagacgcaagtaatctaggtaaggggttatgatgtttaggggctcagtaggagttgtgggctggaggaaaatggtcagcttctggatatactttgaaagtagagcaaacaggatttcctgatgcagtggataaggctgtgagaatgggctttaatcctaaatcttgggcctaggtctcttcggccaacctcattgcttttttggccattgtggtgtgtgagaataaaagaggatgctctgaacaattacgccaggaccccaggtgcaaactggatgtctcagggcatccagcacagctgtcacccacctagaactcatgtgtgtggagatggaagtatgggcttggccagaaggagcttatttgggatgacagactctagaaccttctggagccagaacaaaatcccgagaaaggcaaggacaagaagtgtgtagatattgggggtgggtgggaccaaaatgaaaagctcattttggaagaggactgttttctttaagggcaggcttgaggatccattgcacatcagcaggacttggttaaccagttcctccacttaagggctctgaactctggagtctctgtcactgcagaggccagggaaggatcgcagggaccccaccacagatggggctcttgcctcgtgttctgtgcatggtaaccagccttccttctctttataaacaccccagaccttattaaagccaagcaattccaggctaagatggcggttgatatgttaagacgatggaggaagtcctcctatctgcagagtgtaagggagacggcagtaacgctttggccaccccagatcaatgaaaggggcagctgagtgtgtttccatgaagtgtagagggtgagaggtagtttatataaaaggatgtgttcttttcctggttccaccactgtttggccctgtaattatttcatttttccggaccccgctttattcttttataaaattagacaatactacctggcctgcatttgtcacaggatcaaatgatataaagcaggtataaaaaactgttttgttaaaacataaactaatgtcaaagggtaaaataaatatctgaaggttcttgcttctcctccttacttctgggaggaagaaacccaaagccttctcaggactaaattagcctgagataattaggtaacacttctaggatgacaaggataatttattttgaggaaatctattgatataatacatcggatcaataggtcaagtaagcaaagccacacaacccttcaatagatggctgaaaaatgcattgataaaatccaacactcatttcagatatgaaaaatagaaaaataaaacctttaggaatacaataataatttcttagaaagaatagtgtattttaccacatgttgatatgtatcatttgattataaaagctttaaaaattattcacaatcccatcagtaagaaatagccacctatatcccctccactttcagccttccctatacatatgtatttaggaactcatctattgtaaatgcaaaattagtataataaatattatttaatgaaaaaattaacaatatatcatgaattttgccccaacactaaatatgattctacaatataattcttagttatgtcaaagcaatctattatatgaatgttccataatttatttaattaattttccactgttaggaatttgggctgatgtttatactattatcacaaacaataattaagtagattccccacagcattgtttatattagtgatatgacaacaatgcccagtggtaggggctaacttatattaggctacttttatatatctatacaataaaatacaattcagacattgatgctcctaattaatactttttgaaatggaaaaatgtccataacattactgtctttaaaaagcagtttacaacagaagatgatgtatatactaatcccattcttgaaaaaaaaagcatgaatctgtatttatagaaaaaggcctagaaagacatacacagaagtattaaccgtggttatctctgaatactggggttacacatacaatttctaatgtctctttaaaaatatttttataattgaagtgtaatcattgtaaatttaaaaagaatgcacacaaacatcctatcccccaagataccaaaaagcagaaacatcacaataatcttggagccatcaggcgtaagggccctcacatacactgatgatgtgtgtgttggttggtacaacctttctagaaagtcatctggccagatttactaaacaccaaaaaattgtcatacccttagacacagtaattctgggtctacgaagttccaaaagaaataataagaatattcaatgctatttataatgagaaacattggacctagcgtccggcaaaggagaatgtaaataaattatggagccgtgtatgatagactttcctgtatgtgcttctggagaatcctgtggccctacacaaggcagtctgtgcattttttctttgagttctcagaaagatcctgtccagttttaacggtttaaggctgtgtaagtccatgaactagctttatataaaccattctagagagttgtttgtcagggaaattgtttcaaacagaatctcagcttatcgccctcaagtttctgttacaatgatggtctcagacaatcctagtagtagggtagacccgtggtcccattgtctcatctgcctgttttctgaggcatcgccacaagtggttgtctaccagcggtgtgctggtagatagttaacaactggccctctgatgggagagccgattgaagggcaacatttgctaatttctgtgtggcagatactcccatcatgactgatgcaagctaccaacattataccactgaactcagagttgagaagagacatgcaatagcaccacattatataggatttccaccacacagatagaatagatggaaataaccacaacagcagaaatgatagcaaaataatcagaaaggtgtacaatttaagtatcttcacctttttaatagaaaatatttcattgtaagcttatagaatttaaattttagtaatagctgtatttaactggcttaaaacttaacagttaagttctcatgagccaatataagcattttgaaaaatgctttaacaaggagttgggctaaaatgtagttctagatgaactacaaattggatttaaaagttacagctagagaattctagatattctggcacctcactgccacagctgtctccattgctttactgctgaaggacttgtggcctcctgcataaacatttctgtccttccatctttatacagagcccaccccagtcaacttgctaagtacaagtggctctgggcaacttgggcccttcccttcctggaacaattcttccttccctatcagtgtccccaccctcacccctactggtgtctcttcctcttacctgctttcttcttgccatttatgaagttcaagcctctcatgctgagcttgaggaaagggcctgcaattagtcatttacaccttggtgtgaacatgtttaactctcattgttacttctctcagcaagtgggacttgtaagtaaagccttatttgtaattctggaatcacactgactgatgctggaatcgtagatttcttattatctagcttttgtgatcctgggtcagctaattaacttccttgagctttacttcttcctttctccaatggggaagaataacagtccttccctcctagacttcttatgaagattagatgtgctgatacattcagggcaattagcatagagtcagacacctagggaatgctcaataaatggcatgtatatttttagtattttattgttactatttctgatgaaatgattttgggtgtcaaaagacagtttggagaggtacttaggggaggcagacacctctgtgtttgccctttccttctctccttaccagacagtgctccatcctgcctaaaagcaacaaggccttttattctggtgccataactcatccaaagtagctcagcagcacaacctcagggtcattttttctgaaggcatggatgtgatttattaaagatggtgaggactgtgtaggtggaggttatttttaaataataaaattagaggaatgtagaggaattgcagaattccactttctagaccgattttctttttcttctccttccccttcccccttctccccttccttgtctttcatcctcattctcctcctccatttgttctttctcctcttccttctcctgccctttctgttccttcccctcctcctcctcttccttcttgtcttgttctctctcagtcttaggcatttttatttctagatcctcaagaaacatttattctcttaggctcctgagtggatcttacttctgagatttccttaagactcttttgcctttatagtgttctctgccaccagtcatctccatcggtactttgttttgaaataaagacacgtgtgtttactcaactcagaatcaggcctgctaccttcaacagccagcgaggtgtaaattatgaataactagatccagtgcgcactaacgatgttactttgtgcagtcacttagacattcaaagtgtcagtttcctcatctgcaaagtggcagtgataaatcttgctatgctctggatatggagctgttgtgggggtctaatgaattatctcaagtgggccaggcacggtggctcatgcctgtaatcccagcactttgggaggctgaggtgggtggatcatgaagtcaggagatctagaccatcctggctaacactgtgaaaccccatctccactaaaaaaaatacaaaaaattagccagacgcagtggtgagcgcctgtagtgccagatactcaagaggctgagacaggagaataacttgaacccaggaggcagaggttgcaatgagctgagatcacgccactgcactccagcctgggcaacagagcgagactccgtctcaaaaagaaaccaaaagaattatcccaagtgaaatgcactgtaagtgataaagcaccatgcacacacatggtggaagtggcttgtttttctgataatatatctgtgtgtaagaggtcacaaatcctactaaaccctcagaccccttcatagatctgggcttggtggtgggaccatttcccaccacctcagctttgatggtgaagagcactggctttggactgacttctgagatgaactactattctggcacttactagctctatgactttgggtagattatagaagctttctgatctcttttcttcacctataaaatttacataatgatactttccttagaggactgctggaaggactacatgaataatacattcaaggtggttagtgaaggtgcgagcaccttctactcaataccccatcccctccaatggtcacctgagtggttcagtcctccctgaacccctctggcagcttggcaggtagtatggtctccacagcctcagcattgccttcacaaagaccaagtgtctcatttggccatcaagttgggtccttggaaaagtgggaagaggcaagtattggtgatgacaccctcttagctcattcttatatcagaaccttgtctttctctgggcacctgatttgctctggaatagctgccctttgatttgcccaaggcctgagtagcagaaggggccccattaaaactgggaggctagcttcccatgtccctatcctcctactctcctccccatcccatcattatcctatctgttgtccaacccaattttagtttatattaaattgctgcttatccttaaggcctgacttttcatctttcagggctgcatgtatctaccaggatgtacaatcaaggagatcgccacaaacccagaagaagctgggaagtttgtctttgaaatcattccaggtaggccaccacaggtaggacagaggtgcagtgcagaagtaaaattcccattttacttctggaccctagaagtcaaagctatattcggagagtaattcaactaactaaccaaccagcctattgagagcccacaatggttctttatacagttaatgaagctattgtagtttattaactagtatcaagtgcttgaataatgcccatgaaagaagtaggtgagcattttgttcaactctgtaagcatttcatgagcgtgtgctaggagccagttactgtacaaggctctgagccactgacatgaaaagtgcaccttctctactcactaaaatgaactcagtgtagaaggagagtaggtcatcaaatttaacagttaaaatataaatggaaccacgtgaaattgccattttgatgggtcaaaaattataaaaattcagcagcctcagatggttccacccattgcatctcacccattgcacatgattggcacattggaggtgcctctttcaaatcaagagtttccttccttgaatgcatttggaacaaggggagtttgggtcatgctcctggatctgccacactgagatgcttctactcttctccctgtctcttgctcctctgctagccctagccctgccaggggctccaggactagaggctaatctggctgtgtagccttgctgctactgctgtactgaccacagcggaggaggccacatggcccctgagtgcctcttttcttcaccccctccttcccactcacacaaggtgactgtgtgcataagaaagttgatggagaaggcagcgtagcatagaggttagaagtgtccagtctggagctagcctgccctgaccctggcacttactatttgtgtaagaggttacttaatttctccctgccttttgattttttgtctataaaatggggacaataatgataatagtaaagatttaataaggaaataaatatgaagcatttgatacagtgcatgtcatatcagtgtttgatatttgggaataatctagagataattataatgcagaaaaaaaatcctaaacttggctatgactgtttatagaatacaaatttacaaaaatttttaagttcctagatgcttgcttgtttgttttttttgttttttgtttttgtttttttttttgagttgggacagtcttgctctgttgcccaagctggagtgcagtggcgtgatctgggctcactgcagcctctgcctccccagttcaagcaattctccttgcctcagcctcctgagtagctggaactagaggtgtgtgccgccatgcccagttaatttttgtatttttagtagagacagggtttcacatgttggccgggctgctctcgaacttctgacctcaggcaatccacctgcctcagcttcctgaagtgctgggattacagatgtgagccaccattcctagcctcccttgctttttcatctgaaggtctaacttcctctctttctcttcagaggaaaagcaggaaagcctgctttttcagtctctcctcactagaaatatctctctccctttccacaaaggttattctgttcttaggatgcttctcccagtgcaattcatgggacacaaccatccatggtaacatgtgtgtcccaaagcctgggttttcaatctagagtaaccctactgagagatccagctgaagattcactgtgggctttgcaccaaaaatacctactcttcaacattgctataccagtgcaggaggaaggtttgttctctcattatcacttatgtttgcagcagtctcctggcctgctagaggaattcacaaacagatcctttttctctctctctttcgctctctctctctctttctctctctctctctcacacacacacacacacaccacatctcataaggacaaataatactaaagtaataataagataggaaaccattttcataaagataccatcatcttccaaggttccacccaaccctaaagtgagatatccttcatgttataacatagagaatttttagttcctctttttatcatcctcttttgcaagatgattctccggagctaatgctggtgtaagaaatgggcttcccagataggatcctctctctgtgatcaccagttttagttgcacaaacgtcacatagaaacttttaattgtaggcatgctagttttttttttaattgggggcaggcaacaatttagggtaggcttccctctccctactgatctctcatagcataactatctattcttctattctcctcctaccccagggaatcaccaggaaggggttgttccttctgttgcatatgttatctcatttagttctcataccactttatgatctgttgttactcatttgtacgacaaattcattgagcacctcctatgagccaagtactattgcaggactgggaatgtggcaaagaacaaagcagcctgcatgcacgttacgtgggaagagactagcagcaaaccaaatatatgggcaaattatgtagtttttctgataggatagcaattatggggaaaattaaaccaaagagagagaaggtgctggctgaggtggttgattgattattgtgaacagagccggcagagtttgtgttattaagaaggtgacctttgggcacagatctgaaggcaatgagggagtcagctaagagcacagctggaggaagagcattccaggaagtggaaattgccagtacaaagtctctgagcctatttcatatgttcaaggaaggtcaaggaggccagtgtggttacagtgaagtgatggcaggagacaagaataggacattttctcaggggtgggcacagatttcataggcacttgcaggcaatgtgagaactttagcttttctgctagaaggatggggagccactggaaagttttgagcagaggtgtgacatgacataactcatgttttaaaattcttttgaattgaaaacaaaagtaagtagtgggggcaagggcagaacaaggagatcagtgaggaggcttttgcaagaatccaagtcagagatagcagtgatgaaggggctgtgaagtaagcaatttctgatcacattttgaaggtagggagggcttcatttgctaatgaattggatgtgggaaaaagaaatcgatgttgactccaaaagttttggcctaaacaatggaaaagatggatttgctgagatttgtgcatgtagcaagcaagttttttttcgggggtttgggggtaagggcatcagttttggacatattaaataatatctccattgtactggtaaggaaactattgctcaagataatttagctactgtagtgatagaggtaagaacaagatattaagggattatagaataaggactccccactcaacttggagtagggggaagaaaggtccctagaaaaggtaacatttgagttgggttttaaagaatgggtaggagttctttaggcagattaagaaaagaagagaggtccatttccaacaagagaaatagcccaaagggtaacacatgttgaacaggctgtgtttaagtcagataaattatgtgcctgaggtcagaggtgctgttcgtgagctttgtattaatgtcaggcaattcctgttaatgaaagtctgttctagcaccccaattatgcccaaatatttacttttttttaggacaacagaaacctttcaaaccccctttggttcttgtctcttggatctatcttaatatcatcaagcttcacattatttcaccctttgggacaacctgattttcaatcatcctgtcatcaggtcatcagctctcctaaccagaagagttagtccatggaagtcctcttcattcaggaacatcttgagagctgcgtgtttcccagtggggttgctcatgacagaacaaaaagacctcccaggaatcagggtaaactgagaagacatgttttaacaacatagtagactggagttgaggcatggtggagacggagcggggaaagacaccagataaattttgtccaaggtcaaatttaggagcaatatgggccagcggaatctttcatgggaggaaggacaccgacagacttgccctgtgtttggcagcaactcactggatactgacgaactggtgcttttgcatccctgggattcagttctattatctataaaatggaaataatactaactccttattctatttcaaagggatattgcaattcctagagggtctttttgttctgccctgagtatttttaacttaccattttacttctgaaaacatccagttctcaggatactctcaatgcccagtgctttaatggtcagaaaagctgatgacctaatgacaagatggagtcagaatcaggttatcacaaagggtgaaagaaggtgaggctcagtgatattaagataggtccaagagaccagaaccaaaggggatttgaaagtcttttcctgccctgcagggaaatacaggtttaggcacaactactcagctagaacaagctctctgagggagatggcctgccattgtgagaagaatggattgctgcttacgaaggcactttgaaatttaatatcccataattgaaagggatcactattgttttcttgtccccgctaagacctttttattttaaccaactaaagaaaataccaactttgaggatttccatttgcaagcaggtccacggatgaagttagagttcaagtctcagatctgatactaactaactgcatggtccaagacctgtgtttgatactctccttttccctctcttgcttcattcttcctttttcactttcccacattctttctcttcgtctccttctccctgctttctgttcccttcaatttctcccacctttttggtccatttgagaacaccaaccgaggaaacactacacctatctataatcttaggtttgaagtgaaaatggtaaagaaagttctaacaagtttcatgtatccattaactgagtattgagaacctacatttgaaaggtgttgtgtggccaggagagcagaaatatgatcaccaagcaccaattttgtgaaaaaagcacacatctattcactgtcactcccacctgaggttgtcatctcctaccctacccccacaactgagctcaggactagcttaggaaagtatccacggttggcgtgatgatctaaagtcttctaacttttatgggctgaccctgtctcatctatgctgaaactgcaccatgaacttccttttccttttggtaggaaatgacttctgtcctcttaaatgaaagcagctctcagcccaagctatgccaattgcaaaccattgtgttcaatgatttgtctgttgagttagagcttcagtaagagtgcccggatatccagttccactgaggataattcgacaatgcatttgtgttgtttggctggtagtgcttcattgaaccaagacatcaatttaggtctggttcccttctcttccccttgctctcatgttcttatcactctaagaccttcacaagtgctaattcttcctccagcctcatgggaccagaatcgcatgggacaggactcctatgtcctcatggccagctctcaggcggagatggaggagtgggttaaattcctcaggagagttgctggcacaccctgtggaggtaaggacccctgcaggctttcctgggcaggtgcctatgacatctcagaaagtaggaagtagctccaatgtgatagctccttgagcagtgctcaagggagacaaccagaaagcagttctctgcatgcccatggccaagtgctctgtcaaatgtggaggaaaagtgggctcagagcttctagcttcccaccccctgcggcacctgggtcatctcaaagagccatctccaaattaactggagggaaggcaagtcttttgcagtgagtaaatgtgtatgatatctggaagtagtgctttctcctctctgggccaaagtactctcatctgtaaaatgaatgggttggataagctgaccccgggtacccagcagcactggctcacgcagcaccacgagtctgcctggttctgggaactgatggcaacagctatgctgaaagcataagttagactgcataagtcagcacatgaaaataaagctactgtccaaaagagggatgatcagactggggaaggttcaggaattgtgtctgaagtcttgcaggtgtacagtgagttcagcattcaacacttttctgggtttcacaactcaagaatttgagctctctgggaatcctggtgatgtttccacatttgaggagggtcctgactaaagaaaacggatgcaaaaactatctgaaattaacaaacacgtgaatctagtaagtttccctccctttataaaaatatgaaaaaaccgacaggtatgagttctcaagttaacattttccttcaactttttaggagcacgcctacttgtgtcaactccagataaccttaaatatatagttatgtattgactgtgtggcctgttattttggaaattatttagggaggctttcgtagtttgaatattaaatatttatttcattggcctacagcttccttcagaaatttcaagaatatcacaataattttgtggaaagtaaagaaaaaatattccaccagaggcattttatgtttatctttcatctactgtttacatctacacacttttttcagaatggcttaagcattttccccaagttgctatggaatctttttcttttttttttttccgagacggagtcttggtctgtcgcccaggatggagtgcagtggcgtgatctcggctcactgcaagctccacctcccaggttcacaccattctcctgtctcagcctcctgagtagctgggactacaggcgcctgccaccatgcctggctaatctttttttgtattttttttagtagagacggggtttcaccatgttggccaggatggtctcgatctcctggcctcgtgatccacccgcctcggcctcccaaagtgctgggattacaggcgtgagccaccgtgcccggcctggaatcttaattgatacatttcagcatttatttggttacaaatagaaattgtatccaatgatgttaaacaaccaagaaagatttgctggttagatacattagcttctcaaagcaaccaagagcaggaactgccaagaggttttataagagtctgggaccaagaaaggggacattagcattgattttatcctgtctgtttctctgggagcacatgacctgcaggtacataattaggccacatgctggaaaatcttagctgtgaccatccttattgcgctggattatgagattgtgagccacccttttctgttttctccagtccagtgctttaagctatctgcatagacaagggtagtggatgttgcctaatcatgcacctgctctctgagtcaaaatggtatccgtgtactttcactaggttctgtggctactgtgatgcttggctgagccttgccgtagtgaactgctgtactctgtcatgatacacatggggatttcaccctcaccgcaccccgagaccaccaccctgagaagcaagtcaagcatgagtcctgtaggcggtggaaagtccagcgaaggggaaatcagagtgcaacagcacttatttattcaaagaacagtgttgcctctgatacagcatctcagattattattattattattattttgagatggagtctcactctgtctcccagactggagtgcactggcatgatctcggctcactgcaacctccgcttccagggtttgagcgattctcctacctcagccttctgaacagctgggattacaggcatgtgccaccacacccagctaatttttgtatatttagtaaagacagggtttcaccttgttttggccaggctggtctcgaactcctgaccttaggtgatccaccacctcggcttcccaaagtgctgggattacaggcatgagccaccgtgcccagccacgtttaaagttactaaccaaaatcatagatcccggaatgtgagggcatttttaagacagtatagagtctcatttgaggccactggacaaatcagaaatttgttcttcctatttgtaagttagggaatgttggccttaaagggacaaatgacgtgtcccgtgggcccaggaggtgaggggcagggccagggctcttttgccacagcacattaccacttggaaagaatctctaacgtgggttgactagatgggaaagacatgcctcccaaatattgtgaagtcactgagacatgtggctgccacctctttctagccctttgtgaaactttctttttccaaccagagcctgcccccttcccaccaccttcactactaccaccccaaaggagatggaatcctttcttgtcaaattacagcactaaccttgaaactcatctccacacgttcacccctgccttcttacagtctgttttcgacagagcggccagagtgagcctgttaaacctgtcttatcaagattcttctcagctcaacattctctgatagcttcctttctcactcagagtaaaagtcaaggctttataatgatcttacagtgcacagtctgcccaccgcctcccctcccgcatttcccttctgaccttctcccgtgctcatttcactctagcttcaccagcctcctcaaacatcctacccgtgttcctgcctccaggcccttgcacttgctgtttccttcgctgggaatcctctttccccaggtagctgcatggcttggtcccttaccgtcttcaggtctttgatcaaacatcaccttagtaggccttcctctatgattctgtttaacgttggaccccttccttacccctcagttctgcctcgctttgctccttggcacataacctcttctaacatgctaaatatttcactcatttgttttgttcctagctagactcccctcactggaatgaaagcttcaatctacttggcaggaattgtttttctcttttttgtgcagtaccatatcctagaatctaaacagtgctcaataaagatttattaatcgaatgggtgaaagaatcaagtcattttcccatagcagcactatgttcagctccctcagtaggctcttctctgttagatgatgatcagcttatctgagagattattcagtaaatgggttgtgtcctctataattataatatcttcctccaagtatgtcggtggtgagtctcggtggagctctttatggtgcaaagacctcccttggagaatctgatgaaagctatagagactctccccagaaaaatacctagacacaaacaattttgcttctgacagcaaaacattttcagacacctgtagcccgtctgtacaccctagggaatgaatcccaattttaaattttagaagttactctggtgacaattgtgcagagccgatgcctcttctggcttgccgtccccttttgggctccttttctcccttgactggagagatggcccacatagtcttcacggcattcccaacttcttcctcagggctcctcctgcctgtagctggctctgagtgttcctctcactttagagggcagcacattggtgtttcagcctttttcttatcagtgggctaatttcttgccacccttctctaagggcttgtgacttctgacaactcattctcagcttactcctgcccatttcctctaaactactccttccttttagtaaggcaggcatgccttctctggatctccacactgaaacctggtccctgtcccgtctccagggagcaagcagtccaaattgcaaatcatcacactctgtccagacctgcttttgtcctcttcctccggagatgagccatctgaagttttgctcaggctattgctgagtgaggaaacaatgcattacattgttctcctttacccaacccagttttaaagtcctgaaacaggtcctatgtttttgaaattattattattagtataaatttatggagtacaggtgcaaatttgttacatgcatagattatgtagtagtggccaggtcttttagggtacccatcatccagataacacatattgtacctattaagtgatttctcatcatacaccgccttccatcccctcatccttctgagtttctgttgtccataattccatactctatgtctgtgtgtacacgttacttagctcccacttataagtcagaacatgtgatatctttctgtgtctgccttgtttcacttaaaaatggcttctagttctatcgatgttgctgcaaaagacatgatttcattctttgaaatgtcatatttactattctttggctgaacagtaagtataccattgtgtatttataccatattttcttcatccgatcatctgttgatggacagttaggttgattccatatctttgccattgtaataatcatgtgagaaacattcaagtgcaggtatctttttgttataatgatttcctttccttttggtgtatacccagtagtgggattgctggatcaaatgatagttttatttttagttttctgagaaatctccatactgttttccatagaggttgagctaatttgcattcccaccaacagtgtatgtgttttcttttctctgcatcttgaccgacatctgttatttttttactttttggtaattgccattcagagtggcgtaaggtgcgatctcattgtggtttttatttgcatttctctgatgattattaatgttgaggatttttttcatatgcatgtttgtcatttgtatgtcttctttcgcaaattgtctgctcatgtcctttacccactttttaatggggttattttgtttattgttgttgagttatttgagctccttgtagattctggatattagtcttttatcatatgcatagtttgcagctattttctcccatttagtaggttgtctgttcactctgttgattcttttgctgtacagaagctttttagcttaattaagtcctatttgtttatttttatttttgcggcctgtgcttttgaggccttagtcatgaattctttgcctagaccaatgtccagaagagttttcccttgattttattctagctttactctaggttttacagtttcagatcttacatttaagtttttaatcatcttgatttttgtatatggtgagagatagggctccagtttcattcttcagcatttggcaatcagattttcccagaaccacttattgaaaagggtgtcttttctccagggtatgttcttatagactttgtcaaagatcagttgactataaatatgtggctttattgctgggttctctattctgttccattgatctgtgtgtctgtttttataccagtgacatgctgttttggttaccatagccttgtagtataatttgaagtcaagtaatatgatgcctccagccttgttctttttgcttagggtttctttggctatttgagcccttttttggttaaatataaattttaggttttttttctagttctgtgaagaaatgacgttggtattttgatagaaattgcattgaatctgtagattgctttgggtagtatgattattttaatgataatgattttcccaatgcatgagcatgggattttttttatttgtgtcatttacaatttcttttgtcagtgattctgtagttttccttgtagagatctttcatctccttggttaaatatattcctaggtattttattttctatagctattgtaaatcagaatgccttcttgattttgttttcagctagatcgttactggtgtatagaaatgctactgatttttgtatgttgattttatatcctgaaactttactgaaagcatttatcagatctaagagttttttggtggagtctttaggtttttctagatataagatcacatcatcagcgaatagggataatttgacctcctcttttccaatttggataccacttattcctttctcttgcctgattactctgggtaggacttccagtactctattgagtaggaatggtgaaagttggcatccctgttttgttccagttcttagagggaatacttttgactttctcccattcagtatgatgttggctgtgcatttgttgcatatgacctatattattttgaggcacgttcctcctatgcctagtttgttgagaatttttattatgaacagatgctgaattttatcatatgctttttctgtgtctgttgagatgatcatatggcttttgccttaattctgtttgtgtgatgtatcacatttattgatttgtgtatattgaatcatccttacattcctgatataaaacttatttgatcatggtgtgttatctttttgatgtgctgttggatttggtttgttagtattttgttgaggatttttgagtctatattcatcagggatattggtctgtagttttcttttttgttgttgttatgtccttgtctggttttggtatcacggtgatactgaccctgcagagtgagttagggagaattctctccttctcagttttttggaacagtttcaggagggttggtattagaacttctttgtatgtttggtacaattcaactgtaaatccatctggtcctgggtttttcttttttggaagatttattgttactgattcaatctcactactcactgttggtctcttcagactttctatttctttctgcttcagtcttgggaggtatatgtttctaggaatttatccatttcctctaggttttctagtttgtgggcatctagttgttaataataatctctgatgatcttttgtatttcgatggtattagttgtaatgtctcctttttcatttctgatttgtttgtttggatctctttttttcttggttagtctagctagaagtctaacaattttgtttatctttttgaaaagccaacttttcattttgttgatcccttgtattgtttctttggtttctgtttcatttagttctgctctgacctttgttatttcttttcttctgcttattttgagtttggtctgttcttgcttttctagtttcttgaggtttgaagttaggttgttaatttgtactctttctactttttgatgtaggcatttaatgctattaacatccctctttgcactgcttttgcagtagcctacaagttttggtatgtttttgtattttcatttgtttaaaaaatttttagatttctatcttaatttcttcattgacccaatgatcattcggtagcatgttgtttagtttccatgtatttgtgtagtttttgaagttcctcttggtattgatttctagttttattccactgtggtctgagaagatacttgatatgatttcagtttttaaaaattttttgggacttgttttgtggcctgacatatggcctgtcttggagactgttccctgtgttgttgagaagaatgtgtattttgcaattgttatatagaatgttctgtaaaagtctattcatcccatttggtataaagtctaatttaagacttttaaatttattttctgtctagatgatctgggtaatgctgagaatggggtgttgagttcccactattactgtgttgctgtcaatctcttttttagttttaggtcagtaatatttgtttcatgaatctggatgctccgtgttgagtgcatatgtatttagaattgttatatcagttcatttatatagttccaaatgactcactttgttcattcctttttattcttttttctttatttttgcctggctggattatttcaaaatacttgtattcaggttctgaaattctgccttttgcttggtctagtctgctgttgcagcttttgaatgttttctgtaattcctccaataaatgtattttgttctagaattcctgtttggatttttaaaaagatatctatcttcttggtaaatttatcattcatatcctgaactgattttcttatttctttgtattgattttagatttctcttgcatctaattaggcttccttaaaatcaatattttggattctttatctgggattttgaggagtttttttggttaggagctattgctagagaattattgttttcctttgagggtgtcatattacattgctttttcgtgcttcctgtattgttacattgatttctgcacatctgaagcaatagtcacttcctcttatttttgaatttacattcattatggggtggggacattttttcttgaagatgtgactatgatgttggttgggtagggccatttgactttgcttcttagtgtgtgcagtggtgaagatgctgtatgatttccttggtcataaatagccttagtggtatctatggattccttagtgtgttagggtgcagttattggttactttttcaggtttcagtggtagcagtggtgggccaagtgtgtttctccttgagacctcaggcagcatatgctggcacctgtactggcagttccaggcaagtcgattcttgggcctgtggggggcttttttggatgctgattgtagtagtggtgtactgggcaggtgagtgggcttttgaccttttgggcagcgaggatggtgggggcagtgggtataaaggtggtcatgaaatgttcttctagttctcaagcacagtgcttttgtgttagccgttgtttcaagtttcaatgggctgtgtgggccagcctccaggctagtagatggtgcttgcaggtaacaacgagcggtgggggtagcatggagatttatgcccgacctctgttccccagaagaggtatttgggtaacccaggtggtagttgggttgtggaacacccaggagcctggatcccacactctgtcttggagtagggggcaaagttgggcagagctggaccaagcaagcttgtattcaggccctccaatggcatatgcatgcaccagccttgattagggggtagaggaagtccttaggccgcttgtgaaatgcttggtgaggggcaacctttgctgtcctgaagtcttaggatagggaggatagggctgtcccagtggccactgctttggcccacaggaatgagacttgctttcgtctcacaccccagtcccagcaaagttccctcctccatcctggctatggcagccaacttggccacccagtcagtcctggcaggctgcacctagtccacaactcagtcctaggccataggagatgccattcagcttaaggccaagcctccacaacaactctcctcttgcttaggacctgggatggtggtgtgcctggttgcaatgccagtggctggagcccactccacacttgcttctcagaacgggccgcaagggttcatcccccgctcaagccccagtcctgcaagcaccacccaagttcccccatgcacagcctgtaagagctccgatccagaatgttgtcccacagcagccagccaggtttcaaaaagggtgtaggacattccctggagcagttccatatcatagtcttcttgccactccccaggttaagattcgtggtgtgggagagtcaaggtgctctcctacggcctggattgtataattccccagtgggaaagtggacagcagaaaggcactcactcaccctctcccatttgggggattcgctcccctttcccagctggcctcagccacacagctttcctgttttctttcttcctggatttcaaagcttcctctcacttttttgttgaactcccaagttctttcttgaacactgcatttaaagtgcagttgtctgcacacttgcttggtttctctaagcggatgagattactggaaatgcttgtagtcagccatcttcaaaaaaaagatcttgtgttttaagcatcattgtgtgtttgccaacaggaagcatactgtatgtaaatattgaattgttatataccttggatttcttttctcctttcattcttttaagttctctgcacccttatgagcatgatttcctaatccacagcacaatttagcctggaggggtgtgcaatcattgttattccatgtgttctggtctttctcaccagctacatttgatattaaaatagatgatatttacttatttccatgaattccctcatctctcctgccctcagctcctaacaacagacagatacttatttattcatttggtcaacaactctttctttaatatgtgctatgtgcccagttctatgctaacactggggcacaacagtgagaaagagagagaaagaggagagagaaaaaaaaaaaagccaaagtcttttctgtcaaagagctcacaagctaggagaagacacagcaattacttttaaagagccaagggaaaacatagttacaaccgtgaaaagagccatgtgggaaaaacacatgacactatatgaggaaaaaatatctttgtcaagtaggtcaaggaaggcttccttgaaatagtgatgattaagcttaactctggaaggccagcagaagctaactagacagaaaagggggaagcagaatggtgtcttagtcacagggaatagcatgtgcaaaggtcctgtgacagaaagaagaacaggctctggagtgaggggagggtaataaaaggggagatagctttgttaaggatgttggtcttcatcctaacagcaataggtagtcattggggatttcaaggaaaaaggtgaaaaaaatcagattctatttaaaagatcattctacttgctgtgtggaaaatggattgggctggaggtggcagatcagaatgaaagcaggagaccagatatgaaactcaagccattgtccaggcagaaaggacagatggtgggttggacacgggtggtggcagtggagatgcagaaaagcaaacaggtttgcacaatgttttggaggcaacattgccagggggtgggagtgaatttgatatgcagagagaatgtggagtcagatgagtccgtgattcctggcctattaatgaatggagaataaacactgggttggcagcatgagacagccccggggcccttcctgacaaccttgcctgtctctctgtaatgctgagagcctgtttgccatctcctgggtatgtctgatagggttgctgcactatttactgtatctgctcatcaggaggacaaaatcatctcagtctacccaacaaactgccttcaagatcattatctctgaaggcccccatggagccatgtgcaactctgaaagcatttccagggaatggtgggctggcttcataaacgctaagtgaaattctgtgtttctgccagacacattgatatatagaacaatgctggtaagggttcccgcgtgggattttttttaacccacctgggaggtatcccctgaacggcagttgacaattagctgctaagtaaaaggaggcacttatttttattgcggtccttgacagctttatgttcactgtttaaaagctggagagtcctgtgtgtaaaggtgagtggcgaggggaagtgctgggggaagaagggccgggagggctggggcaggtgcagacagatcccatggtttcctttttggagtcagaacctgagcagtatttgcaagcatgtgctgatctggaagtgagagaagagggttcttccagtctggggaggagggaaggcctgaggctggctcatcggaggcgtgagtcttcggccctgccatgcctcacatccccaggatgccgcggtgggaactgggctgtggctttcctgccctggcactgcttgtttgctgggatttcaggaggaaaacccccaagctccgaaagaaaggtatttcttttttattttgtagttcacttcttccactagaagactcgtttcccagagcctctaccctctcctgtcaggggtggggagcgcttctggaactgataccctgggaaggaggtatcagtgctgagcgggcaggcacagtgtgtatgggggtggggagctctccctgaggcctgggctgggctagaggcagggtggggaggggctcttgtcctgatcttaggagtgtttcagtgatgacaaaggaggaccaaggtagggagggaggtgacagttgctctttctatttccacttccccaaagcaacccagtttcctggagttttccagcaaatctaaggaaggggttgagggttaaggggtggagatggattgtggggagagctagggcagttactagtgtggtagtgaggcctcacccttctgtggttgttcaggatggggtccaaaattttaggtctgaggactggagacaaggcgaacatggtatgaggggaggtggggctggcatgggctggcatggtctggcattagaggaactcccttgagactttatgatctctgaacttttattccattagctttaaactctaaagggaaataaagcactgaatatagaatcacagggtaaatatgacctcggaaaaattcctgactcaaatctcagttttctcatctgtaaaatggaacaataatatttactttgtagagttctcatgaggactaaatgagatagcacatgtgaaagtatctggggtcagttctcagcataaaattaatgtcattaattacattggttaatagttataattatcatattacatatattataattacattatggtaattatattacttacaattattataataaattcatgaaaatttatacctattaagatggaaatgctctgctaatggccaaaggggtgacaattaggacccagaggtcagacactggtataactcaggaccaggtctttggagttccagggatgtttctgattccaaactcctcatgtgatctgagattaagagtgacaaaacctgacttagccaagctaaaaaaaaacaaagatgatttttctctcatgtaagaagtgacactgttggtcctgatgtctccagagcatccagtggttggttcttgttgagagaatagctttgacggatttctaggctgcagatgtcaagttcaaagtcttcatcatatgggtgatatttaaagtggtgagactctgagaaagtgtgcagatgagggagggaggccctgggaccctccaacatttagaggacagcaaggacaggaagaatcctcagaggaggctaaaagcatctgatgagacacacggagaaccaagagggactggtgtgccaaaagccacatgagaaagtgtcccaagaagaaggaggtggcttgctgtatcacttgctgctgatagagtagttaagatgaagacagagaatttcatctcagattttaaaatgtaaaggccattggtctccttgacaagaataggtttggggaagtactgagcagagaaaaggggcagagaatgggaggaatgggaggcagcaggtagtgacagctctctgaggtccatcacataccaggttctgaaaacagatgctgagccagatggactgtctgcctttgaggggtccacagtccagtggaagagagggatgtttaagtgaatcatcataaaattacatgacagtgataacatcgaggaacacacagggagctctatgagtagaggaaagagtgaccagttttctctgagaagacatccaaattcagaagactgggtttccaggtggagagtaggaggaagggcattctcttgagaattttttaaaagcaaaaaccatttttcattcttcctttcatactctctaactatcaaagagcctggcccacagcaaatgctcagcctacatttgttgaatgactttgtgaattctggtggaaggaatttgcaagaaacagagttgcaaaagaaaccattataacgatataggcagcagcagtgggaatagggagcttgtttaaagcatatttggaatgtaccaacctaggccgggcgcggtggctcatgcctgtaatccagcactttgagaggccaaggtgggcagatcacgaggtcaggagatcgagaccttcctggctaacacggagaaaccccgtctctactaaaaatacaaaatatcatccaggtgtggtggcacgtgcctgtagtcccagctactcgggaggcttaggcaggagaatctcttgaacccgggagaaggaagtttcagtgagccaagattgcgccactgcaccctagcctggatgacaaagcaagactccatctcaaaaaaaaaaaaaaaaaaaaaaagaatgtgccaacctatttggggagagtgaagagtgttgcggataattctaatgctcacaattttgctaattgggttagttaagtgcaggtaccttgtattaatggctttgtattttcagtgcctaggagagtacctggcacttgatgatggaatgaagctattgcctttgaggaaggctacaggagaagcagtgatttagggatgggatgatagtgagattagagaagatactgggagaattgccattagacattgaacttatgggaatagaggagaaagagagagagagagagagagagagagaaaagatggaaatagatatgatataactacatatacaatgataaaataaaacactttttttatgagtataatactaaagagagaaaagcaaatgttggtcatttgcatgagagctgaggtgggggattattctttcataaattatatctatcaatccatatgtacacacacatatatccatatatacacatatatccatatatacacatatgtgtgtgtatatatatacacacacatatatacacatatatatacacacatatacatacatacatatatatatatagagagagagagatctggaccagatatgcagattaataagttataagtttataggtgatatctaaatgtgtggaatcatatgcactttcctaaggagaatactagagtgagaagaaaagaagcctgagttggaatcccaggaaatgatgcaccaaacgagcaggtggaagatggagcacagtcaaagacacttgaaaggagtcatcagtgacatgagcatagaacaggaatgattggatttattgcaatgtagggagaaagtattgaagaggaaggagaattaacaacatcagtcttcagagaagatcagtaagtagggtgtggaatgaacattaggagagcactagaaatcttagtgagcagatttagtgaagaagtgcaggctaatgaaaccagattgtgatgggttgagaggctgagtagtgagtgataagtgaggaagtggggcagacatctctctagaagtagacatttttattacaagtatatggtaaagagaaggaaggcaaatgttggtcatttgcatgagaactgaggtgggagattattctttcataaatggcaaagacttagacccacgtgggatctttcaattgaaagagaaaatttcaacatacaaagagaaacagtaagtactggaagagatggaaggaatggaacccacagttcaagaaggcatcatcctagatgaaaggtagggcccttttcttcctctgggagaagacaggaacacagaggagaaaggatgggaaaggcagggactggagatgagggagttcactcgtaaccctccatttgataatggaaggaaagaggagccaagatcacctgttgagacagagaagggagggaatgggtggggagctcaacaggagtggcaaaaatttggaaccagtgtcttgcagagattggaaggataaatttccacaatatggttgtgcatggtcttttgtagttctcagtggcctgatgaagacacgcaaagggtagtaggaagcagcagggcggggatgttgaagaaaaaagtatgggtcagattaatattgaaagggctgcatttgaggcatgagagaaatagaggatgaaggcaggacaaggctgatagactgggatgaggagaaaagctagagaactagacatatattaaggtgcaagaaggagcttggccccaaatcatctgcaaggtggagcatctcctataagacctcagaaatggagcttgaatttgaaagctttgacttctctgtgcacatccttacattgtgtttgtgctatctttccccatcaagtccagtggacctctggagcctgagtttcaactgttccaagagacatctgcctctctcattgaagggcccctctctggacctctcaaaagagaattttcctgatgctatctggtctgttttaagtcggaatatttcaatcatgtcctatcaatttggtgaaaagatctgtccagctccttttacagacaaatagaaacctaattccatatggttattgaaattttctaattgtttctcaccatgttttgtgtgacccctcaaaggcagacagtccatctgttatgttattttcataacttgttggcaaactcattaaaagcaggaacaaggtcttccatgtgccttgtctgtacaacccattccatggaacctggtgctggcacatggcagggcactcaatgcatgctagtgggaagctgaattcatatatcaaggagattcctattagtgtttaaactaaagaaatgccgaataaccattagtcatgtgaaatacttgcttaaagacaaattgattcattaaatccttcagcaaaatttgttgactgtctaccttttgccaggggttacactagacattggggatgaaaacagcctttcctcctattctcagtagcagggagcttacaatcatgcagatgacacaggtacatacaaatcatgatcacagagtgcgggaaggattgggatattcaagaaacaatacggtgcacagagtaggatgtagtccctccatctggatgtcaggaaggcatggcagatatgatgatatttgagaggggccaaggaggagaaaaagaattttgtcctctttgtcctcctggtgcagccagggaagggggagagcagactggacagggaggagactgttcaaggacatggagactgcagagcattacgttttggaaacgtcagtgtgagttgcttcttggggcatggcaggacatcaggccaggaaagcaggtgggtgccaagccttgaggaatgccagccttgattctcaaactttagccacagaagtatctaatcacagtctcaccgcaatgcaataagtgaaacgaacaacagccaagcagatttggtggtagtggggaatacagaggccacctattcagctccttctagattccacactctcacctcccaacacctgatgtgatgaaagaggagtccctgatgaactgccagggctttaaatgtctatttgaaaaccatcactgtggcagttgggagagaagcagatgagtactgaaaaccaagagaaaggcgctcaagcagaatgatgctttagaaaggcaagcagcaggagggtttcgaacatgatagagagaagagactgtagcggttacaggtgagagaggaggctggcctacgctgggtagtgggtaggagcggaaaagaacatgagggtcaagagcctggtacagctctatacaggtggaatccacaggaactcgagatgggatggaggggaccaacgtgagagagagaatcatggggagagtcaagtgactttgcaaacggatgtcctagggattgaagtgctgggtgcagcagagccctgattatggcagagggaaagtcacgcaggacaggacagaagccacggcctgtcttctgaacctccagggtatggaagcctggtgggagaatggataggcagtggttgtcctgatttgtaaatttgtcttctcacactgccggtgcggggaaactgtggagcaaagtttctccacgcagacagagctggggtggagctggcccacacttgctttgctggaggcagggtaatttgggaaaatatttttggaaagcaatttgcatgccatcaagttataaaaatgttcaaacctcttgacccagtaattctacacttgggaatttgtcctaaggaaatagttcaaaagaatgaaacgcttttgttcatgcatccaaatgttaattaattagaaattatgcattgtactgcatacattccaggatctctgccaggtgaatgaacgtgtttgctgtggcaatgtttataattaggacatagtaaacaacctaaattattttaaatgccacagtggtttagtgagatgaaacatctatgtgatagactacagtagtccctctttatccttggggggatacatttcaagaccgcagtggatgcctgagatctcaggtagtactgaaccctatacacattatgtcttttcagtcttataactgagacaactactaagtataactgagacaactactacgcgactcctgggcaagtagtgtatataacgtggatacactggacaaagggatgactcacatcttaggctggaccgagcgggaccgcgagagatttcatcatgctactcagaatgacatgcaatttaaaacttatgaattgtttgtttctggaattttgcatttaatattttcagactgcagttgaccgtggataagggaggatgccatactgtgttatgctttactactctgtgacgccagtggaactcaaaacggcctgcttgctgccgtggttaaggcatattgttgggagttcactgcctaggcctgaatcccaactgtgtcatgctctgagctgcctgactttggcaagtgtctaaggctcagtgtctttaacagtaaggtgcgtgtgacattaataccatctcatggggttgctgtcaaggttaaaggacaaaaagtgtgcaattcctagcaaaagaattcagcaaaagccaaccattattttaaatatgtaagaaatgtgggtcaatataaaaagactgataaagactgcctcaaatttacaggcccctatttatagcttcaggaaatattctgagtgatttatctcccatattttgtctagtatcattgcaataaaacctgtgaagacacaggtgacacagaaagtcaagaaatagttcatccaaggaagcacagaatgacgggcaggttctgtttgctctctcctcagcagtgtttggccagcgcttggatgagactgtggcctatgaacagaaattcggcccccatctggtgcccatcctggtggagaaatgtgcagagttcatcctggagcacggccggaatgaagagggcatcttccgtctgcctgggcaggacaacctggtgaagcagctgagagacgcttttgatgctggggagcggccctcctttgacaggtacattgccccactgcagtgtcccacctctgccctcccctctgcttggcttggctgggagggcctctccattccagttgagctatgggacttgcatagagacttctaagagccctggcttacaacagaaagagcctttgtttcgcccatgattgggaatttgggagacgggagcacagttaggagagtgtgcagatagtttatgtgacagatgatgtgaaccagaactggaaccctgctgggcagattcaggtgatgtttaaggcacaggagaaggtgatgtgcagaggaggggagaaagatgggacgttgcctgaggctcacccttcaggacagatgaggaacatggaagagctgagctgtacaaacactcagtgtagtggagaatgcaccagatctatatccaagggcaccagcggctttcgttagcattccagaagtggctagaaccaggacttcttgttagtttcctggatcacagtactacgtgattctgactcagttctgagcccttttgcaggagcacatcctgatatcttggccgcctggcattcctaagtgtggaggtctcccagccctgtttggggcatatcaggcatagtgacatttcctcccaccacccccttcctccccaccttctccagccactcagctgaggtttccttctctgccacactcagctagtaaaatccccacccgatgttgtgcaatctccaccccagttgcctgcgtgaacttgtcctgctggcataagattgactgctctttccaaattagcagcccataaaccaaggtttaataagatgggcctgaactctacccagtttccaaaaatgaaagttgctaagcttattttggacaatggggttgggttgattctgagaaaattgtgaagacctaagtgtcatcttgtgtagaagctccctcacccctcactctaatcaccaacgccgcccatttttcctccaaagcttctctgaggtctatatgtttctctccatgcttatggccacagttgtagtttggacaaccataggggtgtctttcttgcccttaataagttaatttcccatgggtgctatattttagcaccctaggaagcaagagatggggttcttattggaacaatagcccgttattggcatcaaacacagggacctttcagcagcaccataaactgcaccttgttatcaggcacttgttccattatgctcaccacctttatattcagtttctttttatgttttcagttaaccttggcctgaagaaagatacaggtgggttgttgctagagcaatgccatatagtgtgccaaaaggaatagaggtgattgctgggatatgccaaataactgccttaggctctagcctatgcactatggagttggcatgggtggtggtgtgggaatctttgattattttgaaatatttgaggctggaaggaggaaaattaccttaccttgcgacatctccacccctagaagtgaggggtagggtttttacacatccagaaataggaaaggtcatcgggggcttttcaggggcttcgcaggggcaactcttaggtccacataacccttgagaggacaagtctgatttgggaggtatgactgactcttatttgattcttattatttagttacatttgggcatatttaggagagaccaggtcttctctctcctattccactcatgattctgaaaaccctcttttcccctttttctgccctctctccacccccttttatactcccctacttctcattccatggtgtgttttggtgttgagggctgtgccccgcaatgggcagagcatagaatgccggatgcatagggtagggaaaggaggggaggggcttacagggatcaggctgactttgggatcatagaattgacaaaaccaataactcaagacaggtcaacaaaactggcaaattaactctgaagtgaaagtgaccagtgttagatgatttcctgagagtgattctggcctgggagtgggagaggaagagaccagccttgagacagtgttaacctgaattgtgtgtgggagttctgaagaggggcagtgtgaaagggggtggaaagagggcaggaaagggggaaagggagggttttcagagtcatgagcagaccaggagtgagaagctatggttgtagctttttctgcctcctataaaaggaattctaggagtcagtgggtggaagaaggggtatttgggagagcaaggagctccctcttgctgtccccaacttcacggctgtgggaactcacccagatcctctgcattggttatgtgctggattccacccccagatgcccccattacctcactagaatgaaggtgagcaaagttgctgtttggtgagactagtgcaggtctttctggtctccttagacacaaaaatgtgaactttaaaatctccttgccaagtttctaccaggatggacactgcctggctacaaagctaacacacttctcacccctatgtgtctgtgagaaatgcacttacagacatgccacattacaagcatcaatgcccccagggaagggctggcagaaccatctgagtcttgggtaatccctagtgcatcagccgttgaacccagaagccacctggctcctgacttactcttagcccttgattaaaaaaaaaaaaaaaaaagaatcatttaagggtgctctattgggttagaggaacagcaaactcagaaaaaataatgctacaaatttagaccataaaatagacatctgagttagccctagtacaatggggtgctcacattaaaataaaaatttatagaaataattgtttaagttccatggtgttaagtgctaaaaaggaaactcaacactatgaaaacttagaacaggggcttttcacatggtcttgtgtatttagggaggtccccaagaaaatgacatttaagctgagacccaataaacaagaatgagagttagcaaggcccagcagtgggcatggcttgtcaggattatttttggtgaaatgaactgggaagctttctgtaagtttcagtgttgtaagatgatttatatagctaattttgctcttttattataactttgaagtatccatggtgtagctgtatttataatccctttctcttttctaatgatggatgcttttgctgtctaaatttctcctgattaaactgtctaggtgtcttttttattgttgttgtttctcttcaaaagttcaaaagatccaatttcttttcttttcttttctttttttttttttttttttgagaccaaggctagagtgcagtggtttcacccaggctagagttcagtggtgtgatcttggctcactgcaacctctgcctcctggattcaagttattctcctgcctcagcctcctgagtagctgggattaaaggcacctgccaccacgcccagccaatttttgtatttttagtagagatggggttttgccatgttggctaggctggtctcgaactcctgacctcaagttctccacccgccttggcctcccgaagtgctgggactacagacataagccactgttcccagccaggatccagtttcttgaattatcctttacactgtttcttccctttcaaactctgttttcttcactcattccattggtgtgttttggtgttgaggactgtgccctagagtgggcagagtatagaatgctggaggcatagggtagtgaaaggaggggagaggcttacaaggatcagtgtgactttaggataatagaattgaagggatttggaagactgattggatgggggtgaaggagaggtcccaatcaaacaggagtcccaggatgctgatagagacaaatgggtggattgcagtgtagggactttaggaagatgcaacttttggactttgggagaattctgctcctgcaaattgtcagctgactgtctttctgccactttctcgggaacttctcataacatattttgacaaaagtacttttcctagcctggctttgccttgggtatttttgggcagtgactcagcagggaaggattttccagaatccccatgttaaatgaatggttcctaccccagatttcctgagggcagccatggagcatagagtgggctctgtgccagcccgtgttctcctattgaggtagagttcacaggctgcaaaggggaagccttttcagaagacagctacaacaactggctgtcaaaaccaaagtaaaatgcacacaaagcaccaagacagagctttacaatcaagccccagtattcttgcttctgttgcctcacatgcctcccttctcctcctcttgtccagatccacccctcccttccctcctaggaccaggagacatgttctccagcctattctatatttctcatcactgaaatcaaggagattccaaggttattctggacctcttgccacatcacagcttttcacgatgctaccagggctgctacctaagaatgccaggttttatcaatatgaaataaacaaacatttcttcaataatcagcttcaggaatatggtagtgaatcttattttcccttgtagtgttgcagaatcaatgcaatcgccttgtaagccaggggtcaacaaacttttcttaatgggccacatattaaatatttaggctttgcaggccagatggtctttattgcaactataatactctgctcagtacataaatgaacaagtgtggtggtgttcttctataattttacttacagatgctgacatctgaatttcctgtaatttttacatcacgacacactcttctttgtgagtgttttttcccccagctatttaaaaatgtaaaaataattcttagctcccaggctgtacaaatagaggcagtgggacagatttggctcctggcccgtggcttgccaagccctcctgtaaatggagaagctgaactgaacagccgtgcctctttcagtcaatcaggcccacggggaggcgtcctctcctcatgctccaggctgacacacatgctgcctgcctcatgccctaactcctcaccgcctttcagagttcatctgaggtactctttcatctgacaagtcacctatgtgttcccatctctgccttgggtgttctttttccatacttccataggatcctgagtcctgggcttcccatatcatggcattagccgcacagtattgtaaggacattttaatacttgagtccccagagttctgtggctcgatggggccagggctccatccctggattggatggctactgatgtcccttggattggctactgaaatcccagtgcttgacaagtatcttgcagtatcttgcacctaataggttttcttgatgcttattgattgagtgaatttttgagtaaatacgtgagtgaacctcagaactattttaagcactctggaagattaaagagaagaatggaccaaggatataaaggagttaacacaagcaatattagagactaattagacaatgctaattgtgaggcactaaatgacttgaagaaagaagaaagcaataaagacgaaaatcattaaggaacgtttagtaaaaatgtagaccttgaacttacctttgaggtagttgggtggaagagacagaggaacatttattcaagaatgttgttccagaagggcgaattaacaaaaatgttttggtctgattcttctttatcagactactcctctgcaaaatttccctttgtaatttatggttctattcactgaatcatcagaatggaagagaggaacatcctaaagtttttctttcaaagagtttcacagagcgttgcttattttcttccagagacacagatgtgcacactgtggcttccctgttaaagctctacctccgagacctcccagagcccgtggttccctggagccagtacgaagggttcctgctctgtgggcagctcacgaatgcggatgaggcaaaggtttgcatcttagagttagttgtcctgccttagaagaaagtgattggttttctggacactaatccagtaggcaacagtgggtcaaggggcctgtactttttggtaagatagtcaaatgcaacttcctcagcaacaaaaggtatatgaactcaatcataatgactggcaaaccacagccttcatgagatgcaataatccaataaagaattggaccataatcaaatactgctagatcacattaaaagtagtgagaaaaggaggatacatcggaggacggtttcaagcatgatggccttgctgagacttgctgggacacaaggacaggctggaaggcaggtgtgaggtcacatagctcaagctctacagcagctgtgagtgtcaggcgtggtcatccaaggaatgcatgtgccagggagaagaaggacagggagggttttttgattgtttttcttttcagccacagctgcctgtagggtctgtaaccaccatctgcaatatgcttgtgagagtgcacaagttcactaacaagatttttgatcctgtataaatttatttctagagaggccttatagtcaacaatgaccacactgtagtcatgttattataatcaaccaaccaaccaaacaaccaaagaaactgatgaaacccaaccaacaacaataaaccttgatgatttttaaacaagattttcaaatccaagtgatccatgaagaagttgatgtttatatcgactatgttaaaagccctctctggcaaaatggtgcacagaaaaatctataatgagacctagatttaaccttgattttgccattagacaaattatgcatcttttataagactcagtttatttacttagaccaatagaactttctatggtaatggaacttttatatatctgcaccgttcaatatggtgaccaccagccacacatggctattgggcatctaaaatgtggctagtgcacctgggaagccaaattcctaattttatttaattttgatttagttaaatttaagtagttacatgtggcaagtaactgctatattagacaccacaaacttagataattttcatagtaatatcagccatgcctaggattgttttgaggacccagggatatgatactggtgggtgactttaaaatttttttcaatataagggaaggtttattatcttccacacttcaaaatttattagatagtctgcttcatagaatatatttatttaaaacgaatgaagaaatagcaccctagccctgcaagaaaacacagctgtgagaacttccatccctgactaagggtggggagagcatcatgatttgaatagatcctgacataagagaaaagctgactttatatttcaaaattaagaaaggaagagaacatgatacaggttttgtagctcttttccaaacaaaaattagattgcatggatctgaggtacgatattttgtgcgtaacttaagaattttattgggggagggagaaagggatatgaaaagtcttaacttatactggtatatctgctcaccattgtgaaagtaataaaattttatggaataaggtttaaaaggcagctaaaaagataaacatttcagatcgcatctcacccctgggttctggggaaagtaaaggaggcagctagatgctgttctgacaataagattcccacccctgcactcactttagacttgcttctcccagctttcttaatctcagcatctttgagagtttccacatctgtggcaatgcatgtctacacacagggaccaaggtccttctcactggtgaaaacatggcagaggtggcagctaggaggggtgagtctgtagcaacctttgcaatgaatttactcgactcaactgaagaagggatctcagcatgaagctgatgctacgctaagaaggtctatatctacggaagctgctgcgtgtaggctgacaaggctggagggtgcgttttctgcaggagagctgctcaggtttgaggagtgcctgcacaccgcatgtgaattgtgtactctctttttttttttttttttttttttttgagatggagtttggctctttcgcccaggctggagtgcagtggcgcgatctcagctcactgcaatctccgccttccggtttcaagcgattcttctgcctcagcctcccgagtagctggggttacagccgtccgccaccacgcccggctagtgaattgtgtactctcacaagcaccatgttgcagatggtgattacagaccctacaggcagctgtggttgaaaagaacacggaaaagctcgctgtccctcttctctccagcacatgcattcctagtagaccttgcctgacatccacggccatccattgcagagcttgaacagtctgaccttgcaccgtcctccagcgtggtctgcctgtctctgtgtcccggcatgtctcagataggccacagtgcttgaaatccttctcagaagaatcctccttttctcaccagtcttaaagtgattctgagatatcttattgtggtcttattctttattggattgttacctctcaagcattcattcagcaaacaattaacgtatgagttgttaaacagtccttccttagagtagctcagggtcaagggtggggtgcagtggcataattacatataaataaaagtatacataacaaaaactatgacccttttaaaaaaaattctgtgagaattgagttatttcccatttttttttaaacccacagaactacaggaacaggaatgactgccaaagtgttgtttctgcacagatacaccaattctgtcccagggtctccttgctggcacatgggcaggctcatttactggtaaatgatttacttgtgtaaatctcttcccaggctcagcaggagttgatgaagcagctctccatccttcctcgtgacaactatagtctcctgagctacatctgcaggtgagaggcccctggtatcaactctgcagttttcaaccccatcagaaagaagctcctagttagaagaggagggaccacgtctgtgaacagagagattctggtctagcactttggaagatcagctgtattcacatagcactgaagtagcttcctgtataatttcaaggattctgaaaacctggttgacccaaaaaatgaacgtgctcccccatttaggcctgcctcagcactgcccagagtcctggtacatgcaagagaacccagaatccttataatgtttctagaatgatctcccatctttgtgattctgagccgtagcttagctccagggagacattcattctgggccaccctggttattttccttcagccctttctggggacctgctgtgcgccacccctgtggcaactctagctgtggattgacccagatctggctcggctgggaactgggatcttcatcccagactgacctgaattttgtcttttattttttaaaaataatttgttgtagttcctagattataaaagtcatgcttgcttgacttggaaaccaggaagatatagcaaacagtaaatgagaaataaaaaggacccacaatcccttcaccagcaacaagcactattaacactttggcatttttccttctgggtgttttctctctgtgataaatctttacataccttaatgtaaatataggggaataatattttatactaaatcaaaattatataaaggattgtgtccttttttttggtttaatgttttattatgagcatttccctatgtcataaaattggattataaataacttcataatatttcataatgtttcatcatttggacacgtcaccaatatttaataattgctctgtatttgaaattgtgttgcttcattctatccatttttaaatggttctttgagagagtatttagaaattccctgtttttacagtgaatctgagagctttgtgcctcaaaggggtagaattttaacaaaaattcagtattagttatggagaacctgctgagaattagcaatgcttgtgctctaatcagaggatgagagcaaggaggcaccatggattccccaggcctgagatcttcttaccaataaagttttcctctctggagacttgggtgggatgagtgctgagagctgggagataagcctatcaaggcagacatgggtatgggcagatacccattttaccttttctagtccagtctgagctcctggaagtggatcttgcctcctgcttatgtgattccattcacctccccatcccccaccccagcagctgggcaggaccctcctgatttctcttccttccttggtcttgggtctttcaggatgaggctaaattcttgtgggcagagcaggctggtctcattcctgagtctgggaggaaagcattggatccatccctgagttctcattggaaccctgtagtgcttcctcctggctacttcctgctttctaccatgggatttcttggctgtctgtaggttcctacatgaaatacagctgaactgtgctgttaacaagatgagtgtggacaacctggctactgtgattggtgtgaatctcatcaggtcgaaggtcgaagaccctgccgtgatcatgagaggtatggctggtcccgtagtgaaagcaggtacccaggaaataacaattacaacattccccctgatatttgtgcactgctctgtagtttcccaagcattttaagctggttatcaatctcatctgaatcatgcaatagccttgtgaggtaggcagggcaggaattgtgtccatttttcagatcacaacaaaggacagaggtcaagggtttgcccaatggtcccacagtgcagtagactagtacaataatagctagctagtgtttgtcagtcttttattacttttaaatacccttagccagattgagcaagcaggtttcattttattttattttatttttatttaggtatttattgagttggagcctcactctgttgcctaggctggagtgcagtggtgcaaacttagctcactgtaatctctgcctccagggttcaagtgattctcctgcctcagcctcccaagtagctgggactacaggcataaacccccacacccagataatttttgtaattttagtagagacagggttttaccatgttggccaggctggtctcgaactcctgacctcaagtgatcttcccacctcggcctcccaaagtgctgggattacaggcgtgagccgctgtgcccagccagctttcattttacaagccagcccacaaaaaggctgcttaaaaagctgtgctgtgcaggcttctgaggctgtgtcctgacacagagtactgatatctgccatgggcatgggggcagaaagcctggcacatatttgctctgtgtctgataagaaaccagatatcatattgaggaccacatcaggagagaaagatatcttcattttctctgctgttttattgcctactttcctgatcaaaaactaatccagtggactattggctccctctgaaacagctccctcttttattctactcccgtgtccttctgttccatccctttcaacataatctccaactccaagcaattaaaaagggtcttttgagaagcaaaatgaggcccttctgggccctatagttttagaaccgagtttggagacatccacgggtggggatccttgaggactgactacctgcctcctacactacacaacagatctttttcttctgtctttcagggactcctcagatccaaagagtgatgactatgatgatcagagaccatgaagtcctcttccccaagtccaaggatatacccctgtcaccccctgcccagaaaaatgaccccaagaaagctccagtggcccgaagctctgtaggctgggatgccactgaagacctccgaatttctaggacagacagcttcagtagcatggtaaggtgcagagaaccttcctgcttccattgggttcttcctttagtccaggccatcccatgtaaggcctgctctcgggtggcaatttggggagttttaggtgatgcagtggcagtgggcgctgctgctacagactcatctgaacacaccttgaaagcctggcctctttccaaatctagtttctattggcatctttgaggggggtgagtgacaagtgtgccaatcacccagtgactgagcaatgaggtcctcactgaagcccactctgaaagagagactcaaatacagtccagagaagttcagtgggaaaaatgtatacaacattgtaaatgttttggtcagaattgttgaaaattctgggtgaacgtccagagaaaactggtttcctgctaacccatgaaacgtgattcctttctcagagtatgtgatgtgtttgtgtaatatttctcattcctcgataagccgtctcagccatgtcagcccccacatttgtgctgaagggttgaaactcacgttcccaatgtccaaaagctctgctgactctgaaatgtagacctcgtgaggacaataatttacaaaggtcaaatatttttatatatttataggaacaaatatttttacaaagaacatgtgaactttatatagtagcttgatctttatgtgtggccaaaaaatggatttcaaatttctagttgaccagatgattcaagttacctacagtactgttagccctgaagattgtttttaaaaggcaggtagtgggtagtggttgtagtttttcttaggataggtctttctgaaggcaatgcattctactaacactctaaaactaaaataaaatttaaaaatgctcatacttcatgtaacaagatcatcccacagtccttgagaatagctattattttactcatttaataggtttctgccatttactgatttctgtgggcaggcactatgctgggaaatttacactgatcacctctagagtcctcatattacataacattgtagggcagaatttatcattcgtattgtgttattgaggagcagaaactcagagaggttgagcagctggcccaatgtagtagcactagcttgttatagaggaggactcagatccagtcctcccttcagaacccaggtacctctaactccgggtggggtttctgaagcaagcaattggctgcaaaggttaaagggagggctcgaacctgattgtctgattttatgtttaggtctcacttgatcttagccaaaaggccgagaagtgattgattttgtgtttaggtctcatattctctctcctttttctttataatttcattaaaaaatatataatatatgcacatggttcaagtaatcaaaaagatagaaaaaggtatacgttgagaagttctgctccctcccgtatccccacccaccccatccctcactgccttagtttcttatttatccttccaatgttcctttatgaaaatataagaagacatgagtgtaaattatttacctccttttttacacaaaatgtagtataattctctctctctctacagtcacacacatacacatacagtcacacacaaactcccacacaaaactatgtatcttgcatttttgtacttagcagtatattctggagactttttcatgtcaatacataaacagctacctcatatgacctcatgttttctagaggtgtatagtgtcccattctgtagatgtaccagtccctatagatgaacacactgccttcagttcttttctttttctttcttttttttttttttttttttttgggacagggtctcactttattgcttaagctggagtgcggtggtgcgatcacagcttactgcagccttgacctcctgctgaggcaatccttcggcctcggcctcccaagtagctgggactacaggtgcatactaccatgctgggctaaattgttttgcgtattttttgtagagacaaggtttcaacatgttgcccagcctggccttgaactcctgagctcaagtgatccaccctcctcagcctcccaaagtgctgggattacaggcatcagccgctgcacccagcctttcagttcttcatactacaaaagaagctgcaataaataactctgggacctccttttgtactcaggcagatgtatttctcaaatgcattttcagaagtgggcttgatgggtcagagggtaaatagatttgattgtatgattttgagacaaattattggagtttgtgtcattttacacttccagaagcaatgcatgaaagaactgttttcctacagtttcaccaacagagtttgttgtcaaattttgggggtttgctcatctgataagtgagaactggcatttcagtaattttaattttaatttgagtttcttgtattatgagagaggctgaacatcttttcctatgtacaaggactagtttcattttttcctctgtgagctgcctgatcttgtcctttgcccataattacattggttgttgatctctttcttcacaatttttatgaactttatctattaaggagagtaaccaattgtctgatatgcattgcaaatactttttgctagttttttttttttttttttttttggtttggcatgtggtgatttgttcttttgtttttatttttgttctttttaattttttaggtcatggaaatcaaaaggtcaaatttatcaaacttttacggcttctgggttttcagtcatagttataaagaccacccattctaagattacataaggatcctactttaggactctttaaccacaaacaaacacttgattttggtgagacttcatctctagaacatggttcctttactgcaatatccttttggaaaaaaatgctaatgcagataatcaagtaatgtgatacattaagaatttcataggtatgctaccaggaaacttttgttttggggtctctaatccataccttgggagcatgacacacagaggtgaaaaccccatgtgacatccatggccatttcttttctagacaagcgactctgatacaaccagccccaccggacagcagccgagcgatgcgtttccggaggacagcagcaaagtacccagggaaaagccaggagactggaaaatgcaatctcgtaaaaggactcaaacactccctaaccggaaatgtttcttgacatcagcttttcagggtgccaacagcagcaaaatggagatctttaaaaatgaattctggtcgccttcctcagaggctaaggcaggggaagggcacaggagaacgatgtctcaagacttgcgccaactttctgactcccaacggacttccacctacgataacgtcccttccctgccagggtcccctggggaggaagccagtgcactctcttcccaagcctgtgactccaagggagatactcttgccagtccaaactctgaaactgggcctggaaaaaagaactctggagaagaggaaattgattctttgcagaggatggtccaagagctacgaaaggaaatagaaacacagaagcaaatgtatgaggaacagattaaaaagtaagtcagacagaggggcactgagaggcacttggcttccatctttagagacaagagggattgttcccatccgccagagaagtcacatcataaagcttcaatttggggaagacagtaatctatagcaggcctagaaagaaaagagtaaagggaacaatgagatagctaaattggtgaacactctaaactttaaactagatttaggaaatgtaaatatctagcttaagtagtttaatcaataatttccaaacagtggttcaagaatcaacatgctttaattaatttaaaggaaattaattttttttatgttaaggtcattcattgattctgcaaatattcctcgagcccctcctctgtgccaggcacattccagttgttagggtatagcactgaacaaaagagacaaaagtccctgcacttacagaacttctagtggggacagatggacaatacaaatatataataaaatatatgttatgtcagctgatggcaagtgctgtggagaaaaataaagtgggtcaggaggttggaaagttcaaggaatgggttccaatgtaaaataggggggtcagggaaggcctccgtgagaaggcagcaggtaagtaaaggcctgaaggagatgaggagcaagtcaggtgtgtagatgggagatgactatggccagtgccgagccatgagaaaagagcagtcccccatggtcccacccaggaagagtggaagctgcctggggccagggagagtgattagaggagatgagggtggagaagtacaggaggccaggacgcagtagggttttgtcagccactgcaaagcctgagtaagaagcttcggggtggtttcaacctggtttatgcttcattggctcactggcttcccattgagcaccggctgcagggggcaaacagaagcgggaggccagttaggcagctattgcctctgtcacatgcaaattcccaagatctgtgcacacaatttgttctcttgggtagatagagtattttcttgaaatatttttcacactactgattggctggcaaatttgttttcaggagagaaagccttgatccagctgttcccatatcagcactagtcatgaggcagtgaaatgtgaattcgtgggctcttagatttatggctacgtcttagtccatgcagactcaggtatctgaagggaagactactttgaaccctcattcattgttccacacagagagctgccatccagaagcaaaatgtagcttgtttgtctaagaacctgaaaccaatcatttgtagaattaaagacttctgtgacatcttggcagtgatcaaagcagtcccatagaaggcacacactgccctcacatatgagtatcttcaacagggtagaaaaagaactggctgccacagatgtgtcagagtcctctgaatccatcagttggggaagcctcccatcccaggctcctgagcccacacagattctaccttccactggaacccatggtcaggatctagcacagtgcctcacttggaatttcttccagaaccagaggggtacagagaacttggagaagaaaagtagatttgtaatgagagggtcagaaggaatggccgggcgtggtggctcacgcttgtaatcccagcactttgggaggccaaggtgggtgaatcacgaggtcaggagatcgagaccatcctggctaacacggtgaaaccatgtctctcctaaaaatataaaacattagccaggcatgatggtgggtgcctgtagtcccagctactcaggaggctgaggcaggagaatggtgtgaacctgggaggcggagcttgcagtgagccgagatcatgccactgcactccagcctgggcaacagagcgagactccgtctcaaaaaaaacaaaaggaaaaaaaaaagatggaatgagatcaatttagctttaagaagagataggtgggggtaagcaaagttctgaagatggattgttacccacagaataggccaaggcccttgaagatagaacccaagttttgggctcacatgggagctcaagtctcccttgtgcaaatgggcaggccatttggggagaagggaggcacactctacagaatgaaattctgaaacaaatttccagtcacacaatcggcatgtgtacactcattcctaagggttaattcagcacagcctggcagggggccacctggcactacattaggatttgggccagtaacgattaaaatcctagcaattcaggaatcccacagatttttcacctggcatgggattcagaagtgagggtgagactgccaggaccacagctccccaaagggcagttccctctgtttctccaaatcttggtccccaggagatccttaataagaaagggtgctgatctatgctctccattgacacaggatgaggaggcactcatgagcacagaggtgtgagaaatttgaaatatggatggggcttccaggactgatacaaggtgctgtgggagtgaatatatagatctgttagaactggtccctcctttcaaagactttgttatccggttgaagatacaaaacattaaacgacatgagaaaaaacacaatagatgtcacaagatggtgttaaatgacaaatgagggggctgggtgtggtggttcatgcctgtaatctcagcactttgggaggccaaggcaggcggatcacgaggtcaggagatcaagaccatcctggctaacatggtgaaaccctgtctctactaaaaatacaaaaaaaaagaaaaaattagctgggtatggtggcgggcatctgcagtcccagctactagggaggctgaggaaggagaatggtgtgaacctgggaggcggagcttgcagtgagccgagatcgcgtcactgcactccatccagcctgggcaacagagcgagactccatccaaaaaaaaatgacaaatgaggggctcagaagtactgtggggattcaggttttctgggacatcttcatgtgggaagagggacatagctgagaggttggataagggtcttgtgatttgaaaggaaaatgagcagcaggttgtgagcaagggggaaggaagagtctagaatgaatgccacattctttcattcttttctttccttccttgtagccttgagaaggaaaattatgacgtttgggctaaagtggtgaggctcaatgaagaactggagaaggaaaagaagaagtctgcagccctagagatcagcctccgcaacatggagcgctcccgggaggatgttgagaagaggaacaaggccttggaagaagaagtcaaggaatttgtcaaatccatgaaggaacccaagaccgaggcttaagggtcccaggagtactgcagggacagccccagagaggcccaactctggcccctttctcagtgctatctgatgacggggaaacaaaattattctctgagagggaaaggacatttgagggaaacatcaaatttccccataaataaatgaatggagtttgcaggaaggtgagggtgagcagagatgtgtgtggacatctctgaccatccatcgctgtattcaaatggattgttctattccattctggtctcaggcatgaccacgtccagtgaagacatttgaggcagcacatctcaggacccaggcaatagactggccccaactcaggctggactaaggtgtgattaattctttgttttttgtgtggaacagctcaccttgtcagacagcctcagggcatctctgagacacaggggcagaaaatgacattcatcttttgagtcctcatccatggagtgctgtgtttggggggctgcatctgctgaagcgagaaccccattctgccaccccaccaggatgcccattctccaggacttctccaacttactattagactaaaccagaacaagcaacaaactgtatttatgcaagcaaaattgatgagaaaattatattcaaataaagcaaaaattaaaaaaaaaaggctattgctaatccatacggcacctttgtgagaattagcaaaagacactccttccttggggcaggtggcttgctgagcagggcatgggctgaatttcagtcctgacttgcctttcagggacaggtgtttctatacttgcggagcccccatttcttctgtatttcacacaattgctgtgggaattacatgagaagaggtaatctagtccctacttgctttttaattgtgtatggagggcctgggaacaaacgcttcctactatgataggatttgttgtggttttagacagtaattttcatgataatagtttcttttttcctgtttcaccaaaatgcaagtgattttacccttaaagggacaacaggcactagatgataggtgggagaggggctttcccagtggacagctgattcttccccttctatgtcaagccagcttggcagaggccctggtcaggccccggacctctaggtaggttggttgagtctttttttgttgttatcattctaattggatggtctccaagctcttttgactgggtaactcatcaacagaaaatgtttgagcatacaccccccaatatatttatttatttataaattatatatatgtactactatagtactccataatgtatattataaaattcacagaacagtaactgaataatgatgagataaaaacaaagatcaatagatgttcccaagtgtgctttcagctccggagacccctgacccagttgcccaggaggtattacctgtaccaaatttatatctttcatcccactgctcccataaatgtgcttgaactcttgaagccccgtggcttaatcagtggtttggaatctatggttgctgcagtgagagtttagccttcccagcacatgggcctcctctgtcattcctttttctctctgtcttcttcactctggttagtcctcccttcctatggccaggacttattacccacagagtgaaagtacagacagtagcatcagcatttcttggtcctgctactcaggccctgctctaccaacgccagcccctttgaggaccagattgatggagaaggagggcgactcctacggcattcctatctaggcctgcttgcagaagattgaggggaaactcatctggaacattcgtaagaaaagcaataaaatattgggattcctgagttttaggtgtttttaaataacaggatagcaaacatggaaacacttattgaccacctgacttacgttggcgagtgcctgcatttctgccaggcacatatccttgtgttctcccacggattcctcacactgactctttgggggctaaaacagagttgaatatggaagtggctgctgtcacaatttccaaagaaaacatttgtctgaagatgcaaagaggaggctctcaagtctgttttgaggcccgtgtcattggcccttactgggtccgggagccagagctcgtgctgagtggaagtgccacgtttgaatcccaactacctcctggtctggcagtgtctctcattctacttttttccaccagtattatgagacaacagagcagctgttggcctcagaagcactagacagcctagcctgcaagtgtcaatccctcttcacaatcaagagaagagtttggctcgcttaagttgctactatttgctcctgtgccaccttgcatacaaggagaagacaagaaacagggtttttttttaggaccctgggaccttatgagtgcaagggtcacacaaaccccttcatcctgctgaaaaaggctgggaggagggagcccctgagggccagaaaagaagatctggagtctgatggcactgttttaatgccctcaaaaggcatgcatgtgattgcatgacagggtagctccaggtctcacctggaccaaaggaccaggttctagaaggcaatatctggagactgacctgtgtcaaggggtgctgttggactctgcagctcctacctgtactttcagagcccttccatggaaaggactccatcaactttgcctttttcccagccacaccctcacctttatgttagccgctctcctctttgctcatgagctgagaacccagaaaggtcatcaatgtgcatttgaaaaccccttgccctcttccctcccaaactccttttctgtcacagcctcaagcatgtcccttatcagggtactcttatcttaagtttggggcagatatgatgcttttccagtaagtctgtacactggataggacaatttgtactagggtattggctgggatgatccccttccagtggattctgttcagagcctgcagtctggagagaccatgtgtggcattcctagtgcatagacagctgcaaaggatgtaaactataaacattttgttgttgttgttgttttgaccaacttcctaaaactctgctcaaaggcctgtcccctcagaaaagcacgaagccggagattcccaggctgcccaaggccgctgagagggggaggccagagaacacagtggcacagcaactgctggctggattccacgggctctgggccagaagatgcgtgtacacgaacgccctgtaaacttccacattccaccacttcctttccagatagcagcagtggtcaggtcacgtgcttgccggagagcagagaaaacacttggaggctgcttctgcaattaaaatgggctgcatttacaagaattacacaaaacctttcatcctgccagagaatgatgggagggaggccctgagggtggagctccagctgccactcagaagctcagggtggcatctggccagcagcagcagagaggctggagccagggggcttgtggctcagatgatgtcccaggagagaatatcgacacagctgtgtaactgtagcttctatttcttctgatgctggaaactctcttagaatcataggataaaaactggaaaacactctgattgtatttaattcaacctgtttatttaacggacaggggaactgaggcccagaaacataaattaaatggccagtgctcacacagaaattaggaagaggattgaaggaggtgattttggagggctcctctaacccatgattcagtgattcttgtggttcttgctttctctccaagggttctttcccccaaactgcaaccatggtgtgaaccccattgaacatccgttgctgagtgcttccagaatatagagctctcctcagctcatgatcacaaccaagacccacctaatatgatgccagtttttcacctactgtgtattcccaatactattttaaaacactggttctcagtcttggtggcacaagagaattaccttaggaactgtaaacaaaaattctgatgctcagatcttacttcatatcaattgaatcagaatctttcgggatggggcctaagaattggtagttaaaagaaaaattcccagttgattccaatatacaatcaggatggttaaatagttttaaaactgctaagtttggctttagtcatgactaatggtaatattaattctacctgctcccctttcccatctccagttaacacagctacattctctgatttacaggctgatttttcatgtgtttattcatctaggataagacatgattaagtgatacagaatggatttatgttatatgcccattatgcagatggtgaaaagtgagcccaaaatttttttaaaaaatgagtataacagtagcttagtatgaacaaatccaaggattttgagaattcctaaatatatggggacactgtttacttgctttaaggattgactctaaacataggcaaagaagataagcacttgagggcctgatttaaagagtcccgagaatagctctgatgaaaatcatctctttttcagactcatgttagattgagaaatccctaccagtagcctttggaatattaaccacaaacgtgatatttctgggagactccatgaagcctccattaatcgttagtatcatctttatattagttatctgcttcccagcagaaagctgtgtaatgaaggaacgagagcctggccagataagcagtgctgtgggtggaggaacagatcaagagtatggatgttggccaggcacagtggctcacgcctgtaatcccagcactttgggaggccgaggcgggcagatcacgaggtcaggagttcgacgccagtctggccaacatagtgaaaccctgtctctaccaaaaatacaaaaaattagccgggtatggtggtgtgcgcctgtaatcccagctactctggaggctgaggcaggagaatcacgtgaacctgagaggcggaggttgcagtgagccgagatctcgccattgcactccaacctgggtgacagtgggagactctatctcaaaaaaaaaaaaaaagtatggatgttacctaggagtattgcagtgtgggcccctggctgccttaggtggggtgagggtgcaaaaatcaggccttaaaaagggaaacggggactcatcatcagggtggacggagaaatggtttgcccccacatacacctgatacctgctcaaagttggcacttgtcctccttccttctctctgttctcccttattgatgtcctttcagtcctgctgaggccagcccatgctaaacatcaccctggttcttgggtctttgttcagcatcagtagcaatatcatgacaataactaccaataataagcaacaaataccattttaatactttctggtgagcactgtatccatgtcatttcctttaaatctcaaatcaactcttttctgattgcaatcaaacctgttttactgaggtctcaatgtggcttagctaggaactgaagcgtatatacagtctacacaaggctacattatccttgccctcacatagggaggaagtacaacatagaaaatgaccccttggcagagatggactaaagcaaaatctgcaaagactttttctttaaaaggctggcagggattctggaaagaaccactaactgccttgtctgactcagcatcaagatggaaaaatatacagaggctgttgccttccccacagcctaagtcaaatccacctgcttgctctgaggctgtctgggaggccacacatcaccatgccctttcctggagtcaattcttggtcccatgtcattagccccaccctcgaaagaactctgggaatggggttgccttggagtccccggttccgtgtggctaaagagtgagcctctcatatctccatgctgaatttcctcactcattcacaaccctcctttccatttcaagaaatctttctgttcccacaagcctgggagggcctttgagtggggcatattgggtaagtttgaaggagtactgccagtgagaccttcaaaagactctgtgtgaatgggctggtgttggtgggaggaaacagggtcacagattccccttcccttcccccttgtaagatgtgtcatcagttaaatataggctctggccctgtggacgtttacaggctaagacagcccgccctgactggggctcacagcttctgagaggaggacactgggatgtcttcagcccatttcacgtgggctgactgtttccaaaacactcctggtgggtcagcgagcagaggaagtgttaccatgtgatcactttagaaacacccacctaatgacgcactaacacggatttgccctctgtttttcacatttgatcattcctgacactttggcgaggaaacaaaaccctatttctcttagaagtcactccttccctggatgtgaaagagggcagtggtttccctgtcagtcctcttttagggaaagatctgggtgagcacatgacccagctcagctggtctggggctggacacagacacaattgtgagaacttgaactgactcaccaggaagcaggtggttgggactaggtactgttgtctatttcagtgctagatattgcctttaatgaaaaactagccccaatcagaaaaaagccaacaccacgctctgcaatactaagttgactcacctgttgaaatgctgtttattaagcaaaaccagtatcctcagaattccagctttcactttcaagtttcttatgtgggatttcatagtattgggcccagtgatgtgtacatcaatggtttggcttgctgtttatgctacttatttactcgagcagtcactctggtgtgttcccatggcttttctgaaagtattagaatacagctcccaaagaatgtgagtgctattggagaaataaaatacatggaaatcatatggcatccagcaattgctatgcctatcttgagatagttgatccctagataagcttggtagttgtgttaccaatgatgtcttttcttagtacacatagattgtactcaaggaatagcaaaatgttacaacactgattcttcctcctatagttaatggcattttaaaagagttatgcttgactaaagacatagtttttaaaaatgcaaatattgagtgctttcaattccctaagcatggtgttttctgctttacctgcaatgtattaattaattttcacagaaaactatgaggcagcggctactatcatccccattttacagatgagaaaaccgagacttagaaaggttaagtaatctgctcaggctcacagttcatatcccatttctaagagacatttttttttcattctaatacttttgaaattcagtatgtattttatagttgattggtgcatttaaaatggaacatcttacaaattgatggctacttagaactgagaaaatataactgacagaagcaagcatcaaaaccacgtctacctgattctagtattggatcatccaaccacagtggcttgagtgtcaaaggaaacaacctgtgtctaagtaatgaccataaaagtaataactagtccacattcacattgaagataatggttcatattcttcctatttgatactatttactctattagaaaaattgtctggtttggtccgttcaattagatttatctatttattttttgtagagtatcatcagttaaacctcctaacctctgggccaccccacccagtataagccataagatatggctcatattcttcctacctatttgatactatttactctattagaacaattgactggtttggttggttcaattagattgatgtatttattctttgtagagtatcatcagttaaaccttttttgctgagaaagcttcaggcttttcatttctataatgagagttgttttcaaaacacatttaaatagtcaagagcccaggcatgggtatggtcacaagcaggagggtctgaagctccctgaagtttgagttcacagcgccatggctcctgccgtccttccaaggagagagcagtcacgtcagttgcctttggttcttgtctgactgaggagagatgctctatacgtggttttggtaatgacagcatgtctctaactcgagattaagtttctgtcctctgaagatctcaatgtaattcattacagaagtgcttcccaaagcttctccttggaaggcttttctttacacgatatactctttgaacaatggatgctatgcttaaataagtttataacaccctcttccccctcaaagattcagaagtcagggcaaccacatcatattgggagtctaatttgtaagtcgataagataaaaatccctttggtcaaaattatccttgaaaatcaccagaaattgtatataaggtcccccaatttatagctttatgtgtacaccctggtcactaaggtgtgagtgtagttataaattactgttaatgatgagactaagaatacggaccactaggattgctattttctttccctggcatcctcatttaaattgttatttttatttttcatctagtgtatagtttgattcatagaatttaaatgcatatattaaattaaaagtagtaattattatagtactaataatagtaataatcattgacatttattgggggctagctattgcctgccagactgctctaagtgctttatttgcatgaactgagttaatctgaacagaaacttcagggctggacactatattccctttttacaacaaagtcacttgcttctgcttttactcgtgcctttggcgacacaatgactctgcaaattgtcctgtgcccagaggaaacatttttctgaaaacttctgcgctggggcagatttagggcaaagttaacacttcaaaaatatctccagtaattgagtaaattgctcatctgtcaaattggctctttggcaaattactctgcttgcacatattaatagccaagcttagccaacttgaaatatggagatttactggaaatcacagtgaagtgaagagagaggcaagagcagaattgaaattcccacctggcagcaaaagagagttatgcagagcctatcaggtaaggcagaagcacttcctggaccgctcaactgaagggcacagccagcagtgaggtggggtggcccagaggttagaaaccccacagagagaatcagagggaagctggaggcagagggagtgcgccattcggaattccaggggttgaggacctctaggtcccaggtacagttgtaaggctgggggcaaaaagttgctcctgccaggcactgtggctcacgcttgtaatcccagcacttcgggaggccaaggcaggcagatcacttgagggagtttgagaccagcctggtcaacgtggtgaaaccctgtctctactaaaaatacaaaaattagctaggcgtggtggcacatgtctgtaatcccaactactcaggaggctgaggcaggagaatcacttgaacctgagaggagaaggttgcagtgagccaatattgtgccactggataatcttggctgtggggtcagagtgagactctgtcaaaaaaaaaaaaaaaaaaaaaaaagaagaagcaaagcagctccaggccagctttcttccctgccaaggcacagtcagcttcctaaacctgcaaggctgcatcagtctagagtaggcactattttcagctcgcatcaaggagccatagaggcagctgaatgattctccaacagatggtctcagtagagtagaaatgacagtgtagcacattgacaatgaggaagttaaggtgtgccacagttgttaatggaacctaagtaaaaactcagagacagaggagtttaagggagtcttagctccccagagatttctaagaagcccacctaaaaaaatctcttgattagtaaatgaaactattattattgttattattactaatggtagatgagaagatatttttgtagataatgaagtcaatatcagaaagatttagtagtggacagattcagtaggctgcaaaattataaggtcagacttccaattctaaaatgacttccttagcctagtccaggtggagggtggtgctggttaagtttaaacacagtattaccttgtgagaagtgttccaagtttttaattgtctacttccaggtgtactacacatctaatagaactaccacactcctctctgccttataaacctttgcctaccaacaatacaagctcagattccttccctgagtgtagtgggtacttacagaatggtcggtccaggttcctttagtagaacctgctaccacgtgcatatctacatacaccctttgtccttgtgttactgtggaagctgctttgtcaactcagtctgttcctcagccacagatttgttttctttccttgggaccccaggacaaatgccatgatgatactgttgcaggagccagcagtcagctgcttaaggttgtctcttctgtccacatctttgtgccattctttggctagcaatgtaggtgccagtcagggtcatcctatgaaatatcacattccttgcctgtaaactgtggtagtggggaggcctggcctactcactgcacaagaccgtctttaggacaaaataggctactatggatgaaagggccacatcaggggtgtccagtcttttggcttctctgggccaca

SEQ ID NO: 1830 - DNA, 2930 bp, Homo sapiens
ccgagccttcagagtgaggcattattttctcctctctcttgtcagatactgactcccacgcaggaaaaaggaagcaccttttgtcagatgctgtggccacttcctcttcagaaggctccagccaacctttcggtttgcagaatgacggggcccgccgcggtgccggactgcctgtgcacggggccaccgactgcagcctgggttttattcttggcctggccctgaccgggagctggcccctcggctgcttctctggctcgggggggactttctctggctcagatccggacccctgaactggacctggttgtcgtccccccgcttctcagccccctctggggttcctctgtcctctccgcccactctttgctcactgccccatgtccctcggtcagtcggcctgtctgttcctctctatagctcggtcaaggagtgtgatgactggcgagcagatggctgccttccatccatcgtccacccccaacccgctggagaggcccatcaagatgggctggctgaagaagcagaggtccatcgtgaagaactggcagcagaggtactttgtgctgagggcgcagcagctctactactacaaggatgaagaggacacgaagccccagggctgcatgtatctaccaggatgtacaatcaaggagatcgccacaaacccagaagaagctgggaagtttgtctttgaaatcattccagcctcatgggaccagaatcgcatgggacaggactcctatgtcctcatggccagctctcaggcggagatggaggagtgggttaaattcctcaggagagttgctggcacaccctgtggagtgtttggccagcgcttggatgagactgtggcctatgaacagaaattcggcccccatctggtgcccatcctggtggagaaatgtgcagagttcatcctggagcacggccggaatgaagagggcatcttccgtctgcctgggcaggacaacctggtgaagcagctgagagacgcttttgatgctggggagcggccctcctttgacagagacacagatgtgcacactgtggcttccctgttaaagctctacctccgagacctcccagagcccgtggttccctggagccagtacgaagggttcctgctctgtgggcagctcacgaatgcggatgaggcaaaggctcagcaggagttgatgaagcagctctccatccttcctcgtgacaactatagtctcctgagctacatctgcaggttcctacatgaaatacagctgaactgtgctgttaacaagatgagtgtggacaacctggctactgtgattggtgtgaatctcatcaggtcgaaggtcgaagaccctgccgtgatcatgagagggactcctcagatccaaagagtgatgactatgatgatcagagaccatgaagtcctcttccccaagtccaaggatatacccctgtcaccccctgcccagaaaaatgaccccaagaaagctccagtggcccgaagctctgtaggctgggatgccactgaagacctccgaatttctaggacagacagcttcagtagcatgacaagcgactctgatacaaccagccccaccggacagcagccgagcgatgcgtttccggaggacagcagcaaagtacccagggaaaagccaggagactggaaaatgcaatctcgtaaaaggactcaaacactccctaaccggaaatgtttcttgacatcagcttttcagggtgccaacagcagcaaaatggagatctttaaaaatgaattctggtcgccttcctcagaggctaaggcaggggaagggcacaggagaacgatgtctcaagacttgcgccaactttctgactcccaacggacttccacctacgataacgtcccttccctgccagggtcccctggggaggaagccagtgcactctcttcccaagcctgtgactccaagggagatactcttgccagtccaaactctgaaactgggcctggaaaaaagaactctggagaagaggaaattgattctttgcagaggatggtccaagagctacgaaaggaaatagaaacacagaagcaaatgtatgaggaacagattaaaaaccttgagaaggaaaattatgacgtttgggctaaagtggtgaggctcaatgaagaactggagaaggaaaagaagaagtctgcagccctagagatcagcctccgcaacatggagcgctcccgggaggatgttgagaagaggaacaaggccttggaagaagaagtcaaggaatttgtcaaatccatgaaggaacccaagaccgaggcttaagggtcccaggagtactgcagggacagccccagagaggcccaactctggcccctttctcagtgctatctgatgacggggaaacaaaattattctctgagagggaaaggacatttgagggaaacatcaaatttccccataaataaatgaatggagtttgcaggaaggtgagggtgagcagagatgtgtgtggacatctctgaccatccatcgctgtattcaaatggattgttctattccattctggtctcaggcatgaccacgtccagtgaagacatttgaggcagcacatctcaggacccaggcaatagactggccccaactcaggctggactaaggtgtgattaattctttgttttttgtgtggaacagctcaccttgtcagacagcctcagggcatctctgagacacaggggcagaaaatgacattcatcttttgagtcctcatccatggagtgctgtgtttggggggctgcatctgctgaagcgagaaccccattctgccaccccaccaggatgcccattctccaggacttctccaacttactattagactaaaccagaacaagcaacaaactgtatttatgcaagcaaaattgatgagaaaattatattcaaataaagcaaaaattaaaa

SEQ ID NO: 1831 - protein, 634 aa, Homo sapiens
MSLGQSACLFLSIARSRSVMTGEQMAAFHPSSTPNPLERPIKMGWLKKQRSIVKNWQQRYFVLRAQQLYYYKDEEDTKPQGCMYLPGCTIKEIATNPEEAGKFVFEIIPASWDQNRMGQDSYVLMASSQAEMEEWVKFLRRVAGTPCGVFGQRLDETVAYEQKFGPHLVPILVEKCAEFIHGRNEEGIFRLPGQDNLVKQLRDAFDAGERPSFDRDTDVHTVASLLKLYLRDLPEPVVPWSQYEGFLLCGQLTNADEAKAQQELMKQLSILPRDNYSLLSYICRFLHEIQLNCAVNKMSVDNLATVIGVNLIRSKVEDPAVIMRGTPQIQRVMTMMIRDHEVLFPKSKDIPLSPPAQKNDPKKAPVARSSVGWDATEDLRISRTDSFSSMTSDSDTTSPTGQQPSDAFPEDSSKVPREKPGDWKMQSRKRTQTLPNRKCFLTSAFQGANSSKMEIFKNEFWSPSSEAKAGEGHRRTMSQDLRQLSDSQRTSTYDNVPSLPGSPGEEASALSSQACDSKGDTLDNSETGPGKKNSGEEEIDSLQRMVQELRKEIETQKQMYEEQIKNLEKENYDVWAKVVRLNEELEKEKKKSAALEISLRNMERSREDVEKRNKALEEEVKEFVKSMKEPKTEA

SEQ ID NO: 1832 - DNA, 2933 bp, Homo sapiens
ccgagccttcagagtgaggcattattttctcctctctcttgtcagatactgactcccacgcaggaaaaaggaagcaccttttgtcagatgctgtggccacttcctcttcagaaggctccagccaacctttcggtttgcagaatgacggggcccgccgcggtgccggactgcctgtgcacggggccaccgactgcagcctgggttttattcttggcctggccctgaccgggagctggcccctcggctgcttctctggctcgggggggactttctctggctcagatccggacccctgaactggacctggttgtcgtccccccgcttctcagccccctctggggttcctctgtcctctccgcccactctttgctcactgccccatgtccctcggtcagtcggcctgtctgttcctctctatagctcggtcaaggagtgtgatgactggcgagcagatggctgccttccatccatcgtccacccccaacccgctggagaggcccatcaagatgggctggctgaagaagcagaggtccatcgtgaagaactggcagcagaggtactttgtgctgagggcgcagcagctctactactacaaggatgaagaggacacgaagccccagggctgcatgtatctaccaggatgtacaatcaaggagatcgccacaaacccagaagaagctgggaagtttgtctttgaaatcattccagcctcatgggaccagaatcgcatgggacaggactcctatgtcctcatggccagctctcaggcggagatggaggagtgggttaaattcctcaggagagttgctggcacaccctgtggagcagtgtttggccagcgcttggatgagactgtggcctatgaacagaaattcggcccccatctggtgcccatcctggtggagaaatgtgcagagttcatcctggagcacggccggaatgaagagggcatcttccgtctgcctgggcaggacaacctggtgaagcagctgagagacgcttttgatgctggggagcggccctcctttgacagagacacagatgtgcacactgtggcttccctgttaaagctctacctccgagacctcccagagcccgtggttccctggagccagtacgaagggttcctgctctgtgggcagctcacgaatgcggatgaggcaaaggctcagcaggagttgatgaagcagctctccatccttcctcgtgacaactatagtctcctgagctacatctgcaggttcctacatgaaatacagctgaactgtgctgttaacaagatgagtgtggacaacctggctactgtgattggtgtgaatctcatcaggtcgaaggtcgaagaccctgccgtgatcatgagagggactcctcagatccaaagagtgatgactatgatgatcagagaccatgaagtcctcttccccaagtccaaggatatacccctgtcaccccctgcccagaaaaatgaccccaagaaagctccagtggcccgaagctctgtaggctgggatgccactgaagacctccgaatttctaggacagacagcttcagtagcatgacaagcgactctgatacaaccagccccaccggacagcagccgagcgatgcgtttccggaggacagcagcaaagtacccagggaaaagccaggagactggaaaatgcaatctcgtaaaaggactcaaacactccctaaccggaaatgtttcttgacatcagcttttcagggtgccaacagcagcaaaatggagatctttaaaaatgaattctggtcgccttcctcagaggctaaggcaggggaagggcacaggagaacgatgtctcaagacttgcgccaactttctgactcccaacggacttccacctacgataacgtcccttccctgccagggtcccctggggaggaagccagtgcactctcttcccaagcctgtgactccaagggagatactcttgccagtccaaactctgaaactgggcctggaaaaaagaactctggagaagaggaaattgattctttgcagaggatggtccaagagctacgaaaggaaatagaaacacagaagcaaatgtatgaggaacagattaaaaaccttgagaaggaaaattatgacgtttgggctaaagtggtgaggctcaatgaagaactggagaaggaaaagaagaagtctgcagccctagagatcagcctccgcaacatggagcgctcccgggaggatgttgagaagaggaacaaggccttggaagaagaagtcaaggaatttgtcaaatccatgaaggaacccaagaccgaggcttaagggtcccaggagtactgcagggacagccccagagaggcccaactctggcccctttctcagtgctatctgatgacggggaaacaaaattattctctgagagggaaaggacatttgagggaaacatcaaatttccccataaataaatgaatggagtttgcaggaaggtgagggtgagcagagatgtgtgtggacatctctgaccatccatcgctgtattcaaatggattgttctattccattctggtctcaggcatgaccacgtccagtgaagacatttgaggcagcacatctcaggacccaggcaatagactggccccaactcaggctggactaaggtgtgattaattctttgttttttgtgtggaacagctcaccttgtcagacagcctcagggcatctctgagacacaggggcagaaaatgacattcatcttttgagtcctcatccatggagtgctgtgtttggggggctgcatctgctgaagcgagaaccccattctgccaccccaccaggatgcccattctccaggacttctccaacttactattagactaaaccagaacaagcaacaaactgtatttatgcaagcaaaattgatgagaaaattatattcaaataaagcaaaaattaaaa

SEQ ID NO: 1833 - protein, 635 aa, Homo sapiens
MSLGQSACLFLSIARSRSVMTGEQMAAFHPSSTPNPLERPIKMGWLKKQRSIVKNWQQRYFVLRAQQLYYYKDEEDTKPQGCMYLPGCTIKEIATNPEEAGKFVFEIIPASWDQNRMGQDSYVLMASSQAEMEEWVKFLRRVAGTPCGAVFGQRLDETVAYEQKFGPHLVPILVEKCAEFIHGRNEEGIFRLPGQDNLVKQLRDAFDAGERPSFDRDTDVHTVASLLKLYLRDLPEPVVPWSQYEGFLLCGQLTNADEAKAQQELMKQLSILPRDNYSLLSYICRFLHEIQLNCAVNKMSVDNLATVIGVNLIRSKVEDPAVIMRGTPQIQRVMTMMIRDHEVLFPKSKDIPLSPPAQKNDPKKAPVARSSVGWDATEDLRISRTDSFSSMTSDSDTTSPTGQQPSDAFPEDSSKVPREKPGDWKMQSRKRTQTLPNRKCFLTSAFQGANSSKMEIFKNEFWSPSSEAKAGEGHRRTMSQDLRQLSDSQRTSTYDNVPSLPGSPGEEASALSSQACDSKGDTLDNSETGPGKKNSGEEEIDSLQRMVQELRKEIETQKQMYEEQIKNLEKENYDVWAKVVRLNEELEKEKKKSAALEISLRNMERSREDVEKRNKALEEEVKEFVKSMKEPKTEA

SEQ ID NO: 1834 - DNA, 3118 bp, Homo sapiens
ttctcacatctccagctgcgtgctgggagaaccactgctctcttcaaagctgtcagacagggacatttaagtctgcagcggttactgctgtctttttgtttgtctgtgccctgcccccagaggcggagcctacagaggcaagcaggcctccttgagctgtggtgggctccacccagttcgagcttcccggctgctttgtttacctaagctagcctgggcaatggcgggcgcccctcccccagcttctctgcggccttgcagtttgatctcagactgctgtgctagcaatcagcgagactccgcgggcgtaggaccctccgagccagtgagatgaacccggtacctcagatggaaatgcagaaatcacccatcttctgcgtcgctcacgctggtagctgtagaccggagctgttcctattcggccatcttggctcctcctcaatttttgtatatagtgaaagataagcaccagcctaggagctctcaaagttgttccagctaaaggacacactcagcttttggtctacagtgacttccagcctaagtggctctggacactgctggaaccccccgctccatctccctccataaatatgtctctgcagcagctcggtcaaggagtgtgatgactggcgagcagatggctgccttccatccatcgtccacccccaacccgctggagaggcccatcaagatgggctggctgaagaagcagaggtccatcgtgaagaactggcagcagaggtactttgtgctgagggcgcagcagctctactactacaaggatgaagaggacacgaagccccagggctgcatgtatctaccaggatgtacaatcaaggagatcgccacaaacccagaagaagctgggaagtttgtctttgaaatcattccagcctcatgggaccagaatcgcatgggacaggactcctatgtcctcatggccagctctcaggcggagatggaggagtgggttaaattcctcaggagagttgctggcacaccctgtggagtgtttggccagcgcttggatgagactgtggcctatgaacagaaattcggcccccatctggtgcccatcctggtggagaaatgtgcagagttcatcctggagcacggccggaatgaagagggcatcttccgtctgcctgggcaggacaacctggtgaagcagctgagagacgcttttgatgctggggagcggccctcctttgacagagacacagatgtgcacactgtggcttccctgttaaagctctacctccgagacctcccagagcccgtggttccctggagccagtacgaagggttcctgctctgtgggcagctcacgaatgcggatgaggcaaaggctcagcaggagttgatgaagcagctctccatccttcctcgtgacaactatagtctcctgagctacatctgcaggttcctacatgaaatacagctgaactgtgctgttaacaagatgagtgtggacaacctggctactgtgattggtgtgaatctcatcaggtcgaaggtcgaagaccctgccgtgatcatgagagggactcctcagatccaaagagtgatgactatgatgatcagagaccatgaagtcctcttccccaagtccaaggatatacccctgtcaccccctgcccagaaaaatgaccccaagaaagctccagtggcccgaagctctgtaggctgggatgccactgaagacctccgaatttctaggacagacagcttcagtagcatgacaagcgactctgatacaaccagccccaccggacagcagccgagcgatgcgtttccggaggacagcagcaaagtacccagggaaaagccaggagactggaaaatgcaatctcgtaaaaggactcaaacactccctaaccggaaatgtttcttgacatcagcttttcagggtgccaacagcagcaaaatggagatctttaaaaatgaattctggtcgccttcctcagaggctaaggcaggggaagggcacaggagaacgatgtctcaagacttgcgccaactttctgactcccaacggacttccacctacgataacgtcccttccctgccagggtcccctggggaggaagccagtgcactctcttcccaagcctgtgactccaagggagatactcttgccagtccaaactctgaaactgggcctggaaaaaagaactctggagaagaggaaattgattctttgcagaggatggtccaagagctacgaaaggaaatagaaacacagaagcaaatgtatgaggaacagattaaaaaccttgagaaggaaaattatgacgtttgggctaaagtggtgaggctcaatgaagaactggagaaggaaaagaagaagtctgcagccctagagatcagcctccgcaacatggagcgctcccgggaggatgttgagaagaggaacaaggccttggaagaagaagtcaaggaatttgtcaaatccatgaaggaacccaagaccgaggcttaagggtcccaggagtactgcagggacagccccagagaggcccaactctggcccctttctcagtgctatctgatgacggggaaacaaaattattctctgagagggaaaggacatttgagggaaacatcaaatttccccataaataaatgaatggagtttgcaggaaggtgagggtgagcagagatgtgtgtggacatctctgaccatccatcgctgtattcaaatggattgttctattccattctggtctcaggcatgaccacgtccagtgaagacatttgaggcagcacatctcaggacccaggcaatagactggccccaactcaggctggactaaggtgtgattaattctttgttttttgtgtggaacagctcaccttgtcagacagcctcagggcatctctgagacacaggggcagaaaatgacattcatcttttgagtcctcatccatggagtgctgtgtttggggggctgcatctgctgaagcgagaaccccattctgccaccccaccaggatgcccattctccaggacttctccaacttactattagactaaaccagaacaagcaacaaactgtatttatgcaagcaaaattgatgagaaaattatattcaaataaagcaaaaattaaaa

SEQ ID NO: 1835 - protein, 615 aa, Homo sapiens
MTGEQMAAFHPSSTPNPLERPIKMGWLKKQRSIVKNWQQRYFVLRAQQLYYYKDEEDTKPQGCMYLPGCTIKEIATNPEEAGKFVFEIIPASWDQNRMGQDSYVLMASSQAEMEEWVKFLRRVAGTPCGVFGQRLDETVAYEQKFGPHLVPILVEKCAEFIHGRNEEGIFRLPGQDNLVKQLRDAFDAGERPSFDRDTDVHTVASLLKLYLRDLPEPVVPWSQYEGFLLCGQLTNADEAKAQQELMKQLSILPRDNYSLLSYICRFLHEIQLNCAVNKMSVDNLATVIGVNLIRSKVEDPAVIMRGTPQIQRVMTMMIRDHEVLFPKSKDIPLSPPAQKNDPKKAPVARSSVGWDATEDLRISRTDSFSSMTSDSDTTSPTGQQPSDAFPEDSSKVPREKPGDWKMQSRKRTQTLPNRKCFLTSAFQGANSSKMEIFKNEFWSPSSEAKAGEGHRRTMSQDLRQLSDSQRTSTYDNVPSLPGSPGEEASALSSQACDSKGDTLDNSETGPGKKNSGEEEIDSLQRMVQELRKEIETQKQMYEEQIKNLEKENYDVWAKVVRLNEELEKEKKKSAALEISLRNMERSREDVEKRNKALEEEVKEFVKSMKEPKTEA

SEQ ID NO: 1836 - DNA, 230470 bp, Mus musculus
  misc_feature (1)...(230470): n = A, C, G or T/U
aagatgtcatctcaaactaagttcaagaaagacaaagagatcattgctgaatatgaagcccaaataaaaggtgagtggtggggccgagggactttgccttctctccgtccccttgtctctccctctgctgtctcttccttcgcctccctgccttcttgagaagttgctatgcagcaataatcttattgtaaggaggaaggaccgggtgctggctgcacaagtccagactggctcccactgcagatagtgcctgggctgggagcgtgaattacagaaagggcagaaatctctgcattgcaggtgtgtgaggaagggactttaggagtgtcgccggtactccatcatcttggcagtgatatgtcactctaaggccattttgacagtcaaggcctcctccccctcactcccatcgagaaagccctttgctatttatgtatatattttttgatctgctctccccatcccttcttttggcttttgtgggtggttgtttttgcctctgctgccttctctgggctgaaattcaaatgcatgagtatgggctgcggggggtgggggtggnnnnnnnnnnnnnnnnnnnnnnnnnnnnnnnnngggggtggggggggtgcatcgcatccttaagtagcccttctttgtcagcatttcttgcctggtctgagttgccatggattaactgttatgggacatattgatccagactaatgcaggcatttaagcataaagagagagttctgtgccgaaaatgtattatcttccagcgtgcagcctggtccttctgtacaccggtgtttcgggtcatcagctttggttaaaagccaacacctcagtgtacgatttggactggtaggtgccgcttggctcccgtggttctgggaaagtctgcctgctaggagagtgagatgccctttgggtgctggttccagctttggtagcatagaacccatacttcttgcagaagctgctccctaaatccttgctagctgagaggaagagaagggccccagttgcacagctaaaagaaggcaagcagcctctgccctcgagccagacggtgggcttcctgcaccctcgggctgtctaagcacagcttcagcaaggagagctgaaggttccctgccctgcttctcctttgcggagcctgtgggggagagaagcagctggggctctgagcacccattttctttccagtccttggttctccttgctgcgacgcagggcgtgttgtggtctcacacggagtgggcacactgcatcttcagtgggtgtggagaggcctggtttggaggctgttgagcagggtgctgctttgaggttctggtgaccagaggatgccacgcctgtttctgtgctgcctgagggctccacaccgcaggaaatcagtagcctcaggctgtctgtctgtcctgtctgtgttgctttcaaccttctgatttgggggggggaagctttggagaacaggcatggggtgggggtaggggctttgtgttttccttgtctttggttgtgggcccagccaggatgttaaccgtccctgggtagatcccagggattaaagaagagagatctctcctattccctgggcctcctccttagttttcagctcagtgtcagaaacagtgacttaaatgtatcagccttgctgtcaattgagaaacaagccctttagctgtcagagactgggattcatcctgccggtcagaacaaaaaccaattttcaattttgtatatttactttttagggagtgaatttacacacacacacacacacacacacacacacacacacatattatatatatatatatatatatatatatatatatatatatatatatatcacatattacatatgtgtttgtatgtgtgtgtgtgttgagattatcttgactactttaaaaaaattgatattcccataaaaaaatgttctgacagacaagagaatgagatattgggacagtgtgtgtgtcttggtaagaactctgcttatctcctctttaaaaggcttgcaccaggcagccaaccttcccttaggccccacaaagcatcacttttcctttcatctctcacctttaacttaacgactgactagcacgtacaaggcggcaatggcaagggatttatttcttcaggaaattcgcccaaaagatttggtctcttctagcttctggatgtctttacactctggttgagtttgtttgtttgtttgtttgtttatttatttatttattttcacttgcagtaggcatccataaaggagatcacaggactgttgcacccaaggccctttgaaatctctcctcccaaagtgttatttgttggcctggcctggcatgtagctcagtggtagagcacttgcctggcgtgctccaggccctggcttccatccacagccttgcctgttaattactctggtaaggattgatgtatccaggcacctcctgtttctgggactctgttcttggcccacatggtgtacaaaaggcttactatgagcccaggttcagagataaggaactgaggcctggcagtgttcaatgacttacccaaggtcgcaaggccggtatcttcccaggcctggtgtccccggtacattgtctggctgacacagccccttgaaggattgatgtcagtagcagatggcagtgttgtgccgggctctggtggcctcttgatggcgtcccattgttcctttcttactttcttccctcggcctttgtggcttgtctctgaggaatgtttgatccatgagcaaaaataatgctttgtgccagttaccatcttcctggcgtttggccaggttggtgcaaacagtctacttcatcagacagatctcatagagggaaacttctgatttttttgaaatgatgttgagtttacctgacttaacaaaggatggatactttcgaatagcatttccactgtagacatgcttacagtcaagccttctcctgcctcctagatccctgcatctgactgtctacctgtgctccagggatggaagcctcagcatcctcttggctaacagactatgtttcactagctgtggctcatggatttttttttttcttagacggtatcacctaatggttctataggtttttcttcttggagacttcttagaataggacagacacgtctctgtgactgcccactccttgggggttgggagcctcccgttgtgcccctgactgtacttcaccttagttgcgtcggtaacaagagccaccactgtttgctatcttcattgtttcacttgtgtatttgggagctgtatgtgtgagggtctcacggagcccaggatagccttgtactgccttgccaagggtgaatttgaactcctgaccctcttgcctgcacccacctcctgagtactgggtttacagcaaaaccatgctggggattgaacccagggcttcctgcatggtaagtgatccactctaccaaccagtgaagctacagcccagtccttccttcaccttagccctgccacttcctggattgcaaatcccagtgtgttgggtgtttgtaggatagaaggaagatgattcgtggcagatggtacaccttactgacagcagtagaaggggtagtgacagttatgatagacctgagggcacacatcctgtccaaatgcacagtcatacctgagtgcaagtatttgttgccacttctaagcctggccacgttttcaatcttcccgcaggtgccagaaacttgcaagggagcttcgtgtttttaaagaggttttccaaaaggatgccccaaagatttcactctccatactttgtcaatatggtggaagaaaaataacagctgtcccccttttatgctgcctataatacttctacccgtataccccaggagttaccttagcccttggctctgttcactgcttatgccacgcatgtccgctgtgcatctctgatctcccaggctaggggtcgggatggatttgagctggctcattctcagttccctgacacgggctccaaacagacatcacttcctatcttaggtgctcctaagtgtccctttacaatctgttcaagaaccttgcttgagagtgacatgacagtctctagccagaaactggcaggctgtcacccattcccattttgaaaatcagaacatttgccagtctccagtttcttggcatccccactgtcctccacagtaccctcggagatcactgatagcatttggggatcttatctgctgagttctctgagctctaagtgctctcgctgccggacataatggtcacgttcattcaccgtgttcctgtttccatttcagcccaacagagaattgaaacaggagtgtggtgattgactttaggaacattcatatttatcgcagaccaactttttaatagtaaaagtgaaaaaaacaaaaacaaaaaatgggtgtcttagtcgaagttttactgctgtgaacagacaccatgaccaaggcaagtcttataaaggacaacatttaattggggctggcttacaggttcagaggttcagtccattatcatcaaggcaaaagcatggcagcatccagccaggcatggtgcaggcagagctgagagttctacatcttcatctgaaggctgttagtagaagattgacttctagacaactagggtaacgttctcaaagcccacgcccacagtgacacacctactccaacaaggccacacctaatagtgccactccctggcccaagcatatacaaaccatcacaatgggggaaagaagaattagcatgcaggtatggagaataagcattcagaaatatacattactcggttgttcacatactcattcaaccaacatcggcatcgaccttgtcctcaagccttgtgtggcgtttcgtgagagataaaaaagtataggataccttatttaccttctaagacctcccttagaaaatgacagtcacataaaaaagagattaagaaaacccacaatacaactttgcaactgtcagaatgagctcaagtcttgcagagggcttcttccatgtgccgtggagagcctccttaggttctccaagcatttcaacaggataaaagaagggaagcatgctggatgaggagaactgtctggagtggtgggggctgtggccaacagggcagctttagaggcacaagtgctgtcattgcctggctgggatgtgagccctgggcgggcaattctcccactgttgggagaaaggctgaactgaaacaaaatctcttggttgtttaaatgatggcccaacttttaaaaattctaccctctctaaccaaacacgtgggtgaaatagggccgaggcagcccatttggccaccagctcacaacccgtgacctttacgttgaagtctgtacaaatcctgggagtggagcctcagccaccttctttaactttgacattttttctaagaaagacctgctgccttaccgctatagtagaagtctcctcttccccctgcccaaatgctccacacacctcctctaccaccaactgttccctgtccatgcctttgctctccttccaatgtctctccaatctgtttgttcaaccgccatttacccttcaaaggctgcccggatggttttcctcttcacatgatgcttggcagaacgaacagttccttccctctgcctctctaccctaaacatgactactcttcatcaaaatctagagatcagaccctcatccatgaactcccaagggcgaaacagcacagagccatctgtgtttcttcgggctgagagtggttgaaaagtgccacctcccttagcctggagcaagacgcacgggctgcatggcttttaccactttctcccagttcaggaggctggaaattccaagatcaaggtgccagcaaattaagtttctggtgagagaccgcttcctgacttgtagacagctccatcctattgtctgctcatctggcttttcttcagagcatgctcacagagatcaagtatgcaacatctagagcaacccacaggcctatacctcatctctcagtaccattatattgtgggtggggtgggctcacatatgcgttttggaggatacaaacacttggtcaagaatatcatacttcctgttctatcgagaggaggtgctttactgggcaaagaaatcctcttggtttgctgcacttcctgctttgtctccagtgtctgttggcagagatttggtaagggatgtgttgggagctagtagttcttgcctaagtcttgatggggtgtggctttccttccagccgccccatcaatagatctaaggatccaattgttcatttcttgagggttttttctcttccattaattcctttagtcatccactgggtaggtactgttactggccatgctttggtctatatagctttagtttgtggaggaaggcaattgcatcttcctcttgttttgtgacccctctacctcttcaagagacccaccagttctctagttgaagagatgaagtttagagaaataaaatcaattgcatcggactcctcagggaaccctggcaaagctaggttcaaaaaagaatccactttccaatttccactggcaggggaagataagatgctgatgggggcaacatggcttgttgggtgaaagaaaatagttgtgtgttccaataggtcttggaaattctaagataaaccagaggaaattggcttgtttcccctcagggctcctgacacccttggcagtgttgggggtgagcttcagagtctggttggtctccccaaactttgtcctccctgaaagcctctttccctaactggtttgggagattcttccttggttcatggtttgaaacatgtcagcctgtacaactcatgaattatccgagtcttcttgttgtctgttaccccattcccagtgtcctccagtgcttttcccaggaggcagcctgaagaggggccgagggaaacaaatgcatgcctggctctgctaagtagtgtcagcgcggtgctttgtggtcacttgcaacacgtgagctttggcattttcaactgcagagtgctcagctactgattgaaatggcaatttggaagcagctgtgtcctgatcagcacgtgctgcctgtagtctgtgtgtgggtgtgtttgtctgtgtgtgacagtgcagtgtgtatgacggcaagggatgctccgggtgccttgaatggattttgtactgcccctggaattctgtggtctgtgctcagtgacaacggtgcagataaaaactggggagcccatgactcccgcagctctgaaaaagtcaaccttggccacaactcagagtaccctctcgtttctttcttctgtcccttggtttctatgtcatgtctctgttttgctggatggtgacagagatacatctgggccaatctggggcctctctactgatttctctaggatcatggcccaagatccagagcgatgtggaccataggttataatgtactgtcagtccaagtttgtcaactacagagctaggatgtcatctcactgagtcttattgaagcatgctagtaatcattctttgtcctttggatgcctctttcctcatttcttgtatgtaatatgtagagatggaggggcatcatgtcattcacatgcatacggagtctgggcaattatccttggtccatcttgggtgtccctgtgagcctcgaactctactccaacaaaggttctgtctcttttcagctcacatgaatctgtttgctaactactatacctttcttcccttgtggtgggtggaacagagaacaaaactttttcttatagatccatgacttctacattcacattattttaccaactctcatctctggcataggaagtgtttatctgcatacttgtacatgcatgtctatatgcatgggtgtagatggcataaaaggagagggaaggtaataatatcctcacgctgagagctcaggctgtctttttaaaaggtgtgtgtgtgtgtgtgtgtgtgtgtgtgtgtatctgcatgtgtgagtgaaggtgcctaaggactccagaagagggcatcagatcccctgcagtttgagttataggcagctgtgagcctcctgatattagtgttgggaactacttggctcctgtgcaagagtaattgctcttaacctcttagtcttgaggccatgtacgttcacttttcttggagttttgtttgttttattttaagcagggactcatgtattccaggccttgtcgaacccagggccttttgtatggtaggcaaacactgtactaacttagccacatctctggccaatccacatcccttctcttcttcccaaggtctaaacatttgaaagaccaaagaccagaattgactctttctccatattatccctgagccaatagaaaatgcaatgtgctctgtattgaaaagggacaggagtgtccttaggaaatgtgtaggaaaccttacctttgactatttctgcatgtggagactttctttccttcttcatctgtatggccaaagtatgacattgatcagctcttggtgggatcgatgtgaccttggtctttcttggttgagagaatgtagttgcataatgtgaactctgcctgctaaatagcagtgaccaacctgccccaatttgtgacaaccaagcatttcttcagatactaccaaatgactcccaggaggcagactcgtccacattgacagccataattctaattggtctccctctattcttttgtcctcatggcctgtcccccaaccccagggcatctagcagatgtccttacagtgaagtctgatattctctgtttaaagtccctccggagtgtctgctggagtctctcatcaagagccctagactggatttacaaagccatggtcttccctcgcctgtcttctctctccagtctttacttcctggtctgttgatctctgctgacttgtcagcatctccaatttcccccctttccaatgctctactgaatagccacttgcttggctctttggtactcaacttaactctctggctacctgatacctccaagagccgtacagtagcccttcatctgtcaactgaccggagttctctagaactcgggctacctggtgatttccctcctgtgtttatctattctcttctctagagctaacactccaagaaaaattctgaaggctgcctgtagtggctcacacttgtatttccagcttcaaaagcctgagtcagggggatggcaaattggaggcaagacaaaacaaaaaaatcagaacttctgtgtctcttgtttgagtttttctggcatgcagagcttctcctggtgtctaatgggtgcccacagtaggcgaacttctcgggtgctcacagtaggcgagcttgtttgaatgtgatggacttggtgattgcacagatgttgtccccagaataaaacagatccaggcttccatcagcataactgagaaaggatgaagggtctggagatgggactcttgcatccatggtggttactgctaggattgttgcaggaaccgaattcagtctattagctgacttcctaatacatgtgggatgggaagatggaaagtgtccctcaagccccttttccacactcatagttttctaggaagatggttataaaaatggactaagcagtgatatagactgtgataagagtgttggggccttgtactgtggaaattcaggtaaaaagttgagttgttgccttggagaactggagaacttattataggagcaagatgtttttgggtaggttttttgaagggtcatagaaactctctggatagtggaaagcatttcattaaaaagaataaaatggacacaaggcttagaggtcaccaaggggcctggtacttgggaaacactgaaccgtttgacatgtggaaacggaaatctatgctggagagactgacgcccttttcaaccagcaggtcccatgagtctttgaccatggacagggtgcgatgaaagatgggctcagctcgttttccttagcgtggaaacacatatctatgttgtagcgtttgtcagaattttcttagtataaaatttttatttgaaaattataagttacatgtatgtatgtatctatctatctatgtatgaatgaatgaatgtatgtatatatgtgccatgtgtgcaagtggaggtcagagcacgagagtgagtccattctctccttccattgtgtgggttcttggtggcaagcacctttacctgctgaggtgtgtctcggaccctgactgctcctacttaaaatggctggtttaccattgcatcatacgggcagaagacattttatcgacctgtttgtcagtggacactggagttgttctgtgttttggatactctaaataatgctgatacaaacaaactgaccacaaaagtcacaatttttaaagtaagttcatttttgactatgcatgttttacacattcattgtttcaaaagctttggaaataaaaatatagagagaaggagaaaagtctagaagccactcttgaggtaactgctgcaagcactcagtgcacttctttccagaccccacatgcctgtcctctacgaaatctgttttatatctgtatgtagccaaaagagagatcacagctcagggatacaggcctagggcttaacacagagcagggcttaacagtacccagtcgcccagggccctgtatgttcgaagagactgttgaaggattgtggtgcatggcttgtcttgaccatttctgatccagctctttgcagattttaaaaacaaaatgtatataactgagggttctcattaagaactgcttccacctaataggggttgcagacccctttagctcattgggtactttctctagctcctccattgggggccctgtgatccatccaatagctgactgtgagcatccacttcggtgtttgctaggccccggcatagcctcacaagagacagctatatcagggtcctttcagcaaaatcttgctggtgtatgcaatggtatcagcgtttggaagctgattatgggatggatccctgggtatggcagtctctagatggtccatcctttcatctcagctccaaactttgtctctgtaactccttccacaggtgttttgttcccaattctaagaaggcgcaaagtgtccacactctaaccagtactcctggagcttgtgtttctagctgcatgtgtatcagaagatgacctagtcagccatcattgcgaagagaggccccttggtcttgcaaactttatatgcctcagtacggggcaatgccagggccaagaaatgggagtgggtgggtaggggagttgggggtgggagggtctgggggacttttgggatagcatttgaaatgtaaatgaagaaagtacctaattaaaaaattataaaaaaacaaaaacaaacaaacaaacaaacaagaactgcttccaaacccacaaccattcccgaccctttcactttgaaggtcctccttcctagttcctgttcctctcatccccctcctggtccccagtagacaactccttgtaggtaagtttgtgtgggcatttccttgattaatggttgatgtggttggtggtcttgggagacaaaagaaagcaagctggcaagacagtgagcagccctcctccaccgcatgcctctgccttagtctctggcttcaggttcctgtctttagttcctactaggatggagtctaagctataaactgaaatgaatcctttcgttcacaagttgcttttggtcatgatgtttatcacagcaagagaaagcaataagaggttgcaacctagtatcctcttcctccccactgttgatggcagtatttccagtctatggtttattgcaaaccagttcattttccagccatctgtctaattcaaaaagcctagatttttttttccaggtggtcagattctcacatggatatgagcatagcaggatacaatagctcctaaggtggaaaactccctctatagcatagagtggcttcaaaggaatgagagagagagagacagagagagagacagagagagagacagagagagagagacagagagagagacagagagatagagacagagagacagagacagagagagagagagagaaagagagagagagaactttagtttctcttggggacaggtaactgtaggtgtcatttctaggactgagtttctaatgatgagtggcacttagctggatgacatggctgctcttgaaccctcgtgtcatcgggacattttcaggtaggagttagtgttatggcttgaatgtgtcaagtacccccaacaggccatgtctacaagcttgcttggtccctacttggagacgctgttttgaagactgtggagccttgcagaaggtcaggtccagttggtggaagcagttgctaggggcagacctttgaaggttaggtctgcctctggtacaggctactctgtctgcttcctgtctaccatgagaataactgccacccacattcttgctggcctgtcttcctggctacgatggactgaaatctctcagtcaaaacgaaccctctttctatcagggttaggtgttttggtcagaggtgcagccattaatactgttggccaactgcattgtctttgctttgatgagtgggttttaaaaagaaacggcttgtttgtttgtttgtttgtttgtttatttaatgcgagtacatggtcactctcttcagacacaccagaagagggcattgaatcccattacagatggttgtgagccaccaagtgattgctgggagttgaacgcaggacctctggaagagcaattgaacttggcttctttagacaggatgtttcagctttctcatgatgtgtttccttgggggaaactgaggcaggaaacagtcccgggccccaagtatctgataaagggttgcttgttcgccctcaccatccttgaactctcacgtggcctttgctccttaccctgctctggggttctgcccttgcctggcccctagttcaggccttacgctgagcatctctgtgtctttggctcctacttggcatactatcaccactcaaactctgcttcataagtggcggagatctgagtactgagtactgagacacagaactgtgctactggggttagtgtgagagaaatgctgagactgtagtggcccacctcagttgatttagtttaacaagtatttattgagtgcctgctgggtttgctgtgtttgtagactttatcattctatggggaatacaccttgtaacttgtaattactaaagtgctgaatgttatataaggggctgtgcagaatacagggagaacccataacagacagatctaaatggttggaagtgctcctggcgattttctgatattgatctgtaaggctggatcagactggccaagcttatatatcatagccattatttccagagctctttaggacccagacagaatcattcttccatttaaacagggtcagacatcatccaaatatttaagggatcagcaggtatattaagtgctgctaaggggagaaaacacaactgcaggtgtgaatgatcagaagagttcctgaaagaggacaatggactagatgttctcaggacagtgaatacagtcacacaataggtgtttctagggcgaagttaaagtgtggattaaccagagagatgaaaagcaccgaggctgtgtatagaatcaggcaaaagtcacactagatgcacgagggatttgaatggggaaggagggggggtgttaacaatgcaggcaccgtgcactgcacagatgtgaatcatagctcgtgcatggccagtcagatcgaggataagctcatcagacgaaaggcattaggttttctttgctctgttctttttgttctttttgagaaagggtcacactacctcacagtgtgtgtgtgtgtgtgtgtgtgtgtgtgtgtgtgttaaaatgacacgtcagaatttctagcacaatccttggcacacaatggcatttgaaaaaaaaacgtgaaaatattaactaaaccaagtgggatgccatcatttaccacctggggctgtgaacctgagcttccagagaaggagattaaaaactatcacaggttcccagcaggactgctggcgaagagagttctaagcggtggacagcatactgtttgctttgccttctcctgcaaagtctctggaacaactgggaggcgcatgtgacaaattcaggtctgaattcttgccctacagcacactggaacctcgggtggtgggtcacagaaacttgcatctcaaacttcccaggttgcttagtctggaacagaacagccgaactctgcataccgagttggggtggtcatgcccatttgtctgtcttcacactggcaggtggaggcttttactatggtgccttttcaggagcctgggcaccactgggaaccaaactgcagcctcagccttggtttgagccttgcggcccttggccatgtagccacatatctccttcccaagcttggggtggtgagagcggcaaattgttggaccctgtgattgtgatcctttggtatctgggactgagcctccttaggcttccctggggccctgatggcctcttcttggcattcagtgccttcacgttgtttgctagcatgttcttcaggcccttctcgtgcttctgggcaaaatgcatattccttgggaacttgggtcctccaccttaacagttcataactgttgtatagaggtttcttggtgccattttggggactggttgtgtgcagtgtggttcttgcacttgaccaagtctgcatggtagcctttagctcctaaagtgcctggggcggaaaggcgcctcccaccccttgctgggactggaactcagagcttcacagatcctgctctaccactgagctacaccctcagccctgggtgctttttgaaaataggaatgtaataattaaatagactattaagttatgaggaaggaaaaacacctgtagcatgtatattactaataattctgttaaaaataaaaagtatgtctgtctagttgggtgtgtatgtaaaggacctgatgactcttcctgattgataggaggcgtatcctggtgactaggcatggggggagccggacatgatatcagtgacaggacatagtaggaaaggggatttgaaaagaaaccttcatagtcttcaattttggtggacttccaaaagggcatatcattttttaaaacagaagcttcacagaataaggactttaatatctatttgtaacctattacttatttattatgaaccacaggggattaaacctaggagtgagtgcatgctaaatgtgggctctaacatcgagttcctctcccaggatcaagacattgagtgaaaaaactgcccaaaagaaagctcagccttcatgtgaactgtgaagggaaagaaaggacggtctgccagagttattatcatcttactgagtgcttcgttatatactgtaaaaacgaaggcagagattaatcgtatttctctgttatttccccacatagtgagaatattccctcccttccatacactttttcagaattctataagatagatataggaatggaaagcccacaccagatcttttaactctggtttaagacagggactatgtaagtgctgtgagccagagccagggactagcagtctattcctggtctgtctttcggacgagccacatctccgttctccatcgggcacctctggctgtgaacaaaggcctgtctgccctacatcgtagttgttgtgaggctcagatgatgtggttgtgagaagtgaactctacagaagagtacacgatgctcattgtttctggttttttttttgtttttttttttttgttttttttttttttgttttttttttggtctggttcctccccgggacacgttgctgctacactggccttgtttatgtgtctgtctccccgtgagctcactgaacacaggagcctggctttattcattcttgaatccttgtatctagagctgccacacaggaggcattcaaaataaggtctggactagctatcaaaggcaaataaaataaaactctaaaggaagcacaaagaattctgtgcaatcctatgaaatgttaagattgttttctagaaaacataaccttgtatttctttaaaaggatttaaaagatcagtctgagtcctcagcagaaatgacattgcagggaccgaagaaggaacttcaggatggaaaatgtaattggccagttttgttaggagatagtgacgctctccctctctaaccaatcatatgcctgtgcagtttccaggaaggagagagcagatgagaagagctcgtgaaaggcagatcctggtccctccggagaaagatctcccaagagacaggaatgccccccaccacacttcccagtttcaatctttgtctgtcagagggctggacaaagccttcccagggctcctcagacaaaagccctcctcggcctttcactccagactttggtggtaaaaacatgtctcccacaagtgggccaaattccatttgcctgacaaagttggaagccttgtctgtggcctagtgaggggctctattgtcttcaagaccctgatgattgttgtcctgaagggcaattgggccactagagcaaattcagtggagtccctggggtaggtctgctgttaggaaagaggctcaagctcggtttggaaacactcatcttcattcttgtgacaccacaaacctgcagtttttcttatctctcccttaccagttgcttaagccccattagacaggttcacaattgcttagacacatgctgattattatcttttagttttttgagacagggtttctctgtgtagcctggctatcctggacctctctctgtagatcaggctagtcttaagccccaggtatgcaccaccactgtctggcagtgcagattcttggatgcattatacttcacctaagtgaagcctctagtagcctgccaaagagctttgtgttgcttgggattttaattggatgcttgggtaaggatgtgagcatgcctatctagtgtgagtggcaagatgccaacgaaggcaggcttggcaccgaggctcagtgtcttgataaactcataataagttaaacaatatggtaagttaaaccaaccaacattgcagccatgacccgcctactttaaatgtgttctgaacacctacggcggcctacagttggtcaaaattatctagcacaaagcctgtgttgtaacagaatgcttagtgcctcatagaatttactgaatgctggtatgtagaagtctctgcattgcagaatgttggttttctctagtgataacagggagccatgactttgcgccactgccaagcattgaaaaacagtattgccatacgacacatcactagccttgagaaagatcaaaattcaaaattacacgtaggacttcctgctgagtttcagttgtattcataccatggtaacaaatcatcccagtccggggcatgattgctgatagtgacgtgaagacagttggctgtgggccagatctgctagtttctaactgtgtgacttggggagtcttgccaccccttggatcctccatatcctcatctcttagatgaagacaataatctgtctagatgaaatgatgtaatgcataaaatctctagcgcagtgctctgcacacagtaaggacctaaatgatgtgatctggtttttattaataatcacaaaaatgcaggctctgcagtctaagagatctggactcaagttccaattctaccatttattaattatgggaaagtttgtcctctctgtgttcagtttcttgctttgaagaggcacagagatgcagatacacggggatatagctgtagaacaccaggccagaacagacatatggtagatgctcaatacactgtatcgtcgttcagaagacatttacagacgagggcgacccatagctaactcagtgaatagctttctgtgactttcattatgaccttaatctggggaggagcgactagatttggccttgaggtcactggagttcagcaccctctgccccctctgctccaacctcactgatcttttactgccctgaacatttcacagcttagtctagaaccagctcaggctgagccctcaggaagaaatagacagagaaccagttgaggtctggtctgcatctctagcctgtagggcacctgccttgaagccagcagatgggtcatgtagcccttaaagataaaacagtgcctcttggacgtctctgtctctcttcatggtcttaaaattgtgtatgatccactaggataatggttctcaacctgtaggtcaaggttcctttgggggtcgaacaacccattcacaggggtcacctgggaccatcagaaaacacaggtatttatgttactattcataacagtagcaaaattacagttaggaagtagcaacaaaataattttatggttgtaggtcagcataacatggggagccgtattaaagggtcacagcaccagggaggttgagacccactgtgctaggagaaaaaaaaaaaaaagaacagataccatctccaccccactcctgcctcagacttacaccaagcactgggcaagagatggtctgtgggccaatgacttgttttgttgaagaacagaggtgtcaacttcatatacatgttgcacgtccctgaccctttcagattggtgaccagataccaccagttcacaggacgctgtcattggccaggggcctttcagccccctgtattagttatggtttcattgctttgacagaagcagcttaaggaggagctgactttgactcatggttatgagttcatcatggtgagcctggggctgcccatggtcaagacacccatggagagctcagtgccagggatcaggtctagccctccatttcaccagccccagcaatagacaggtgctgaccacagttagcgtgggtcttccctcctcagttaagtcctttggaaatgcccacatatactcttcagtgtgtttccatggttacccccattgagtctcgctgccaatcaagattagccatctcagtgcgcacaatcccttctaccgcacctgctgcttcatccatttgctcaagctgcctagtttctctaggcttctggatttctacttctgcatctgcctaagttgttctattttattttctgtctcaaacggggctctccaggttggcttgcatgacaagcatagcatgccagtgtagcacacacttcaatgtcttttgtaaggaaatgcctctaagttgctgtcatctttgaaaatttcacaatggaaatgccgtcattattgtcacatgtaaagaacaaagtgttagtcaacaacagaccacatatgtaaccctgtcccatgcaacaccaactggagggtacactctgatgtttgtacagtgagattgtccagtgggtgttcatttctccacatgtctcctcctcaccaatagcataccattggatttatctttgaggatgagtttgaagctggagtcaagggcaggatagtgttggtcaaggactgttagccaacgatttatcattgaggaggtttggggatgtacctgaagctgctggaggtcactgaggacctaaagatatggtggatagtgtccttaatcataatatagttttatttgtgtgtgtgtgtgggggggggagcttgagcttgagatagatatctttaatcactctacctaattttttagacatagtctctcactgaatctagagctcacctttttggttagatgcctatccaataagccctggagtgcctcctgtctttgcttcccctccgggaagattacagctctatgttgccatgcttagcttacagaggtgctgagaagtgaactcatgctttcacgacaagcactatattgactgagctatctttccagctcctgtgatatgtttttgataattaaaattcaacgtaaggtgacaattgcttaccattgaactagaaacagaacaattctgcacagcctggtccaagaactctgcaatggactctcaaatcagagagaccttagactgaatcccagattcgcccattagttctttcttgaccttagtcaagtccattttctctctctctgccttagtgtcttcccccattccatggttacctcagtggacttttgtgaggattagataatacggtccaggttcagttcttatctagtgtctgcagcacaggtcatactagctgagaatactctgttattgttcatacccagattttcagggcttgattggatccaagaatgaaatttagaatagttacagcagccgtggcagattgcaggcaagttagactcaccagcatattttctttggcttcgtagcacttacagaaactgattcacttccaacctttaaaaaccaagagggtttctttaaaaagagagagagagagaagaaaaaaggagcgttcacataaaaatccagacttttggcatttcacacaaagtaagaatatcattcttcgagggaagaatagtggccgtccccttcccaggcactgggaagtgtccactgacctgtctcactccttgctgtctgcttagctctttgggatatctgaggtctttgatcttggaggaatggatcaacctggagtcaacactccataaatatgatctcctgcagagggcttgggagaagtagagagaaggttgtgtttactggcaggggtccaccgtaccatctgtgttatcaattagaagtatcacaaatgcagagcctcgtcctcaagaatctgcagggtggtggcaggggcttggtcctcttaaaatgtgctccgcttgtacctgtgagcaagagggcctcctcattgcagcatgtaggtgggctgaaatttaataaggaaaacgtggaaaagtctctcccttgtgtctgaaaaatccctctggtccagtgcaagccatagagcgtggagcgatgggctcagcgacagtccttgtgcaaaagactcaaggttcgacttgactgtgactttcagtgtgagtcacaaggagcagctgccagcaaacccaatctgatctggggctgtgtttatagaagtctagtgtctgcaagatctttctaacagttagagctgttttgaagagacaggcaggcggcctcagtaagccttgatctctcctgggtaggaggtgtttgaggctcagtgagatgcccctgcccaagattgtcaccgtgggggactgaggcttcagaggggtatttgttctaggtgacatggaaggttgctgttcaaacctgagccgctcagcagaggcaagcctttcctctagcaagcctgcgagtcttgctctcagtgggagaagaagcaggatgagttgaagaggctgactagaagcagctgtgtggccaaaatgggaacacaaacgactgtttctcaccaagtaatttagacaatggcagtcactgtcctctctccacccctacctgacttccggatgcttgtcagtcttcccggagatgcagaggacaggagctgttttatacattactggtaatttttacaaaccggactcctaggcgagctttgagtcagacagcacgtgggccaagtgcagactcagatgttttatttggcctaggctgtgtcttttaaaaatgcgaatttgatgccaacatgtaaaactgagaagatttcacataaaatctggccttccggcacctttgtaaagagtcaggggtctggcagcgctggcctggcactgctgcgtggtagcttcagccagggttgggtgccacatgacttgagctctcgcttggctgtcgttctctacccacttatgtgacccgttgtacctgttggactttacatggtagccactgtacagcatcaggatcagtttggggagtgtgggacccatttagggagccatccttaactgtagtggcttgtctgctcaatggtgtggggagcagggagtccattgaggaggggtgcccgtctagctgctcctgaatcaactcagtggcttctatacaaccaattcctagtgatttcatctcaagataataatcccatgtattcttggagtggctccaaagcactcaatatttattcctagattgacccaactcttcatccttaggacttgtgtgcggtggggctggtctggagatgtgcagaacactggcatcctctttggcaacaaatccctctatccatttgtacatagatggtggtcttccatttagcagggctggcagagtgtccttgctctgagagtctgtagctagtaggggttagggtactaggactagagagccttgatgtagttgctctcaagcagatactgggctgacaggggtgggggtgtatgtggagcttctgcttaaaggctccagatttcacacaaagtactgtgataatgagatgtatatatttggcctttgtctctttcctggcttataacttctaaaatccttggaattttcaaaggattttttgtatgctaataagttatctgatgtctgggtcttttggtaggtctaggctggctgctggatcagaaaggagtcttgcatagacatcttatcccaggccaggttagagggttaagacttttagttccatcctttttaaaccttccagagagaaagaggagtggggttgttcaccaatggccagtgatataatcagcaatgcctacatcatgaggtgtataggacacctgtccccacgtctggtgtctcaagtgcgacatgagaaggagaagaactgagatagggtgtttctgctcaagtgccgccccctctaagagccatccagtctggcttcggagcctgtcttaaagctgccgggatctgggagtggctaaggaagagttggcttgagttgggaagatttggaatctggtggcagcaatcacaggaacttaatccagagcagaagtccagtgggggcgaggcctacctcagtcttgttagtcagcttttctgctccatgatggaaaggactggacttctgtctgtgtctatctctttaatttttagaccaaaattgttcagcttaggattttgaagttcttggggcaccttctaacactgcctggtatagtcagttcttgcagcgttctcaggcttgtcattaaagaagtggtctgattgtttcaaatatagacataggtcaacttatctgactgtccacaggttagctgtgtggtagccattttggattgtgtgtgtgtgtgtgtgtgtgtgtgtgtgtgtgtgtgtgtgtgaatcattatttgagtctgatttctcatttcgcttttcttgacttttaaaaagtttatctatttatttattttatgggcagtttgcacaccacatgcatgcaccacccgtagaagccagaagagggcattggatcctctggaaccagagcaccagatggttgtgagtcgccatctgggcactgggaactcagtcctggccctctacaagggcagccagggcttctaaccactgagccatccctccagccccagcctaacctttgtgttaggagtggagcatccttcttccatgggcatgaagattttgtgaactgcagcagttgtcaggagtaaccaggcacccataagcacttggcatgtggaagatattggggtcttaggggagggatggtacaaatgagcaggtaccaccatccagcctgcttggatagaacttacttagttgtctgggttgcggtggagtggattgtgatctcctctgtgtctaccttcctcctgcttctctctgccccagttcccacaggtctccagatttattagaagaattagctgagggcagtctagagtggataagccctttcgcttgtaaattacatcctaacactaacatcctgcttcttagagttctgaccttttctctctgaccagctcaatcttccctaggcatgtccatgggtctcagtcagaaagtagagacatcttgcgtctaagtgaattttctatgaatcgggttgggtgatacttggtgacaagacccccatctttgctgcagatattatgtggaagggctaaagatatggacttgaccgtgagagtaccaagaggggtctgttgtggggtggttgaggaagctgtcagaagcacctggccccttcggagcggcatagcttatgaaatgattttgcacgaggaaacttctggagcccatttcattcctgggcagcctgaggagctagtcaaacctgggaaagacgtccctgtctgccatccaggcgttccataaaggcacactgatgggatgttctttcatggaaagggatgaaatcacagcacagcctgcctgcaagctaaccctccaccatgcacttttctatgaaggccaaggggcatgtcacaactagcaggtcattggagacaggcagatgactccttgaagcctgtgtctgttctcagaggctgctggtaaacggagatagtctgtctttgaggcaggcaaggcagctgccacatggcctgtggaccgcacagcacatccctctctgtgtgcttgacttcccagcagtatctcagggctactttggtcttgggctgacagatgaggacctccttagactttgggtcactggccctttaagaggtcaccgagtcaagggctctctgatcagatgagtgtaggaaacactctagtgagttttctcttgagagattccttttatttatcccttaatggtgctggcaagtcctagaggataggaagctcaggccagtggagtagctcgggccagtggagtagctcgtgagcaaagctgcttgcttatgtcttggctttgacccctaggacccacatggagggagaacagagttgtcctcaagcctgcctgtctgcacatacacaccacaccacacacacacacacacacacacacacacacacacacacacacacacactctatgcaaatgtataatatatatgtaaaatattaaaaagaaatctacttaattgattgttttctgaacttgctaacttatatactcatttttgtccttattgtatgcctgttagcatcctctagacacacagacttctgaaaagtgccagatagtagatatttgaggttgtgtggaccatatagtcctgcgaaatcatccatagccagtagagaaaatgagtgggtgatgctgtgtacggtaaaactttatttataaaacaagctggggaccgaagctgacttgtgagctgggtttgccatccccacagccattctagaacaaacattctgcagaacactactgcggctctaaatggcagaggcctagacggggactccatgctctgccctcagatccgttggtctgggtggcagtgtctttactggatgaatgtgtcagaggttgagtgcctcgttcagggtacgtgactgcctaatgctgtcacagagatgtctttgggctcatgactatgaatcatatttctttttcattatttgtagctcctttggagcagaagatgggggtggggtgggagttagctgcccacagtgcttgctgcacaacgtcctgatatgtgcataggtgcatgaaggtgttgtatggaagctggcatctgggtgactggtatttgtgttattaagcgtgaaggtgactgatggggaaactacctagttagaggtctttatttcgaagtgcttagtggaagagagcagccggaagactccctggagcttttggaatctcggcctgggcctgtggcaatgaatcaggaatatagtcacccagtgtcctggagttcacagaacacctagtgtgtgcctttgctttagacagaagttagactatctgcagcagaattagcaggagctgttggcagtgcaaggagaatttactccatggctgtgtgctgccctgcgaaatgcagggaataaaatgcagatggccccaggacagcctagcaccaggaactggggtcctagggtttcctgttttgctcccagtaacaggaccatgcttgtcctcattgttttcatctctcctcacatctgcttcattcttctttcttaggaaaacatctggttttatatttaaatcccacaaatggtagacagtgtttgcccactgccgctaagacctccgcttctacctctctttcctgccccctaactttccctctcctctagtgaagggaatctcattggctcagcttaggtaaaccctgatcccattgctataccactgatctgtattaatgacagaagtacatcagccagactcctaccctgatggcgggccaggcagtttagaggaagccccacagagtagatgcaaagtcaagtggaattcttctattgcttccatgtttatagactagtgggaaataaagcaaacacttaggagtaaggacactggtgggtgttctagattgcttcatcagacagcagagatgatggtaatggaggtgaggaactaatttctgaagacattgagtgtactcaagaggttgtgttgaggaacatcattttaaaacacttttatggtttttttattggctatttcctttatttacatttcaaatgttatcccctttgccggtttcccccctcccagaaacaccctatcccattccccccatcccccatgcttctatgacggtgttcccccactcacccacccactcccacctccctgccctcgattcccctacactgggacatctatcgagccttcataggaccaaggacctctcctcccattgatgcctgaaactttcatgtttttaatttcacctttgggttacccatgataatcatgcggtgtggtgtctcagaacatgcatgtagtgtgttgtagttcactaggatacctggccactctaggtgtacctgtcattttaactcgcattcctgtgtgatgagaacattcaacatgtggtcaagcagaggctttagaacaactgctgatgtttagtcctcctgctgtgtagaagaacacaaagacctgtcgcttttatctaactgtgactttaccaatctcctttatcctctatttagtctccctctccagcctctggtaactatgttttctttctctgagaatgatattctcaaattccacaaaagaatgagaacatgccatattcgtctttctttgcctagcgtatttcactcaacaaaatacccaccagatctgtccattttgttgtaaacgacaggcctgcagtatttttttttattgtgatatggttttctaatgtgaatatgaaccacccaattttccttatttccttgtctcttgatgggcaattggaggatttatcttcactggtatgaatggttctggtatgtctttagcactaggagttcacttctttctgatgtcgttgctaaacttctttccctgggagagacttaagcagtgtctacccctcttcctaaggtgcaagtaaaccaaagctcacctgaaggaatgaacgaattcattaggcctcattaccgagcagtgagtgatgagttagagtcagggacacaggtgaccttgaagtagctacactggaagatctgcatcccacaggcatgatggcttcctcagggctgcatagatggagccccattacctcgtccttccatatctatatcctctggctcctgcccaaagaccatgtgcaattagggcagaattgcacacaagtccttgagaggtgtgtttaaatacttacctgagggctccatgagtctctatacctcctccttttatgagggacagtaaacagccaataggcccaatatggtgatcttttgacagaaggcccagcagagctaccaaaaatggtggaagtgtgggtctgaggatagtcctgtacaactgatgtgtgcccaaggaaggctttctgcagcaagtatccatttccaaaggctctgggaaacagagttttgatgagggagattggaagggtaaatctctaattgtacctataagcagactctagacagaaggtttaaattggaagggccattggccagagctaagcattgttaactaactctagaaggcaatgagaaatgcactcaggaaaagcaggcaccatggcaagaggcccactctacagtgatcatgttagcagggtcttctagacagagtgactgctacatgcaagacaaagtccagtctggcagctgcattgcctggccattgggctagggaatttcagggacaagactcagacactggggacaaaaggacatgcattgccatcagagtggtgctaggtggagtttgaaggcatgggaccacagagtaagatagaacacctggaaatgagcagtggacttgggtgggggtagggggcagcagcaggttgacaaggaactgtgaccactgtctttcccctttcttccagccaacttctcttgagaaaaccttcctgttgtcttctcagtggcttaggactccagcccagctaaacgcttagctgatcgtctcaagagtctgtgacggatgtggcttgagatttggtaccaatttagtgacctttgccttggcacagatgcctggaatgccttgacacacaaggacagtgcttggcattttaggatacaaacactaagcccagtgtcaagggcagcatctgtgtccgtgtggagtcagctcttgtttggggatgtagtgatcaagttagatgcctgctgtccgcggtgagggaggcgagccttgcccacgatgcatttaaatcagcagctgttgggggcatggcctcacaatctgggcagcatcttcaatggtgaaagaacagtcaatataggctccattgaggatggttagcttctgggggcttgggggggcatctttgaggtctgtagcttctcatagagacaggcagaaagggtgaaggtcctggagctgtggggttagttcatcccaccccaaccccatctgtaaatgaaaacaacaatccctactacagtaacccactggctggcccctggagtcaggacatctcctgccgaggccatggaggagtgctgcctaccgtccagtaggcacagtacagtacactacactacagcaggctggcttgcttcccatggcttactcagcatgccttcttatagaacccaggatcaccagcccagggatggcatcacccacgacgggcagagccctctctcaccaatcactaactaagaaaatggtcttgtctacagccagatcttatggaggcattttctcatttgaggttccttcctctctgatgaccctagcttgtgtcaaattgacataaaaccagccagtatatgttcccatgagcccctgggagccatttcacattcaaatcattagtgtggcctcttccacctagttcatttctaggttggttgtgaccagtctaactctctggactgtaggctgttactgagcagtgttttctaggaatcgtctcttagagaagggaaccattctgggctctttggtacactgataaacctcttacaggactgacatccctcataacatctgaagtccaagctatgctctgagctactctaaatcccatggaaaccaatgaaatcggcaatgcagtggaacccaggccctaggaacaagctgagaagccacactagcttggcctcctgacccaaaggtgagagccccatagtgttctctcacagatgtgagggtgtatcctgccaccactgggccaactcccctctcttcttctcccaggggcattgacacagtggctggcttgattcatgggaaagaacttcaggtgtgggtgaggagcactcgctgcttcctctgagccaccgtggtcatttcttctccctcccagtctggtctctgtgaccctcttggctatttggcttcaagttgggaagttggtaggaggagggggcatgggtggctctagcacagtgaagtctctttctgtcatgatgaggttgctaatttagaattctcccttttgcattcatgcatgtataactgtccttccttaaacatatgaggtattacccctcagtgctcttcaaggttagctgccctttgaagatctcctatatcagtcacctttccatgtgacaagacagtcaatttaaagatagaaaaagtgaagaaagctgcaaacccagggttggccttggggttaggtcacgggcatttgggcggttctaagtcacccagcagatctgttgtgctgcagaccagatcagtgcacccaggcctctcagagaagtttctttgtgcagtggatagtggttaatacagaaactcacagatggtccaagaagagagaattaaatgtctgtgggatgctcagccacatatgtgacatctgtgtcacactcccttcccaaggctcaggggccataaaggaagagggactggaaagagtgtaaaagccagagggtccggggtacaagatcgaaaccagcggttctcaagctgtggggttacatatgagatatcctgcatagcagacattcacattataattcataacagcagcaaaatcacagctaagaagtcgcaatggaagtaatttatggttgggggtcaccacaccatgaggaactgtatcgaagtgttgcagtgttaggaaggttgagaaccgcagctctaaagagtttcatctggacatgacagggtgtatgcactcacagcagctgtggctgcctgtaaggacctgcacaggtcgggctagtcaacattcttgaatggagcgggaaggggttcacgagccccacctcgaactgaggagctatggatagttgacagtttctggggggtggagaattggattttttttaagggtatggatcttggcaggctggccctgctcctggggctggtccccaccccacacccaggaatatatctatttatacatatacatatatatacacacacaaacacatattacacatatatacatatatgcatatacacacatataatacatatacacatacatatatacatacatatatgcatatatacatacatatgagtagcacaaaagtatgaacttgacgggttattgaatagtagttaaaataatgaaaaataaaaaaattatggaaggtgggagggcggggcagatgtgagagttagggggaggtgttgagggtgatgaaaatgataaaaagacactgtatgaaaatttcaaagaatcaataaatatgtaaaaaaggagaaaaggattattttggttcacagacttgggttggtttgcgttcctggccttttcgacctgtgacaaagtagcagatcatggcagggacatttaatagaccaagctgttcccctcaaggcaggactaaatgccccatgatctcctggcttcctgggcctcttaaaggcagcatggcctcccaattgcatgaagctgggcaacaagcctttaacacacgggactctggggacactccaggtccacactgtggtaccccatctcctgttttagagaaactgaaattttattgaacagtaaaacctggcttgaaatccacagttttgttcccagtaagggccacgagaatgctatacgcctcctgcaaaggcctccaagaagcactcttggggccagtgagatggctcagtggagacaggtgtttgccaccaaacccgatgaccagagttcaatccttgggacccacatggtgaaagaaaaccagttttggcacattgtcccctggctgccacacacatgcatgtcactcatacacaaataaataaagatgttagatgttaaaaaaaaaagcaacaaacttgaattttgacgtgattctgaggtacaccacagggccatggtaacttttgttatatcagatttctttcagtttgatttattttgggggcagcaatgtcttcatttggtcctagatctgggatattgtttaagaaatctggattttcatttgggagaattgtataacaattgccagccttatcaaaatctttatagtggtaaaatacacagaacataaaatttaccatcttcacccttttccatgttttatgtcggtattaaatacatgcataacattggccagccacgatcaccatctccacggctgttagagctcacaacattgaaaccctacccccatcaaagtgtagttctttgccttccccactgcccagatctctgtgagtctgatgattccagacacagctcaggagtagaatcattggggagctggtctcttgtaactggtgggtctcacttggtagttcttccagattcacctctctggtagtgtgtgttgaaattccttcctcgacaaggctgaatactactccattgcgtggaaataccacacttcgagtgtccatttgtgtgtcagtaagtgctcgagtcactctcccaggtaggctcttgtgaacaaccaggtggccttgtcagtggctttgacgagtgtctggcttctctgtaccttcatttagttatccatcagatcagaaagcatgcttttcccaggatggttgctaggatggttgtggagtgtcagacctccattgggttctgcttgttagcgtcatatacccagaatgcactcagatattgcacatcaggcttctgctccaaatgttcagctttgccagcctgtggcatgggaagcaggtgggagaggattctgagaagccatagagaaatgaggagggagttggcattgattgcatagagactctggggcagtgtgagccttcactttgggtgaatggagatatttggtatccttgcttctctctggccattgtcacagcttcacacataccccatacagtcttattctcttggggcttgggctggcccagcagaagctgtctgtttctgtggttggaggcagtaagtagatatggcaaggaaaagaaaagcttgctgagaacagatacttctaaaacagtggttctcaacacatggattgagacctcctctgaggtcacatattagctatccagtgtgatggtttgtatatgcttgggctaggaagtggcactatttggagaagcgtggccttgttggagtaggtgtggcactgtgggtctggattcaataccctagtcctagctgcctggaagtgagtcttcttttagaggcttgcagatgatgttgtagatctctcagcttctcctgcatcatgtctgcctggatgctgctatgttcctgccttgctgataatggactgaaccttggaacttaatgttccaagcaccaattaaatgttgtccttataagagttgccttggtcatggtgtctgttcacagcagtaaaaccctaactaagacattcagcatatcagatatttatattatgattcataaaaccatagcaaaattacagttatagagtagtgatgaaataattttatggttggggatcaccgcatcacgaggaactgtattaaagggtcccagcattaggaaggttgagaactgcgctctaaaacatatctattagttggtgttcaggccacttgagtgagggtgttggacaatgttttctgggtagaccgaacaagtagacacacattctaggaaggattcacttgaggaatgtgaaagtagaggcagaaaaatcccaagctaggctgtgtgcaagctggagaagttgccagtaagactcaatgcaagcctgaaggacccaaaagcagacaaaactttgtgaggtaattctcagtccaagacctgagatcccaggagaatgctgcccagccaagcagctctgacacttgctttgcacgcaagtctgggttttctgtctcaggacccagagttttttcctttggttgactgctaacatctgaccatatttcctcttcatctagcaaaacctccctaacactgagaaacagtagtgtcttacagaattgtgttcatttccaaagcaaaaggaaacacgcaacgttgagaccagtttggtaattaccaaacccataaataagtccctctgccgggcatgcagagattgtatctctatttcataggcgcttgtggaatcccctgattccagagaaggccagagaactcagggcagaggctgaagagacttagaaatggactgtgtctcttgccacaaggggcagaaaaaaaaagctgtggctaaggagagatcattgtaggaaacttgccacatactgtaagaggattgggtttctcatccttcactccgcaagttcttgacacacacatgcacatgtgtacacacacacacacacacacacacacacacacacacacacacacacacacacacgcacgcacgcgcgcgcacgccatgtttaaaactgttcccttagtcctggttcaaagaaaaggagaatctaatatttctgaagggatgaactggagatctgggtggttgggaggcagactcactccctttctatttctaatgttgtgtatgttttcagtgctatcttgtgtgcctattttgcatctaaaccaacaatcaaaataaagagacctggagcaaggggacaggttggcatttccagctccagcttccctattagatttcatcttttccaatcctaacccaggaggagggaggcagcctctcttctttggtctcagggaaatctaagctactgtgcctttaaaccctggagccacccaccttctccatagtcctcttgtgacccatgagacccagagaaaggaacagatttttcctaagtcagtgacaaacaggggggttggatgcaggtcttactgtgtgtgtgtgtgtgtgtgtgtgtgtgtgtgtgtgtgtgtgtgtgtgtgtgtggtctcccaccacatccagctcctctctgttcagccctgactagattacggagagacggccattgaggttttgaatagagaggcgacatgatcagattccggctttgggaggattccgtctaggatgtagatacaggtaggttgctggtaggtgagtgggtgagacagaccagtcagcagttgttggaggggacagaagagcagagaggcaatgttctcagtgtatctggatgtggaacctatagaagggtttttgtttgagaaacacagtgtcccgaggtgaaggacgatggtcctcattttccttctgccccccttgatttttctcttggggtatgtgtggggagctgataaattgagcagaggtggactctatgtttcctttcagaggcatagaaattggggcttttggattttaatcatccattggcaggtctctattgactgtaaggatctctcttcaggactttgggcttttatttctggccaacctttcctgtagacaaactgagccagaagtctgacaaggagagtgggcctttccaatgacctcaaagtgaagctgtggcataacacaggactggtgttggctgtgcaggctatcctttatgcaagggcaccaggttggaaagtgagtctccaacctccccgagatgcatcttggcctggcatgcagttgcatgaccacagacaggggagtgtctttctattgccctcaaggcccctttgagcgaacacccaccctggaatttctgccgtgtagactggttctctaggatgctcttgcgttcacctttcctcttccagcccatcaacatttattttagaagatgtttatcaggtgtctgctattcactagacactgggctcatgtcagtaaaaagcaaaaaacaaacaaaacaaaacccaaaccatatttcttgcccttatggacttgtagacaaatggagatcgatctatctctctttagtaccgatggtgatcttccagggagggtaatctgggctgatctcagcccctgttccctgagatgaggtggtgccatcttatgctggagcatctcttgggattggggcacaatggccactacctgtatgtccttgtctagaccttaaggggaatgagatcactgtggctttatagaccgttgtaggctcctttattacccctgcctggaagaagaaaagcaatgcattgtaaaggagcaggatttgtctttgtgactcaggagtctttataaaaatatcacatagagtatatctcctctcctgcatgtctgtttatacttcaataagaagttagaactacaacaacagaacaaacaagcaaaaacaaaacaaaacaaaacaaaaaacaaacaaaaaaaaaaccccatagcttaaatttgcagaccttccagagtctgagctcagagaaatccagagaaatggcttgcccatatccatcaggacttcttgatgtcctgtatcttggctgggaataatcagattattttaccagtctttgaagactctgcaagctgtttctttgtaaaccatattatcccaagatggtatgtacaggttctaaggcagtggttctcaacctgtgggtcgtgacccctttggaggatgttgaatgaccctttcatgagggttgcttaagaccatcggaaatacagataatgatattatgattcataacagtagcaaaattacagttatgaagtaacaacaaaaatcattatatggttgggttaccacaacacgaggatattaaagggttgtggcattatgaaggttgaggacaactgccctaagggcttgctcattctccttagcttcaaggtggctgggaagcagaattagtcatacttttcctggggatcttgggatgagcgaaagacagagctgggtggttgggtggtttttttttccaggctgtggtggagcctgaagaattaaggattccatacagcttgtgaccagatgtgctatctttagctgagaccaggcactattagagcagtcagttttcagcaacccctttttatttagctatctactgcagtgtgtgtgtgtctctctctctctgtgtgtgtgtgtatctgtgtatgtctgtgtgtgtctctctctgtgtgtctctgtgtgtgtctgtgtgtgttcaaatttagccctgtgtacatgctaagaataatgcaatagctctgagctgcacttccagcacctgggtgttcatttttagatcatacacctaatactcttctcacaacgttttattgacaaaatgctccaacatacagcttataaataaatcagctgagcctgatgaatcaggtgcgcaatcccagctatctgtgaggccatgcttgggctggagagtaagttcaaggccagcttggtagccctttcaaacaaacaaacaaaaaggccaaaagaaggcagggtcatagctcagctgtagaatgcttgcctggcacgcctggggctctaggttcaattcccagcatgcaaaacacaacaagaaacataaaataaggactagtccgagaccataaagagggtaaaatggaagtgagtcgtgcgggcacatgctagtgatcacagtgcaaaggaagtgagacaagtgggttgtaggtttgacctcagttttagaaagcaaggatgggggagaggaggctatgaaggaagacaggaagagaggagtacagcgctggctcagcattaagaatgcttgttgctctatcagaggacccaagttcagttcccaacaccagccttgggtggcccacaattgtctataactccagctctagggcatctcatgccctgttctggctccagaggcactgagtgcactcatgaatatggacacatgtaaacataaagaacaaacaaatgtgcctttaaaaataggacagaatgataaaataaatgaaggcaggaagtgaccagttggcccatgccctatcctcttagagggcatcagtgccaccactgtccagtagactcttccgggattgctctccaagtgtgtaccaatgtatcttgccattgctttaaaaagacttaacaatttatctggaattcttagcacatggaaatttatcgagctcccttcctgttttatttttaaaaacaggttaattgaggttttacaaaccatgccccataaaatgcacttgttttaagtctatagccctttgactttctagttttgttttgtttgagacagggtctctcactgtagctcaggctgtcttcagattcctagtgatccccctgccttagccccctgggattataggtgtgagcagttcactgatgcttttggtaaaattccagaactgtgcagctaacaccatagtgtaagaatattgtatgttccctaaaatatcccttgagctcatctgcagtcacctcgagttacctctttctagtcagtcagaaatctctttgctgcctccgtaggctgactccgtgcgggcctcacacatagagaaatgataacatatctgttcttttccgtgtagtttttttcccctgagcataatgtttttgaagtccactcaagattaacctatgttacagcacatgtaagtttttcactggtgaataacattccaatttagggtctgccttattttatttattatctgtgcacttgtgtggggacatctggagtgtttccagcctggctctgttagagtgattctgctacaagcagttgcttacttatctctaggtggacatatatttcagcgtgcatgagtgtctgggggagagagagtgtatcttaacgatcatatcttcagacaaaacccactgatggctctttactcgatagcatacattgtgctattttggacaaatatgtttgcatctattgaatagtggttttgaaggcttttatagatcaacagatagaaagctttgaaattccagtagcaatttgtataagacaaattgctgctacccctggcacaattatgactgtccacagacttgtccagtgtggcgctgggaagaaggtttgaagcttcccagcctcgtaggtgacagtcttggtggcacctgcacccctctcatcctctggcaggcactgttccttcattttccatggggcttgtttagcctttgttttgcttttgaaagaaaagatgtgttctaagaagttggttctaaccttagaggacccactgtacgattccaactttagtctacagcatatccacctccaagcctgttcaccatagttacgctgtgcagatattctgctggacatctttaaagtcctcagttccatcaggaaaagaaccctggtcatatcttacagtatcatttagcaatgtgcagtatccccaggggagccgagaaggtgaaagaatgatgaggagaaagctgaggaatgctgtatggctgcaaccaacacgcatctgggtgacagggacacctttgccaacttttttttctttccccttttatttgctttggtgtcacataaacacagtggaatcagagaatggtatctgtgtatttgttgcctccctgctccttgctggtaacagcactgacagtcaactgaaggcacactgtgtgctatttgaaggcatactgtgtgccgtttgttcagcttatcctcaaggtggctgtgggcaaggtacacttaccttctcacagaacagatataagtaccttgctgtaagctttacagtaaacattgagctgaaactttgggtcagatttgcccaacagcacacctgttttcccatcatcctccttgccaaaaagcattgggtgaactgccaatattctccaacatcagggcttaggagaaggtccaatatcctcaggaaggttctgcagtgagaaggttggcttgagcctgactggcagatctctggtttctagtcttagccctgcctcctctctccgtgagattgtagcatagttgtctgtggtcacaggagaagagatagatagttagatagatagacagacagatagatagataatcttatctgttgaccggataaaacctgggcttgccttggagacaggcctctggacatgcatgtgggagatcatcttgattgggttaacagagggaagacaacctacccactgtgagtggaaccattccctgtgcttagactccagactttctttttataaagaaagtgagcggaggaccagcactcccctctctctgcttcttgactgccctgtgactagctgcctctacatcctgctgctgtgacttccccaccatggtggactgtaacctggaattgccagaagtagccctttctccttggggtgttttatcatagcaacatgaagagttagtcagacagagaggatgcttccctaatctctttctagggcatgcccctcttggtcctgttccactcagtctgattgcttaaagacttcattgcctctggtatctcattcccggggaccaagccagagcccatgagtgatgttcaagacctaaactctaatattccttcaaggctgaagattttccttgggtcttgggacactgctgtctgcccactgaggaaaatgtcctcgtagatgaaaacagaagaatgaatgcattccttctccccagcctggaccaactgtgcagtgccaccccagcacctggcatcccttgggagcctaccgaggcctcactgggactgttccatagtcagtctgggcacatgtaaacacttatctgtgtatagacacacacagggggacctgtagaaatggaggtcctgcatttgccacaacacaaaaggacccaggaacatcatgttgagtgaaatgagatagatacagaaagaaaaaaaatatataaataaaagtatatgaaataaaagaatgaaaaatacaaagaaagagcctacaaatcacttgtgaaattctttaaaagccagcggtacaaaagtagagactgagacaccggtgaccaggaagtgggtaggtgtggtcatcaggcagagaacagaaaataagagacgtgaagggcagacgaggctgaggtgggcagggtaattagcaggagggggcccaataaggagctccccaccaaaaaggaattctattaagaattttggttaaatgaataaattttagctgctcttatcacaaaaaaagcaaatattcaagtgacagggatgttaatttgcctcatgatagtaaactcttaactatagatttatcccaccacagcctcttgcagagctcaaatatagataatacatcttcttctgaaaaagctgcatttagcctccgagcggtggtggcgcacacctttaatcccagcacttgggaggcagaggcaggcagatttctgagttcgaggccagcctggtctacaaagtgagttccaggacagccagggctacacagagaaaccctgtctcgaaaacaaaacaaaacaaaacaaaacaaaacaaaacaaaacaaaacaaaacaaaacaagctgcacttcacagaagcagcagctcaatgccaagtgctgcaaactcctgcctagaaccgagcccagcgccacagataaggacccaggcagacgccacttggtgaatgagaggaagtcctagttggtatccctgggcttagttagaaggaagtcagcgtttgagccaaagttatatgaaacagtaacaaacatgaaaaatgaggggtttagattattggaagggaacttggagttggctcggtcagagtcctctgtctccctgtctctgggtctgagattttatctggtaaaacgggtctgatggtacctaacgcagacgccttgaggacagattaccagcttgtcctggtctacctggaacttacccagttcctgtacccaannnnnnnnnnnnnnnnnnnnnnnnnnnnnnnnnnnnnnnnnnnnnnnnnnnnnnnnnnnnnnnnnnnnnnnnnnnnnnnnnnnnnnnnnnnnnnnnnnnnnnnnnnnttaattggatattttctttatttacatttcaaattttatcccctttcccggtttccctcccttccagaaaccccctatcacatcctccctccccctgcttctatgagggtgttccaccccccacccacccacccacccactcccacctccctgccctcgattcccttacactgggacatccattgagccttcataggaccaaggacttctcccattgatgcatgacaaggctatcctctgctacatatgcagctggagccatgtgtactcctttgttgatggcttagtccctgggagttttggggagctctggttggttgatattgttgttcttcctgtggggttccaagctccttcagttctttctctaactccatgctcagtgcaatggttggctgcgaacattcacctctgtatttgtaaggccctggcagggcctctcaggagacagccatataaggatccttttagcatgctggaaagattccctgcttcttgaagataacttttagcagggggaggaagagggtcatgaagtggggaagcaaggcatcctgtattgtcaagcaatggtaggtgttgtggtgtgagcttgtaatcccattgttggggggcgggggtggtggtggtggcagaggcaggtggatctctgaggttcactggccaactagcctagcctagtatcagcaagctccaggccagtgggagattctgtctcaaaaagcaaggtggactgtgtctgaggtatgacactggaggctgacctctggcttatatgtgcgagggcgcgcacacacacacacacacacacacacacacacacatgcacacagtgaggaacacttgtatacacacagcggggaatgtaaaatgttttattaataatactctatacttattacagatgtaggtaataacagtttgaatattcagggtaaagagaacatagcattagcatgagtctcacctcctcttctttgtgactactggagcatctgaactgaaatgatatgtagggctctgtgtattgattggattgtctggagagctccatacacatcttcggatgagagtcagccacactccggatgttccttccccactctggggtctgaaaggagagtcttttccagctgttcagtcccacacgtcgtttgcactgctaagtccctacatcctacatggggatcaatatttatggctggtggaagcttaaacaagtcacaaataggccaggcaaggctacgtctgaagcttgtaccgcacaactcttggctgcctgcacaaagggaggttcccagcatccccactctgctgggatttgtgagttagcttccctgggacaatagatttcttcatttcaaagcctcactcctatggctgctgaggctgggggcggggaggaccagcctttcccagctttaggtctctgtgtatcactaattgtattatcacagtttctttaggggaataaaaaaaatcacgcatttgattagcacttaaaaaaaagaaccttagcgaggttaaatctgcttggtaccgcatttgggtgtagaattgtctcctacccccaacccccattgggcagaagagagaaaattttgtattttgaagctggaaaagggcttttgtgtgctctccctcccccccccccccgttttatctcctgactgatagggtattcagggagtggagacagccagtgttcaacacagaaacagagataagttcagagccgaagacaccagatgaccaaacacatctagttaaaacccaggcatgatgggaggtgtgcgtttataaattgggggggaaaagagagctcctcccctcccccagtgctgtggaggctgcctattaatgctcaactcagagccctgcctgtgaaagccccaggattttgtgcctctagctttttcattacgctttctgcctcttccagatttgttgaatatcacaggaccctgttggctggaattttgactcatgaagtcttcggacttgaggtttaagtggctttcaaattccagttctcccatttgtttcctgcaccactcacgcatcttgatctgcaaatgaggcagtcacaaaaacaggagagggccaggtggtagtggggacaaactttgtctcatccacttctctgggatttggtgggaggtggggaagggaagggaaggaaaccctgtgcatatctggctgcattcgaatatgctctttgcatctttatctgcaggaaggagtacaaggttgccatgaaaatcaaaaagagtcttgagctgtggaaaccatttgcaaagggctgtctattccagggttctctaacttcattatttaataaaccctttaaaaacacacacacacacacacacacacacacacacacacacacacacacgtctctcggtgtgatgtgtatgcatgtttgtgtatgtgggtacatatgctcatatgtgtgtcctggcagctcacagcaaccaaggctgacatcaagacatttcctcaatcaccctccaccatgcttactgaggtctctcaattgaacccagagcttgtcaatatgagtagtcgagttagccagcttgctctctagatccatcgtttctgtcttgagtgccagaatatcatgcctccctatccaccaggcatgtacatgggttctcagggtctggattctagtccttatgcctgtgagtcaaggactttgtctgcccgccgagccttctctccagaccctccagatatctttgaagtaccagcatgtgtcaggctctgagcttggcacagagggacaccaagtgcgcagccacattccctcctgaagctccgtggcaaaaatcaggttgttaaaatgtagcgagcaagagctatggcgagctatgggccggcactgcaggaatgcaaaatgaagtttatctgctctaggttttgggctgctgagggctcctgggaggcagtcatggctgggctggagtgcaaggttttagtaaatggtaaatgaatgatataatttaagttgctgtgagctgccaggataagcattccagcactcagtgatcaatttatagctaagaaactggttcagacaggtaaagtaaatgtcctagcatgtatgtggcacaattagtattacagtccagttcagtgcttagactaacattcccgagcctgggactataggtggttattttggttatagggggagacatgggtaaaaagaacttgggctctggaaccctccaatttaatgaagacattatctttgttgtaccgagttctctgagaaccagtctgtgagttggagacatgtggaaaagtccactgcagatgtctctcataatgaaaatctgcacaaaaaagaaggaggcaagcctggacaagggaagaagctggactctgatagttccctggaagttctctgataattccctcactgaattcccaggggcagctgagacgggtatggctgtcagagttgatctgcaggaatagatgtggctcagctctgtaccttccagtcaacatgtctccagaaaggtgccctttctgcccaggacagcaatactctggagaaaggctcagctgagagccatcgagtattctccaccatggaagcataatactcctgtcctgagtggggatgagctctcaccagaaaaatcagcagaggccaggttgtgaggggccacgtgcatggcctgtaggctccatggcaatctgggcccagtgttaccttgagatgttcttggaaatgatgtttccaggggttagggacagctgggttagaatgcaggaggaggcatatgggtgaggtacaaggagactagagtttggggtactggggagagcctcgctccagaagagaggtcattattagggcctaatcctgctagagcagggaagactagagaaacattatcctgggactaccccaagggccttttgggctccccagaattgggggtcttggagggagataaatgcttggcaccagaaattctggtgtctatactggctgatgccttcgtaggggactgagccttcaagtggctccgctgtggggacagggaaggctgagactagcaataaggtgggagccgccaccagtctcttgtcaagaaagtttgcagggttctcatctcaaccgcctcaggggtgaactgatttggctgcagcggctaaccatggctgtttccatggatacatttcaagcctccgtctggccatcttgaaaagcatcaaaagcattgagccccatccatgcataatcttttgtcagagtcccacaaatagcttttgttgtgcctgttccgcccacccttcccacccatcctccaaaaccaaagacagtggctttggtggcacaaacaccagggaaggaagccagctgctttttctggaagttggaagatctgagtttgaaaccctgctctgtcatttatagaaggcaagtagcaatctctaggacatagacttgggaagataaaaggacagattcttttggaaatagcctatttcattgtctggtccatgggaaattcaagacatgactttgtcaggtgggtcacttaaggagtcactttgccccaacatcacccctcattgtcattttgtctcctcgagtgtcacatgaacttgatatggaataagggcttgcttcatagaaaacatcatgttctgtgagatgtctcctgaccatggtcttggcagctcccaaccttggaaggagtcagagagcttagaaagcaaatggaattgttctctttctgtttctgctcaaggccaggccttttctgggagcttacagagatacccaggggtggggaagtctttgcctctggagtctgttccagcagatggctctgctgtagctctgcttaggaggttaatgaacagcagatgtcttagtgggcaagctttcattttctcctacaactgcttcatttggttgaacatctgtcttggcttcgaggttttactgtcacctgagcatcaacatgggctccatcatctgtaggctcagaggagcccacaccaccctttgtgtgctcagaatcttgggggggtctgtcagcctgtcgggggtggtctgtgaggggtagagtcagcggttgaaagagggcaagaatggggcacagttggcttctgtcagtgtccttcctgctgctctgatgttatcgagccttcttgttagaaatttcattttcagacatcaaaaatggtgtgtgccagattagggaatctatccatctggacaagcattggctgtctatcaagggaagagggtgggggtcttggaagttggcttaaagggggcaccaccaggctcacattgaacctacttcatggcctgctctgtattttgccaaatcacctatatagcctgtgagctcaggctacaggcttggcccgggctgcattagggaagtaccacaccgttactggtattgatgggtttcaaacttcagcatgtgtgacgttgaccctagtatgctgttgtttgctggacctcacatgatattcagctagttcagagttgaatcttggggcacggggcatttcttcatcttcctgtttatctcaggattaagcagaagagtccgtaataggtgccaatcattcatggactgaacagaagggtccttgacaatgtcctctcatgtaacataacggatatagggtctttataaagtctgttcaaataaggcaactctcctttctgtgatgtagcttatttatcttaaaaaaaaaacccaccacaatgtttatatttaaagggcacacagatttcccttcccacatagctgtgtgggatgtgatttcacttcttcctgacagttgatctcccacccctgagcacacaaaccacacgtgtaacctttctaatgtctgcctagactattgtcggattgcttttaagttgcttttcaaaattattactggccaatcaacagcgtgatattgtaccatatgattcataaagctgccttgaaaactccacttgtttcctgaggacatttagcatggtactgttttgttttgttttgtttgtctttagctttctgtttaatagctgtggtgatgtcgaggtttcagtggtcaggaacaactgtttggaattccttcaggacagggtccagtggaccaggaaacaacaagtatgtgttttcataatccataaggaactttctgccttctgtgctgtgagctggagaatacggttgcttctccttaaggtctcacaagtcagtaagacacaaagccaagatttgaaccccaggctctcaaaagcgataattaatgcctgaaaatctaaaaccggttctttgtccagcagggtaactatattgaatgataacataccatacatttcagaaacactagatggaaagatttagatgttctcaccacaaagaaatgacaaatgtttgagacaagacaagcttatcctaaagtgaatattacattgtacctaggtatcaagatatcacgtggttgcccataaacatatactgcttaaaaatgtattctcaaggaaactaaatttttgatgtatggaaaaatcagtgccacccaggaccaaggagtcacccgatcaggtgacaggtcagccagtgtctgaggaaggagccgcaaggtgacagatcccagagttaggtaactctagagacactgctgagaagctggggtcccacactagtactgcaggtgagaaagaacacacaataaagtccataactgtatgggtagggaacgctagactccaggaggagagcttccttaaaactcttttgcctcatgagtgacttttaagcctttcggcttgtccagttgactcgaccggagagcgtaacagggtccaggccagatccatgcagtaagcggttactgccaaacggcagctgtgttgacctactaaggctcatccccgcatagctgtccagctgttatgggccagcacgtgcgagggactcatttactgtgtgcagtggcaggtaaaggcacagatgcagggccagcatcccgagcagcagccacagccaagctgtgccacataggcataggcgtacgacctctaggaaaacctttcctgagttcccagtgccatcccagccgatagcatttgcatggtgaaggccacgtagggcactgaggtctcgctgtgaggcaaaggcatatcacaaccacacttccaagttctgatgagttcaggggtgactggtagccccagctcgttggctatgaccgtgtacacagtgaaacaatgcttgagtttattcacagatgcaaactgatgccactccctgtgcactgtgtcctttctatggcatataatttagctgtcataggccttacttagctgtgctggccattggttccccagacaagtggttgacacggatggctcctgggactgggtatctacttggctggttagaatagccaccactgtgtcactgaagaatggagcaggatctaaagctgtgtgggtcctgtgcttgggaccatggggtctggagagtgctaggccatagttgaagagtttgctatccctaagctctcgctgcactgcctcataggtacacgcagtcccagaacagctcctttcctcactgggcattgactgaagttatctgacagcctgacacatgccaggactgggagttgtgggtgttatgttcactaatatatacatattctatgtgtcccttaaaaaaagcaaagagaaacagagtgtatgcaatgatgcccagctgaggagactagtcacatgttggatggttgcagccgtttgggggactatggtaaagccattagaagtgaggcttgtgaaggtgatgtggcagctcggaggagaacggttataaccatgacacaaaacaaagaaagaaagcaacacgggccattgaaaatcgtttgattgacagtggaggaatgaaatgccatgacatttaaaaacccagtcagtcgtctggaaccttagtgttattgacaaacaagacaaaattgcatctgcccccagccttgccgggctgcgtttgcgctgatgagtgagtgaggggctgctcaagtggtagccactctggctctgctcctttaagctgagtgtgagtggctgagtcacgggagcgtggtctgatgcagatgattaagcccgtggcaaatgcagaattaagcagccccgataacagggcccttgagcatccttctcggagattaaacctttcaggcttttagcagatgagaggtgctggggacgggagatagctggcttaggaagggaaggggaggggcagacattggatggggacagcaaggaaactgaatcagattcccgttaaggttctttgctgaaattgactgttgcctggagaaacagaaaatgtcccattatgaatgaagacgacagcgcacctgcctgcttcctgcctctcttttgtttacctttttttttaaaaaatatttttattaggtattttcctcatttacatttccaannnnnnnnnnnnnnnnnnnnttgaaaatcgtttgattgacagtggaggaatgaaatgccatgacatttaaaaacccagtcagtcgtctggaaccttagtgttattgacaaacaagacaaaattgcatctgcccccagccttgccgggctgcgtttgcgctgatgagtgagtgaggggctgctcaagtggtagccactctggctctgctcctttaagctgagtgtgagtggctgagtcacgggagcgtggtctgatgcagatgattaagcccgtggcaaatgcagaattaagcagccccgataacagggcccttgagcatccttctcggagattaaacctttcaggcttttagcagatgagaggtgctggggacgggagatagctggcttaggaagggaaggggaggggcagacattggatggggacagcaaggaaactgaatcagattcccgttaaggttctttgctgaaattgactgttgcctggagaaacagaaaatgtcccattatgaatgaagacgacagcgcacctgcctgcttcctgcctctcttttgtttacctttttttttaaaaaatatttttattaggtattttcctcatttacatttccaatgctatcccaaaagtcccccataccctccccccccaatcccctacccacccactccccctttttggccctggagttcccctgtactggggcatataaagtttgcatgtccaatgggcctctctttccagtgatggccaactaggccatcttttgatacatatgaagctagagtcaagagctccggggtactggttagttcataatgttgttccacctatagggttgcagatccctttcgctccttgggtactttctctagctcctccattgggagccctgtgatccatccattagctgactgtgagcatccacttctgtgtttgctaggccccggcatagtctcacaagagacagctacatctgggtcctttcgataaaatcttgctagtgtatgcaatggtgtcagcatttggatgctgattatggggtggatccctggatatggcagtctctacatggtccatcctttcatctcagctccaaactttgtctctgtaactccttccaagggtgttttgttcccacttctaaggaggggcatagtgtccacacttcagtcttcatttttcttgagtttcatgtgtttaggaaattgtatcttatatcttgggaatcctaggtttggggctaatatctacttatcacgtgagtacatattgtgtgagttcctttgtgaatgtgttacctcacacaggatgatgccctccaggtccatccatttggctaggaatttcataaattcattctttttaatagctgagtagtactccattgtgtagatgtaccacattttctgtatccattcctnnnnnnnnnnnnnnnnnnnncactcccactttttggccctggagttccccctgtactggggcatataaagtttgcatgtccaatgggcctctctttccagtgatggccgactaggctatcttttgatacatatgcagctagagtcaagagctcaggggtactggttagttcataatgttgttccacctatagggttgcagatccctttagctccttgggtactttctctagctcctccattgggggccctgtgatccatccaaaagctgactgtgagcatccacttctgtgtttgctaggccccggcatagtctcacaagagacagctatatcagggtcctttcagcaaaatcttgctggtgtatgcaatggtgtcagcgtttggaggctgattatgggatggatccctggatatggcagtctctagatggtccatcctttcatctcagctccaaactttgtctctgtaattgtttacctttctacaggctgggtttttattttttatttatttctttttgtttgtttgttttgttttgtttttgttttttgagacagggtttctctgtgtagccctggctgtcctggaactcactctgtagaccaggctggcctcgaactcagaaatctgcctgcctctgcctcccaagtgctgggattaaaggcgtgtgccaccactgcccggccaggctgggtttttaaatgtgtcagcgttggtctgtttctctggccccatgcgtgagtgtttatccttgcttggtgacatatgcatgttcttcagaacaaaaagaaaagccccagccttttgctttgtggcctttccttgcatgggtggattttgtctgtacacagtttgcactttctcgggctagagaacacactgggatagactgatcttccctggagctcaccattagccacattgaatccagctacatgacatgcagggctcagtacagagtgagaaactgcacagctccctgttcacaaacggggttctaagacagaactgggggcttggtgactgcccccgtgtcgcatgccctgggaacgggtcctgcggatccttagaggaatcttgtgtaaagagagggagagggctactctctgcttcttacttccatcctcctttatgctgtgtgtagggatcagaagaacagaccacagatgcaaaggaagataactagacattgattgacagatacagtgaaggccatgaagactttcacagtagcttaaccattgaaagcgccagcgcacagtgaacagtgatgatgagaggtggtgccatgcaaagttttggtcctggagcaagtgcagcgatgagtctaatgctcacaggcccgaaagacggagggcggttggtccccaggcttctgtagagcaatggacaactctacagaaagcagtgatgagaccagggtctcccaggggagggagtttcatgtctgcaatgctctccaattctccactgaagagtcagattctctctctgttggctgatttcacaggttagttttagaacgggctcacattcatatcctatgcacatgagctccctcttagagctcacctgaagggctccccatcagtaaggaagcccctttcagctttttaaacaactctgtggtttaattctaaaaagcagtagcaatcccttctctttatacattatgtatgtacagtgtgtgtgtgtgtgtgtgtgtgtgtgtgtggcctagcccaagaatcaaactattgctatacacagtatttggtggttatggaaatattgaagctactgggaactgttgtctctatttgaaagtgggtatacagaggccttgagagtctaagaaggatgtctgggatcccatagccacctagcatccaagccagtctcctggtttataatctcagcatgatgataaggtccaagctgctctcacgagttctgaaccgattcaactgtagacccttgcttggaaaacaggccactcctttgacaagacccatgcaatagctagaggctgatgctggcatcaaaatgccaactcccctttccttcctggcactgataagtgatgttaacaggatgatgagttcaggagtgacagatttctgcaggatttgtgtcctctccaggccatcactctctgacatctgaatcctttttttctggagagtgtctctgaggttgatggaaaaggaaaggcagccttttccaaacacagtgaaaaaggagcctggtggggtctctgctgtgtgtctttcaaagagggcaagcatgcatcctggagaggaacactgtttctcctcctcccttaaggaggaagcaaggcaagagtggaaaagtatggccaggaatggcaggacccgagttctaatctcatttctgtaattggtacatggccttcggtggctctctcttcctctgggctgtgtggccatcttaagactgagagtttagtgctagctttcaaaactaaagctttccatgtctttccttcgaactttcacgagtctatatcacctgcattctctcttagacaagagagaatgctagtctttaaatggactccccctcgacctatcattttagaagattatatagactttatgctgaggtttaaggcctctggaaaagtaccaaagaaaggattgttcctgatgtatattttcttcaagtagaaaatttaaaaccagccaatcaaccaaccaaccagccaaccagccaaccagccaaccagccaaccagccaaccagccaaccaaccaaccagccaaccagccaaccagccaaccagccaatcaaagagagtaaaatcaaaggcagcatagttagaaaataaatcatatcaaccctttctctacctcaaaaactaacatctatcattgctctagaaaatctaaaaagggcctttgagccccagggcttttgatatagatgatgcttcaactacaaatgaccttgtcaacaaagcaaaacaacaacaaaaaaccatgtcttaaaaaaaaacaaacaaaaaagccccctttttttttctttttaaggagctggtcatggtagtagttacagcatttgggagatgaaggcaggggaatcaaaagttcaaggccatctttggctacatactgagttcctgactagctcaggttacttgacaccttgtgaaaaacaaaacaaaacaaaacaaaacaaaacaaaacaaaatgaaacaaaacaaaacaaaacaaaaccagggcagaagaaaggactatgggtccttgctgcttttaaagaagaccagggtttagctcccaagcatctacatggtagttcacagtcatctgttccaggtgatccagagttctcttccagcctttatgggcaccaggcatatacaatgtacacattcattcacataggcaaaacaaccacacatacaaagtaaatctaaaacaaaaccaaaatctcaaacaataagtaagtaagtctttttgagaaggtgtcttattatatagcccaggctggccagagtgtttttatgtatcccaggctgtcttggacctctacttgccaagtgctagtatttgaaggtatatatatatgccatcttccctagggtgccacacatcttgataggccatcatctacttttcttgtctcagtgtagagggaagtcctctcttctgactttggtgatacccttatgggtagttcatggcccctgccttgtttctaggaggtcgtgtcttgtatggtagatggatccatcacgtgcactgttgttggtttgacttggattaatctgcttccatcctcctggattatcctcttgtctttcttttccagtcctaagcccacccagacttgagagaccgcccccttgagaagcatttcatcatccatacaaagccatagtggtcttttctgccatctctctgaaaatcattctgcccaagtatttcaggatgaggttcttaaaggtagagcctgatatgggtccttagtacgtgtcttctattgaagagcatccttgcagaagatcctggaggactgagatgtagatgtagttctcaggtcatccagccaagtaatgaccaagtccagaccagaaccccaggctaaggggttttattccattatcttgtttttttttccccatagaaactcattaaaacaaaaagattggggtacctcaaaacagaatgtgaacaaaatggcacatggtggttgtagagggaagtgttgcacctctgtccaaatccctctttccaggctgtgaactcacacttcgagagtggggatcatagaatttctctagagtttcccagctgtgcttggctcagactatgtgttcttaaccgttcagcatgagtgagggatacctgcacagaggatgcctccctgtgggacctgtagaccttgaagctcagaggcctcttcgcagacctccaggcttagtgagctaacagtaaaaatggacagtatttactgaacccgtggtgctttagccttcagctccttagatccatgcatctattcaaggagcaggctttgctccatgttgtacagatgagaaatctgagactcagaaatacatagtggtttgcctggtcctgcagctacattgcctgttcggatcccaggccttgtctccatttttgagcctctgttttcaaccatctaccctactgtccttagaaaaagacacgctgggcatggtggcgcacacctttaatcccagcacttgggaggcagaggcaggtggatttctgagttcgaggccagcccggtctacaaagtgagttccaggacagccagggctacacagagaaaccctgtctccaaaaacaaaaaacaaaacaaaaaaaaaggcacagaggctcttttctcattaagggttacacttgagatccagcggctggtgggtcccactctgcctttttccttcttgacctttgggaagactagggtgtcatttcctttgtagctttgccattgtagagtaagcaaagaaaagaggaaggcctggagaaccaaagctatgcatttagtgtgttgtttgtggtgcagaagggatgggacagagacacaaacaaggccagaaatgaatagtacctagggttgcccctaacagacctcagcgctgcttgtggggactgttggagccatccagcaatggcaggaacatgggactcatctttgggcttgctgacaagttggagcaacttaatccagaaagtgtggcactctgtgacgtcttgagggagcacagctcacattgagtccctgctgggcattcagagggtgccactaagtcctaggcaagtggacagtttctacacagactagagagtccttctttgtcactatttagtgtagatacttcaagatccctgggatcacagtgacccctgcctggtgccacacccaggtccccatctcgatgtctgaatctgcttatatgtctgtagtttctttcacctttatcactgcacccagccacatcctcactcctccaccccaccccctctcccatttcacaaagctactaatgtctttcttgtgagtctgccagcaaggaaatcaaggtcagggagactggccaagtgctccttttctgagaggcttttaagggagagcgaatgatgttggtgaccaccgagggcagaggactggagagatggcttccaggagagagaaaaagaatgaagtaccctgctgggctatggggtgcagaatgaatacagtgaaagacatcaggctggacttgggaggtaggacaccccacccccactccctagcctcagcttcacttcaggacttggtccactgtccatcagttgtcttggccagaaatctgtgagtcatcctggcttggtgtcactccttacagagtgactggtcatctcctggtagcatgttttgctatctcttgagctcggctctcttctgtagctcctgcctgtatgaaggcagctctcacctggactgactcttcaatctccttgtctgtactccctgctccctgctttactcctccccttcccattcactcatttctactgtagcctgaagaatcttccaaaactgtgcatttgacttggacacgacagccctgggctaggccccttcagttcattcattcacctactaactgtagagtgaattcatccagttccatatcaactaactatagagtaaattcattcagtcccatacctactaactgtagggtaaattcattcagttccatactgactaactgtagggtaaattcagactcattaaccttttaggcaaagcatctctcctgctatctctgactgatcctccagagtggggacctctaagattcctccttgtgcttgatgattatctaggacccacagaactcagaaaaggctgttctagtgttgtggtttattgcaggagaaagagaagtattgaagtcagacaaggacaacagtacatcgctcgaagtcttagagtgatgacgttttgaatgtttcctgtgtgtggtcccacacatggtgtgacccagcaacaatatgggatgtcccctgagatgtgtttcagctttagaaacacccatttgcctcagcatccatggtttctcttttgagatagatagtcccagaggtgtgtgcaactcatgtcactgacctcagcttccttgtcatggcatagtccaggaacccaggcaaataaagagctggcctttcccatgaagcacagagttagcacaaactggctggtatgacccacaccctggtgatagagacactcaggcaggctgagtcttccaagggctcacaagtgcctcccaagttcaggttcaggtccggtccagatccatttccttctttggaatgtgcagagtttgagggccccacccgctcaggcctgtgggttgactcctcccttccatgcttgccaaccagtagtctctcagacatctggctgtctagctgtatcatttagcttatattctaacagacttctttcaccttaccctggtagtctagagaagaattttcattcatccctagggaagcaaccccccagttgtgaagcctttcttgacccttgcaggcatatttcttcacttcctgtgtgctcaaagcactctgtcaacgccccttgcctcagcaggtcattttgtgttctgtgagtaggttgcggtagaatacatcatggacttgtttaattcggggaacgtgtggtctgttagaaaagtttgtttttgtacttataaaagcagtgcctgctcatggtgtaggaatgtggacagcacattcagtcaacttcaagctatttccccagtgctaatcattatagtcacggtgactatggagtgtggtcctgcctctgcctccatgtcctgcctgatggcacctaaatctctctgaggctgggaaccagggtagctacacacctgtgtcacttctgtctgccagggatatgtggaggagactgggggatgaagaccagaatgtgggggaagtaataaacccgccgtatcttcccaaatatgctgagtcttgggctagatcttgaaggaatttagaattttgttcaaggactaaacaacagcattctagactaaggttgtggagtagaaggatgcctagtggaatttgaagtggtgtgttcccctgtccccaagaccctgacttccaaatgtgacatgtttcaggacttccctttggttccagattggggctagccttgctgaacctctagtctcaagttctgttttggtcttgaggcgtctttgagattcttggtcattttggctctggatatgtgagaaactctaattgaggttccaaatagcaggctgattaaagccgaatggaacaaacaaaaacatggggaaatgtgtgctaacgcagatgtcaaatgaccccaggtggctctggtttgtgccagcccgaggcctataaatacacggatgggctcccatctctctcctgaagcagcaagccctggggccaggagccagcctgtgatattccataatgccccagttgtccttcttagggcatcagttgggcgaatgtgacctgtggagaccaacttgtctcagctgacatcatagtgaagcctgcacccacttcctgcccaatgatctgtttggtttcccagtctgtcctcccctcagtgctacttcctgttacaggtgaccaggacattttattccttattctgcagccttcagtggtgttgaggaaatcaccaagccccatggggcattttgatcaatatgactttgtattggcaacatttccagattcttttattagtttaggatgcttccaaatctagttctgttatctgtctgtctgtctgtctatctatggagtgagggtggtgtggtgttgtgtttcaagacagggtttctctgtgtagccctgactgccctggaacttgctctgtagacctggcctcggtctcccagagatccaccttcctctgtctcctgaatgctgggactaaaggtgtgcactttggtgacatgtaaacatttaaaaatggctatggggattatgactgttctgttggacctagctcctgtcttgaactctagactgcagaagtgtgtgtgggtgctgggggaactggatatgaaccctaggttttccagaaatgtatctgggataagtcagcttctctcctttcaccttgcttggtcagagtaaactgatagtgtggataggtcagagatggataggtctgagagagatgggcagctgatggagtgggtagatctgagatgaggagcagtgaaggaggttacctgtctagagcttgtcactcatgccctactgacccagatacacttctctccaggaagacactgaaagttgaaacaaactcggtatggtgatatatgcctgtaatcccagcactcaggaggtagaggcaggaggagcagaagttcaaggccagcctctagtacacagagagcttgagacatggtctcctgtaatctgggccagcctcaacataccaacatacctggctctcctccacttctccctcctccttctcttcttcctcttcatctaagcttttatttttagtttaaattttgtctctagcagatatataatgaatcaatcatatcagcctttgttgatagctcagttgctacctaacaatccccaacatggcagctattgctataaatcaagattgacagatgaaaccaaatctgtgtcctgtcatgtattaaaatatgcaaaatatatgctataacaagtcaatatggaaatcttgataaataaacaacaaaaagtttattgcaaactcatttttttaagtggtggtggggactgggagtggggattagctccatatagccatttatcgacccaggcttcttccagtttgtgactggagtgtacttcaaagctggaggaatttccattcagctgtggatggaaaagagaaagaataacatcttcctatgtgtgctaggcctagaagggacactctctactgtgttaagtgtcattagtcaggactcaggcacttgaccacatctggctttaaagaaggcagtttaaaaagatgcaaacagcggtgggctctagcaatttctgttactcacactgacatagcaggagactcccctggagggttgaggtattgagaagactttcaagcggcttcagaaagttatgaaagagggatagggtttgatcaggccagatggagagaagggaggcactccagaccaaggaagatcaggtaggtctgttctagtctgtcttctgttgccatgacaaaaaatgttaccaggctgggtacctacacgcaaaaaagggtatcccaaggtcacagctctataggatcagtttggctttggtgatatcttcatggtgaatggcaccacagtgacaggagtaggtatgggaggcagggtcacattaccatgcagaacatcagagtaaagaaataggtnnnnnnnnnnnnnnnnnnnnnnnnnnnnnnnnnnnnnnnnnnnnnnnnnnnnnnnnnnnnnnnnnnnnnnnnnnnnnnnnnnnnnnnnnnnnnnnnnnnnnnnnnnnnnnnnnnnnnnnnnnnnnnnnnnnnnnnnnnnnnnnnnnnnnnnnnnnnnnnnnnnnnnnnnnnnnnnnnnnnnnnnnnnnnnnnnnnnnnnnnnnnnnnnnnnnnnnnnnnnnnnnnnnnnnnnnnnnnnnnnnnnnnnnnnnnnnnnnnnnnnnnnnnnnnnnnnnnnnnnnnnnnnnnnnnnnnnnnnnnnnnnnnnnnnnnnnnnnnnnnnnnnnnnnnnnnnnnnnnnnnnnnnnnnnnnnnnnnnnnnnnnnnnnnnnnnnnnnnnnnnnnnnnnnnnnnnnnnnnnnnnnnnnnnnnnnnnnnnnnnnnnnnnnnnnnnnnnnnnnnnnnnnnnnnnnnnnnnnnnnnnnnnnnnnnnnnnnnnnnnnnnnnnnnnnnnnnnaacttactttttgggaaggtaatttaggggcctctgagaactgtattaaccccttatgagagtatgaggagacggggagggagggtacgattattcccgcaccagtgccagggtgcagaccatcatggtcggttggaaagcaccgcatcgggactgaaaggcatattgcctctacagtcccgaagcagagagatgaatgcaggtgttcagcccgcttcctcctttttattcattctgggaacccagcccaatggatggtggctcatcttcacagacacacccacaatgtgtttccatggtgactctaaatcctgtcaagttgacagtgccgattaaccatcacaacctcgtagctgccacttgaatctctgtcagcggctggctttccttctcctggcacacttaggaggtgcagagagaatcccccagtgagaagatggaggcccaggataagaaagttctagctttgaggccatttttgcatctttctctatttgcatttattatcatgcactaatgattcacagagagccttgccctttgtgggctcccagtgtgggcttgcattaatttacattgcttttgaaaagcaatcaaggaggaattaagtgatcatccatcaaagggaggaaaatgtgctgtgctgtaactggccctgttaggctacccaggatccagggaaagatgcctgagctcctgcagcccctgcagcctcagtcatctcggcttttgtccacactggagtgcatgaaaaggtagagagggagggacagaggatgctgggctgagccaggctctttctctgagtttcctcctttggttaaggaaaaggtagctcagactatcttttatacccctccccctgggccttccactctgccaggctttctgaagacgcatgattgtatatcatcacaaatggagacagacaattacctgctcataatccagacagttcccttgtgcaggcttccctgggatgttattaggaccagaaaagtgaattaacatttttatttctctgctctgctacagttgtttagtgctgttaatccaagctgtgtgtgctttgtcattattgttgaggtataacacacatgtaggaaactgtacacattcgcaggctgatgcttgccgtctttttgttttgttttgaaaaagcctaatgaatcctgggctagcctcctgctggttatgttccgaacatgaccttgaatccctattctccttccaccttccctgttacctggatcacaggtgtgtgccgtgatactcagctcatgtttgttataagcagttatgcttatgtgtaggataccttctttcctttctctacctccttctgatgtggggtggctacaggaagaaactcaggctagagttccagatctgttgcctctgtaggcttctggaagtgggttgtgtgctgggcgagtgtgaggtttggctgtggatctgagttctgtttctgtatttgatggccttggagatatgaaggtgctccgaggaggcgttgatcatgtaggacacatcttacagaaagtcccctgaggagcacacaaccaggagacaagaggaagctcaagagagggcctaatagatcaaagtgattgcagacaagaaagtgacagggaacatactccatcaacaaagaggaaggggcagcagtttagtatatgcaggccaagagggttgagggcagggacggcgagatggtggttgggaaagagatgctggaggtgctgcggagagggaggaggagcaggtggggagagccactgtgttagtgatgaggagggtggtagaggctgccctggctccaaagaatgacaggaaggtgacacacagagaggatgaacaccaggcacttagcacagggtttggtgcctgtgttggtgtggttcccccttaattactgttcatctaccctcaattatggaaagtaacggcttaaatcctcccctaaccctttcctcagctaatctgcccacctccctgatcaggaagatggctgtgagaactgttgccaaaggaaaaataagatatggggagaacgtagtgtttgttggctatgggaagggctaattgaccttgccctggggctgtccagatatcaagccgctcctctgtagaacacactgcccccagtgtttattcaaacagagcttattgattgggatgacccaaattgagtagatttcaataactgcaaataaaacatctatccaggctacccaagggtgcgctgtgattattctctgccagatgggcatacgtgggtttgagtttggcttgctttgtgctttcatctcccttgttggtgagcttgtatctgtaaaatggggggagtgatcttggttggtgacttatatgaggcctaagtgtggttttatatctcaggttcttagtgttgttgccaaaattcccaccctgggagagatgtaatggcatctacccccttctcctaaggtcctaccagcaaaccaaagtacaagtccaccacaggtggctccgaggagccagtgagtttattaggttcacttacagagaagaacatgaacagaacgttatgtcaggagtgtagttgaccccagagcagctgcatagatgatggcttccacatagtcacacagatgcaaccttcctcggcctatatcctctagcaccttcccaaggctacatgaaagtagcacaaagttgcaggcagttcactggaaaaagcagttgggatagcgggtgagggtccagtggccctccccagccctcctcctctgagggaatgccaacagcccacagggcagatgctgatggattctaacccataggcacagatgacctcatgaagatggtaccagtttagcttggaggatagctccacccaagaggtacatttagcacaaggtggtgttaggaatatggccagcaagtacttatggagagtccccagtgctgttacagcaggaatggcacagtgtctctgctgtaggcattgccgacttcccaaagaagacacattcttctttcagttggccctcccctagacacacgtgtgtttttgcacttacagattcaactgaccttcattcaaaaatatttggaaatgaaacgaaacgaaacgaaacaaaacaaccaactgtccatgctggacaaagacagactgatttccttgtcagcatctcctaaacagaacaatacagtgactgctggcttcctacttacatgtatttgatgtaaataatctagaggagactggaagtcggtagtagggttaagtgtatagtttttatgaaaatatgcatcaattcctattaggaacttgcataatcatagattttgtgttctttccatcttccccctcccctccctcctttccctctgtccatacgtgtatgtgtgtgtgtgtgtgtgtgtgtgtgtgtgtgtgtgtgtgtgtgtgtagtatggtaaaggtaaaagaggaggacttagggcactgagaccacaggtgaggaaagaagacagactctctaggagaggtaggcaaggctcccttggaggaaccttttaaactaggctttgcaggcaagaagaataatggagcaaggatgggagactccaagtccagaggccatggttttgagagtttgttattctctgaggtagaggacatacggggtcaagtgggaactggtgattatctgtacctggcccagagtttgaaaagggcagtgaggttggggatgatggactgactgttttgacagtcagtggagactaggggcaccggtcaacaaggcacagtaccatctgcttactgccttcccctctatccagtccttctggggagccttttggaagagatcaaacttaaaacccaggctcttttccccctcccagaaggtgtgtgtgtgtatcagaagacaactttgggagttggttttttccttctaccatgagtgccccagagactgaactcaggtcattgagtttggttgtgccttacccactgagctgtcttgccagcccatattcaagctctttgtagcccgtttctttgtttctttttaagctttcttatttattttatttgtatctctgttttgtctacacatatgtctgtatatcatgtcaatgcctggtgccttcagaggccagaagagggtatcagatcccttgagactggagttacagatggttgtgagctgccacatggattctgggaattgggcttgggtcctctgcaagagcagccagtgctctaagcttctggggcatctctccaggccccatttctattatttactcttatctcatgcatcaaaaacttctcaactcttgcccttcaaagtccttataaatggggacccactgatgcaccagcctctcctgcagtcagatgattccttcctctgagcactctgtcctccattctctttccttttctggagcaccggagtgtctaatgacacgggctggaaaaggcatagaccgaggagatgggggacgaagctcaacttgatggaaacactgtgtgggtctcaaggatgctcaacctgagaggagctggctgcaggcaagtgaggggtcagcagtagtggtgaaggcacctatatctagcaggtggacagaatgcagcacaggggacgtggggcagggattcccagggggagagacttcagtctggggaggaggaacaagaacaagggacacaagggtgatggcaacttacgtgtgcagccagcagaccgggacttcaggacaagcaaggccctgactgtttgctgtggaagatactggtggggctgggactcgtttagaccccttgtttatgggcaggttttggaggtagggaagaggctcctgggaagaggggtggcatcatgaggagctgggctggttggatcacctcttctaacctttcctattaagctgtaagcgatctcttaatcatcgactggatcttagcttccacataatgccttttacacagagactctgcctgtctcccattccagaccataactgctctcagggtaggctctgtggtggtgtatctgatgacaatgatgacattcctgagagcagcaagcaccagctaagcacagtcaccttaagcctcacactgaacccgagctctgccttttcctgttgtaagaagcagaggatctcaaaatgtaaaacctgaggcagaaggacctacggccagcatccactgtcgctcagatatgtatcaaggcagatgcaaagcccattcatatcattctgatgtcttgagacagaatctcttgtagcctagtctgaccttgtgctaccaatcttcctccctctatttcccaagtgctagggttgaagacacacatcacctgctacaagtccccctcttttagccctgtgcttttgctgtgaaacaaaatcgtttcaaactctggaaactcatattaaaggccttgactgagagagaggaggtgcattgccaggcatctcctcaccgtggctgttggcaccaccttgttccatccctctgcagacagatgaattgatgcctcgagtttgggaggaggcaagagattcaggcagaatggtgcagagcggtggaggggttagggaccctggtgaagttccttttcttccttcagcctctatggagcggagcctcctgagagcagatggaaatgtctgcagagagtattttttcagactgccccagaaagcattctgcctggcaacaaagagcctttcaggagcttgcaagctgagaaccgagaggagctggagtggttactgcatctggttgcacaaaagaggcaaagccatagaggattgagtttcagctctgggcacagctggaggggctgcgggggctgtgctggggggtaggagttagggctgatgctgatgaggaggtctttaggcaaatgttaggcagtgtgcatctgtgatagcaaatttgtgttttaacatgatggcataagcatgtgggtgtggaaggacatgctcaactggttccctgggggaggtgtgtgcttaaattaagaatagtttaagattgaaaaagcattacatgctggctataaatgttcagatatttcagaggcgttgagattgaaaggccctgttacctgtcacagatactctgttagcatcttagaatgtgctctctcaggcttgggtttgtgcacatttgtatataatattttacatgtagtggctcttcctatggacatataactcatcccatttctggtactataacagatgccctggatggttaatttatagagagaaaaggtttatttattacatctcacagtgtctgaggttttatcacctggtgagttgacctcattgcttttcagtctgtggtaagaaggcacatcatgacaggagctctcagtagagaccagtcacccccacacccaggaagcaaaggttctacagtcccatagtcctgttcctatgtgtctgaaatgacttgaggacctcctgaaggtcccaccacttcctggtagtgtcaccctggggatcaaaccataaacacacggctcatgggggatggttaaaatccaatgagagcaggtgagctgctgcagaaggctcctgctgcagtgtggcatcccaactgcttggcttaagaccagcagaaatgccttgcctctcttttttgcagactggaagtctggaagcaggcacctgcagatgtccttgctgacagctctgggagaaaatccttccttgcctcttccggctttgggcacgtgccagcagtccttagagttgctggcttgcagctgcctccttccagttcacggccaccttctccctgtgacatcatgttatccttcttctgtggtgcccgagagtatctgccatattgggtcacaatctgccctggtggcctccttttattttggtcacctctgtaagatattatgattaatggccacattcagagaccgtggggatcagaactacagtctatttttggggaggatgactcagtgtaccctaaaacaatcttaaactatgaagatcatgttggatcacctcctggggtcactaaataggcatatgaggtcttgaaagtggagaactttctctggatagaagcaaagaagggaactagttgggtgttgtggtccacacttgtatcaggactcaggaggctgaggcaggaggtttttgagttgggcgccaacttggactttataataggaccacctcaataaaccagaccagaccagaccagaccagaccagaccagaccaaaccaaatgagaggagaaggaggaagagagtcttctagaatcttccaataaaagtttcattctgacagcttgatttcagccttgtatgaccttactgaaaacccagatccatccatctggactaatgtcctatggagccgtgagacaatacatttggattctattaagttttgagtctgggcaacttcatttcagaaggaacagaaaatgaacatagttactttcccctttagttggcctttctatcccttaagacaaggaaatgatcaacaccaggaacttcttagagcctcatgtctactgtccttagtctttgaataatgccactcaccccaaaacagccgacactttctgctacagaacccattagacagtttacttgggacactgagaaaagccctctacccagggaaactggatgttgtcaggtacccctgatgcctgttctgtctgatgcagctcaggacctgaagagggtaggaagcgatccttggtgctttctcagacagggacatatctctgggagctgcatggactaaggatagtcagagagtagcctggacccaggaacccagcaaggctctgaagaattgattggacttcgggaagcttgctggctttgggtttctggtgtgattgcagggtatgtttttttttttttttttgcccaccttttctgactctactccctttgtgatccttgttcatactaagtgggtcagatgtgatgtttgtataccccacagtgtctgggcctgtcctgacacccttgatctaggtcctttatggtgatgagggtatatggcatggctgccagtttatctcatccttaactttcgttaactcttgtgggaacccaggagcctgtgttttgaagacagagttctgctattaaaggtttcctagtaggtgtcacttgtatgtggatatcccttcctctctctttttccctatgggctgaccatgtgtcttcttcaagataccctctcctgtgattatcaaggtcagtagaggagacctcattgccattgtctctctctgtctgtctctgtctctctctctctgtctctctctcagattttatttagtccaggctgacttcaagttcactctgtaccttgatcttcctgttctacctcacaggttctaggattataggatataccaccacacttaatttatgaggttctagggaaccaattctgtgattcatgcatgctagacaagcactctaccaactcagctacacccccagcaccctcacacatgttctgaagcattgttctccttgtctttctgacttgtcaaacatccctttactgtgccaaggaatgggacagacactcggaaatgttggcctagtagccctcaccgttgggcagcattgcacgggtggaaaagtgaagacatcaggagtataggaactcaatgtctagcttctttgtagacttgttttggttgttttatgctgcggccaccagaagcccattggtgccaaccttaggtggcatctttaacaacagcatcaataatgaacagggagccttttagtgcctttgattgctctcacttcccagatgttgaactagagacttggctgggatgaataacttcccccaggccacttctctagggctcaagctgaggtatgtctgacccagagtgttgacaggagcagtcacctctatgctacttgcttgtgttattaggcagtctggccttcctacctaagataggcagaaaagcatatagagatctgtggggaaggcaaggaatctggcagtggttaggcttcggcctccttcaagaagtgtggctaggtagctgagacctaagtaacaggaagaggtgacttccttgttaagtgagatagaagaagaacttgggtttaaaccaggcagggacttgctcagcccaataaagttagggaattattttggggccaatgagaagatgtgaaatgtttgcagatttcatttgagttctgagatcagtttaaccgattgtggcgagtggattttaggggcacgtgttaaaccttgggcaatggactgttagtcaatggattgcttagataagtgaaaggctataagaattacaattttaaaaatggaaggagaagagaaaggtcgaggctggagtgagtaaggacctgatctgaggggagagaggcagagactgacaagagtcctgagaggggatgggcagtgccccggggactgaaactgcagcaaaggagcttaagttggttcaagcaaccatttcagctgtggcctgaaggtttgccaggctgttcttgtcccagccacaaagaagctagtctctggggtcatctctgggtctataccaggaacaaacatcataccccacttgtttctctctctgggtctttgaggttagaaaaagaagaggcaaaatcctgcttcatcctgaggtctgtggggaaggagggcaaaagaacagagagacagcaaaagagctggcagctgatgggcttttgtcaagcctggcccaagactcaagaggccctagtgctatgtatccatgtagccatacatttcactatccatttatttaaaacttgagatgtatccataagaaccactggcttcagaaatgcaatgcagaagtgctggaaagaggcacgttttggcttgtgtgattgacaggggagaactctgattatgggccgtctggatctgatgttgtcaagggaaggagggttccctccaggtttgcaaactactgttacaggcaggcttcatccttggagctcttgggatgacttatagctgccccaggcttgatgtctactgaccgccatacacgggagagctcaggctaggcgttgctccagcggtcctggcactgacgacatccattgatcctgctctgccacaggcccagctcagagtagggttgcatttctcttatggccggcttagggccacatgatctcttctgcagttaaaagtagagttagctccccagcgacaacaaggtgtaagtatgggatggaagtaagaaaagggacgtggatatttgtcaaataaaaactacagatgatctcagtatccaagttcatggtctgacagtccatggaagaagccagtgacacctacagtgggaccctgacaatgggatcttttgaatctaagccagggtcatggaactcttaagaatacaatggaaggctcttcctagaaatacacacacattagacacctaagcatggtctctaaggtcccagactgccacggcctcatggttacttgaatttactctgctgcttcctccttaaacccgtgggaggacctcaaactttatgttccctctgacctacttaatgccttccatttgtgtgttctcagggctctttgaacctttccccaaacctatttcaactgcaagtttaaattttaatatgtacataatctagtatattgaatatatatttatgaatcatgagaggagagtagctgaaaggctccaaataaatggtgatgatgaagaaatggacatgtcaatcactgatgtcaatcactgatgtcaatcacctgatttgaccattccacgttgtctcaacgtattaaatcatcacacctcccctcataaatatatacaacttctgtgtattatcaaaaatgttaaaaatatttaggaagttgaggatgctctttcccctgacatgttcattacacactgactacatagattatcatacatgaatttatataaaaagctatgagtttaaacattatattctatatgactgtttggttggtgtcattatctcctacctagtggagatgccataaagtgaaggcttggtttgcctttggtatgcacagcactcgcagagtgtctggaagtcagaccactgcctaaggagagagggacgtgcatgctcttggtttccctggattttcgtggcatagctctctggagtcagtctcagcatatggactagagtatagcttaatggtactgctcttgcagagcacttgacagccctggggtttgatccccagcatgtaaagaaaaaattagaatagagactttagaaagagcacgtagggtggttaatctctactgttgacttggcaggattttgaactgccatacttctgtgtgtctatctctgtttcttgattgtggataccatgtgaccagctatccttccctgacatgaatacaccctcaaactttgagcccaagtaaactgttttgtcatagcgatgagaaagtaactaacacaacaaagtgttagcagacaactcataaagcaggactaggaaacaaggaccttccagacataggccaagagccaccaactcataccgatgtgtcctcagagaagactcataggggactggttgtgggtgagaatccatgttcaaatttgagaatgtgtaatttaatgcatccttctcatagaattactgcttatgttaataaccacgtgtatttacaatatttattcggggctttatatcctgggtacctgtgctttctgtcatcgtaacaagtccccatgataaagtaacttagaaggagggaagatttcagtcaacaagtgtttgattgttttgctttgggctgtggcagcagcagagggcatgagggggtggagtctctcactgcaccaggaagcagtcagaaagaataaggaaagttccataatccacatttgggggcatacctctaatgacttaaggcatccatctaggagtcctcaccttataaatatgcgatcaccttctaagaatcccaagcaagggtcccagcttttaacacattgattcttgggtagtgttccagttttaaactacggtcacttcttattgtcctgggtcattccataataaccttgtacaacaaacaccaggtgaagagagataatccctggagggttatgaatcttcatctactgtgtaggcagcagtaggtctggtacatgtccaaactctttaatcactgaaaatgtgactcatcctaccttgggaccagctggcctctgtttaatttatctgtgtctctcgacaaacgcagagggcatcttaagggtcacacctagtttgggacttactggcaaaatgctggtttgtactgaccaggactggcatcagaagaatgtaggcctgacatagtcccaattccacaaatatttcctgagcacctcctgtaccaggcatggcacttggagtgccgcagtcatgggcacgaagccacatctcactgtccagcctggactgccccactcatccatttcacaggttcctctcagaaccatctagctgtgtcttccctttgggagtgctgctccgtgtccctttcagaagttagttcaccgtgaaccacagactcattctgtaaatgtttatgagggactttcggtggcctctggccctgggctatgaattgaggatagaaaagcaaagaacaactatgacctctttttctgctgttcctgtcacctgattagggagacaggacaatgcgtgtgaagccataataaaacaaaacagaaggaggaccgtggggtgccctcattagagagataaaccattgggctgtggaggccagagaggggactgatttcctcttctctctttaattagcaaaattgattttggtttgttttttaagcttgtgcctaaatgttgcaagagcatctcatctggataaggggccagccatttgccagcctcctggatgtctggctgacagggtaagggatagttgagtgttcctaagcatcccagggaattatgggggttctgtggggttgggggactgactcagagggcacccttggtctgtagcagccagttagacaatgatggaatgccctcatcccttcataccacccactctgcccacaggactccttccttaggtcttgggcttacagaggagtcttggggactgccctagtgtcctcttctttcaaatggggtcatgattactcttcctaaggcaggtgggagggtcaaatgagatgcacggggtgggggggcttcccggatgtcctgactgttctccttttgcctgggacccggtggagttcttctggagcagtagaagataatggcctccttggactccatgttgtcctggcacactcaggcaaattcaggccaggagggcttctttcttggttcctgatactttctgtggctcttgttcctgggcctttgctggcttattcagtggcatgctcagcacaatggctaacagtggtcaacttgatgagatctagaatcaactaagatggtcctcccagcattcctagggggattatcttaattgggttaattgagttggaaagacccaccaacggagggtggctggtaccattacctaggttgggaaccttgactggataaagaggaaaaagtaagttgagcacatgcctctctgtctctctctctctctctgtctctctctgtctctctctgtctgtctctgtctctgtctctgtctctgtctctgtctctgtctctctctctcctgtggatgtaaagtgaccacctgatgctgtgacttctccaccatgatagactgtaactgcatgctgggggccaaaatgaatcctttatctcttgagttgcttttgtcaaagtatttcataacagcaacagaaaaagtagctaagacatacagcatgaagatgtttgctgcaaaatcaagtgatgggtacccctgtctgcaacctcccctcccaactttctactttttttaccttgttccctctccttgaaattcttacttccttatttaatcatctgataaacactagcctcatttaaaaacaatcttaactgtggttcgccacacacaatgtaaagttatatcctagcttctcttatgtgcacggggcatcccgctcatccgtgctgctgtgttagcatcaccactacccatctccaggaacgtttcatcttgcaaactgagcagtggtttgtgtcctcacaaacctctaattctgcttccctcctctgccagcctttagcagtcctgctagagtctctccctgtttctgtgaattagactcatttatgaccctcacaaaggtataattagtcagcgctttgtgactggctttctttaactagcaaaatgtcctctgtgttcacccacagtgtggtatgggtcaggacttcctctccttccagggctgaatagtgttttgctctactgggtagatgacattttgtttttccattcatccagagcgtgagattggtatctattctgtgaaggcaaagaacaggtaagttccagccggaaggattgagaggggaggcatgctggggaggggtcaggcaggagccaaggagccaggtacaaggagtcacgtgctcgaagctactgtgagttggagggactgagtgaagctgggtccgtccacaggcggccattttgttgtgaactcctgcagggagcctcttgttattggcatcccaggggctgcttttgccccacctgccctttgccttggctcctgtttctgtcagtgcactgagctgccagagtatgggagctgttgtgttttcatttctcctcacccttgcataagtgtccttcacacggaagctgacacctgttgaagggggtcagctttttcatcggcagtgccaaggccattaaaacgaagaacagggagtctctggtatctggggactgccaggttagtgcacagaacaagcacaaggactttcactttgtcacagaaccatgccctctgtgtgataccagcagtgcacagtcacacatgacctgagtgtgccatgctgactgcttggttggctgaagcattcttgttccacaggagcgtggaaagcactcctggctcagaggtgggctacatgtggccaagcctccagcattaaccctcccacccacactccagcggagctgactgttctttcagctcagcactctggaggttgtggctgggaaccacgctctgccacccctctggttggcctcgacaacttccaagctgcctctattcactcttccctctggcctctctgctcgtggagtcaccatgccatcttaagtttattcttcaatggactcaaactctgcaaggaacccttcctggggttcttccagagtgttgccagtcctgggggaagcccttctactctgcatgtgtaacgcccactcccacggccctctactatgtgagtgggaagtctgatcttattgttcttttaaacctctgactttgcgggttttctaccaagtgtcaagaaaggatcttattagggtcagagaccagaaggtcttgaagttatgggactaacactgtatagttacaacccagagcttgactggaaacagatgagctcgtcagagaggtggagaggtggatgtgagctggggatacaggtctggagaatcaagggaagatgtctgctgtgggctgttgcactttaagccacctaaagatttttttcaagtcttctgaccagtagctgtgaatatgaccttatttggatatagcatcttacacaggcaaaggataatgatctcattagagtgtgctctgctgcaagttcagagacgggaaagttgagtcagagtgaccgacaggtctacgggaagacctgggagtcagggatgagggaggcactgcagaggtcaggaaatgctctcagtgctgataagcccacagggatccaggagaaaggtctcgaacaggctttccctcacatacctggaaggagtcaaccctgcccctgtcatcatctcagacatgcagctcccagaatgaagactctacatctctggtactgaggtcacatggcccacagtggcttggtggggcagtacaggaagtgagtatagcattggggcacccggccttccgattgtgggtcaacacactttggtcactatgtctctatatgctatgttgagttgtgacatagggactgttttaaagcatctaagcatgtattctgatgttgttgttgatggtggtggtaggtctacaggcttgtattaaaaggatgatagcccttttagaagagtaataagagttttattaagtgtctgacaaaagcgtttctctagccttccgggtcagtaatgagaaccttagccatgtcatatatgttattagaaggtgtttcatttcacactctcaaaaaccttccttcattaccctgtgcaatgtgaggggagccctgtcaagtattcactgcgcatggtcccattgcagagaggccagaacttcagctcatatctagatgctctgaaattgcacgatgtggtggtggtaggtctacaggcttgtattactcagccttatgtcctgaccataagctcacagatggcctttaacttggagcagatctaatgatataatagttactggatctttgtctggaggctgaagagagacattcccttgatccttttgtgggagtaaggggatatctgtttgtcaggacctatctgttagaatgtcccaccatatcctgctgtaggactttgggattatagacacaggaagtaggagctggctgctcaggggtgagattggcatcttcaggcttgtgagctgactcctgctgagggatagaacaaagctggctctcagggtaacagtgtattgtccagaggccttcacaatgccccttggagctgcaaaaacctcattcctttccagcaaatgaaaggccgagggagacagacacctgggtaggatagtccaaggcctggtttgaggctgttctgtgtgtaacctgggctagtccctccacctcccccgaggctcaggccctccacctatgaaaatgatgtcataagagcatctgcttggctgcacagagtttggagaaaggacgcaacaggggcgttttgtaatggtccctctccatgctataacaacgattaaaaaaagggactgtccatgtgattttgaggagaggggtcctatgaggaaagccatgacaccttctccctgaatgaagacccagggtcgggctctttgggatatcctccagaggtgtccagccctgtgctcacctctgctggttgtgtcagggtatgacacattctcttgttctttctgtcctctcagaatacgttcttcatttcatatcaacagcttctttgcccccagtgcctcctatcttttcctaccatagctgcttaggctcttcacgcaaatgttcttatggcacaaagaaaatccactgtaagagaaaatccacaagaaaatccactggcaccaaacagaaagatcatattgtggagtctgaagcccactgagttcattgagttgcctgagcatttgaaggcttggaaactttccatgtgtccaaaacgttggatttgtagatatgaaggctgtgggccaatggggacccacattctgctgaaggccactgacacctcccgccttcagcctactatctaaatggcaccaatccaaatttcaatgtgttctttcatcaggtcctttctgtctgttatatcttcttcacaaatgtcaaacagagctaggatgattttaaagtccagaccccacacagccatggtgcaccatctcccatcgtagagaaattagtccagcctcttcttgtagctgaggctcaggaagggatggtgactgctctaaatggttgcgtgaaactcaagtgtcctaaagctcctccccccgatcttgtcttgcaaggagtactgcatcattgcaaagagctgcccacttgctaccagaggcatctctaattgagagccactccagcaggcatggggaagtcaggtgaccactttgtagagacagttctttgtttctgcctccttgtgggtaccaggagttggaactcagctcaccatgtgtgtgttgtcagcatccccggccatggtgccgtctcacctccctgtgttgagtttgagtgaagtgtaaggactcatgagtttggacctcagagggagttacttgttcatgtattgtgcagagcagctgagcaggaatgtataatcggcagttagaactgcaaaactaccctcttgttggaggaataagcaatggtacgtggcacctccttatacatgttgtccatgtacccttgcatgccttccctagcccacttcctcttgctatccaattcccatctatctttcaagcacagtttcctggggctggagaggtgactcagtggttaagagtactggccactcttacagaggacccaggtttgattcttagcacccacgtggtggctcacagctataatgttccagatttcacatccttttctatcttctcaaacttctgcatattagtggtacgcatacatacatacattcagagaagacactcatacacactgtgatggtttgtatatgcttggcccagggagtggcactgttggaaggtatggccttgttagagtagatgtgtcattgtaggtgtaggctttaaaaccctcatcctagctgcctggaagtcagctttctgctagcagctttcagatgaagatgtagaactctcagctcctcctgcaccgtgcctgcctggatgcagctatgttcctgccttgatgataatggactgaatctctgaacctgccagccctgattaaatgttgtccttatgagttgtcttggtcgttgtgtctgttcacagcaataaaaccctaactaagacacacacatacaataaaaataaatcttacaaacaaacaagttaaaaaaaaagcagtttttttgaggcatgccctgtcacatctgcctacagctttggtcataagcatatgtaatattacaacatgtccttacaactagactgcagattccccgagggcaggagttgtgtcttatgtgggacgctagaatagttgtgttagtgcctcccttaggacaccttcagtctggactggactgtggagtacagtgtacctgcctgtcacttctagcacagaagtcaatgacttacctgagccactcagtcctttcttatgaagcaggctctgcatcagatgctttgctccagtgggggttaatgctactgcaccgtgtatctctatcacaggctgggctaagtggtgttgtgtgggttaggtgtaaagcgaattcgtgacatatcctagtttccattcacattggactttcgggagctcaccccgtcgcaagctggagaacacctgcactggcctctatgctagttacttcctatgatgtatttaatttcatcctccgtgacattcaaagatgcttactgtcattgtcctcagtttctagctggacatgggcttgtgtaacaggaggcagagtctggattgaagccctggatggaagtccagctgtgactgcacagggtgcatgaggtgggaagggccagctgaggctgaactttgtcaccttgctgtggaactgtgaacatacattcttttttttctgctcatacacagccagggagagttgatgccagggtgcctgctctgaaccatgcaaaagagcagaataggaatgtgcatatttgtatcaccagtgtctagcatagggcaggaatccccaaacacgaatgaatagaggatgataagccaatagccactctccttttcttcttccagtctttaggcatgtgggcagcggtaactggtcacttcacaagtcacttggtataagaagcacttcttatagccggtggccttgtagcaggtacgtggaaacaaagaagcagctgaaaggccagagccatctctgatctctttgtatgacattctaagagttacttggtgtctgttatatccagcgattcctctcctgccacctccagaccttgggaagctgtcggaggagtgttcagaggcttggctggcccggaacaagaagttcattttgtaatcagctttgagaactgtgcctcctgggtcatgtgctcacactagctcaggttctgtgtgagctctgggttctccaactgggttcctcccatcaaagcctgagttggggtgagtggctgctgaccagccccagtcacctgtctaatctttactcagagcagctgggtgatagtcgtttttggggtacaggcaacaatggggctttgaggtgaaatgactgagtctgtgcggttctgaggaaagcgctggagaggtctggtcctagttctcactggttttctgaggagggaggagtgcatttggtgtccacttctgactttctgttgcaacctcagatgggtctctttacccctctgggcttctgttcagtcccccgcagaagggaaagaatgtcgctgactatctaggcctagatgtttgtgaaggaagcatactgactgcccacgctgtaactgtcatgatttgtcattaggacgttcttggtcatccctggaggcattttgctctgtgctgcatctgctgatcatgcctgggggcggtatgaagggaggagaagggaggagcaaggcaaggggggggggtcagggggcccaggcaggcaggctgagggctggaagatggctgagctgtgctcctattggcaagtggaaggaggtttgcagctgtctccttctctttccctgagcaacatccttcatgtctgagggtgtgtttctcaaaatcagcacttttcaaggacacagacaacccaaagcttaggacttggcagaggatatcggtctagcttcccactcctctgggctggtcttggcaggctgccagctgcatcccctcccgactctccctttcacactcactccatctaggacacactgcccgtgatgcccaagtcaagtctagctagagaatgcccattgtttggagaacagcagagggggtttgcttgaatgtattgtagggtatctggtagctatcgtggagaccatgaggggtgggaatccagaccttagaactaaggagcaaggatctgagatggaagttggagaacccatccagcaaacatgactgagcactgtgtgttagattcctggattataggagacagacattatgctcatggccggacagtggggagggccagctgagtaccacagtcatcatagaaggctgtaactttaactctgagaacagagactgacactgtcacagataagggaggtattgcacggtagacttgggttcacacagtagcaagaagactaactcattgacttgtgtattcaacaagcatttgtggattgggggaatctggactaggttaaagcagtgtcctttctcatgaggttttctctctaattgggctttcttcttgttaatcaggtactcacaaatacatcatatgtaatttacaatcagattcaaggctttgaaagggtggcgtctgacccacactgagggtttggagaatgacaaattggcatctgtgaagacaaacaggaaccagcctagtggttacaagtcagggactcaggaagtagaggcaggtggattgtgagttcaagaccagccagagcttcatagcgattttcctggtcatccaggactacatagtgagtctctttctcaaaaagcagaagaaaggaggaggagtagaaggaagaaggagggagaagagggaaggcatccgattgaggggcagcttggtgtggaattgaggtggtggtggcaggacttattagcattagtgctgactcaggatactggataaaaacaacctaagggacgaggggtgtattttgactttagtttcctggtgagaaagacatggcaatgagcagtgatgggacattagggagcatgaggcaggaagttacatcatcataagggcagtctaggacatttagcagaacctgagccaagtcacaacccataggcccatcttgtagccatccacttcttccagctggacccaactccttaagggtttcccagcctctcacaacaataccatcagatggaagtcaagtgttaaaacacatgagcctggggggacatttcatgttcaatccatagaaaaatttagtcagagcaagtatatataggggtttaatggctctgttaaagatttgggcctttatcttaagagccagggcaagagggctggagagatggctcagtgggtaagaagtacttgtctccaaggctaatgacttcagttccatctcctgggcccacttagtgggaggagactcctgaaagttctcctttgtcttcacatgtgaaccatggcatgctcctccaaaccaaccaaccaaccaaccaaccaaccaaatgaataaatgtgattaaaaaaagagccagccatagatgggcttatggaagagaagccatatgatcaggactctgggaagggcaacgtctaagaggcaaacagaagacagaagtgggtcagaaagggcacaggctgtggggaccagaaagatggagcgactcactgggtggcctttgtagctcacagggatgctgagggagggagggtgtgaggagtagaggtgggttggagaagggctcactccccctggcatccatggagctgggcagggctctggagctgcctgttctaatggctatcatggtgggtccccacaatggcctggaagtgtctcctacagtcccatgtatcacatacaggcttgtagagtgattggaagatgttggagccttcagacgtggggcttgatgggaagtcttcaggtcactgggggaatgttcatgaatagcagactgagatctggacccttctgtccttgcgtttgcttcttgattacaatatgttgaacaaatttcctttcccaccacatgcccctatcacgatgtcttgccacctctaaagccctgaactagggccaagtgaccatgcactgaaactgtgagcccaaataaccttccctttattaagtcgactctctctgatattttattatagtaatgaaaaactgactgacaacagtggcttaccaagcatgggtattttctcaaagtcagatagtgtgaccttcccttcccaaggggaggcccttctgtccctctgaacgtagtgctaagtactgccagaggactcagggactcagaatcctccccacccagcaaggcttgggcttccatagtccaaatgccagcttgtctgtgaatttccagtgggaaataacaggtgttgctggctcaagaaccagtgagtttgtgaaacttcacttgcctggaggccaggccagcacgggcacagagacagggaaagggagagtttctgtaaggatgccacgtgtaaagtgagcagccagcacctggaatagcaggtgtgtattcagtgggaaccgtggcggtgcaaattcctcagacatcagatggggctggacgctgcctctgttttcctgactgcagaaacaagctctttccgtgtgtagggatgagggtcaagtagtgtgacagcctggaagttgagggtccaagcttagctacaacagcagttgctgggtgaccagttgtccctaatgtatgtggtagattacagtgtctaaatgtacaggccctttaaaaggcctgctaggtttcaaaccctgctgggttatttactaactatgaggcctgtgatggtaaaacagaaatactcgaagcttctgggaaagttggagacatcacttggaaggcaccatgatggtacattgtaaagtgccttgaataatgtgtgtgtgtgtgtgtcagtggaaacataactgtcaaccccaacttccttcatatgtaaagacgtgagctgagtctatgcttgtggtgacagtgacaaagatttccatggtgatagtcagtgtctccggctgatgtgtctcactggtgctattctagggtctttgactcacccagtcctcagtgcataggcctctgttaaactacctgtggcaggcagggccaccaaggcgcgactactgtataggtcaggccaggctgatggccaggatcattacgtctggaaggtcttcagggtcttcatccctgttcctatgggcccacctgacctccctactcttcctctgataatggcagccacccagctgagcctggcagctgagtggcctaaatttagccctctggctttagtggtgagccacaggaaaagaccaaggggaaaaccaacgggctctacattttcaaaatacctaccctgcagaccataagtgcagcaaatgttaggccagcagaggggcctacgccctctgcttgtttttgagggaggcctggcaaacaatcttatttccttctccttcatcttccccggttgagctgccgtggagaatggccagtcggaagtggtctctcccctgggagagggtgctgggtggtgggagtacccctgtggctgctgattggtttggctgggtctgccctgggtttggctcacacagttgggcccctggcatgagagctctggccagcttgtctcaacagggtgtctgctttagggagcctggtcagatggaggcttggggcagatgatgcccacaaagctgtctgtgttactgaacccttgagcgcccttacctatatagatgcacttaattttaaccacctaaggagagagggaagtctccatcttccttttatgtggaagtggaagcccaggcaggatgggccccattttcaaaaaccacacagtggctcatcaaataagtatctggggatgaaactcagcctgctcgtgtagcctgtccacccatcactgcggggactgcctgttacaatagtgttcagacatttttacacacatttttcatctgaagcctcagtatattaggaggtagaaactctgattgatcctactgtatagctttagaactaaggctcatagggcctttctcctcacccagggtcttgacggggcctcctggaatgatgaggacagccatattgattttggggctgtggggctcctgctcctttgctgtgtccaaagccattgcgccacatgtgtgacctgctgttagctgttttcaggccacttccccggcctggaagcgttgtcctcactggtttatcctgggtgctttatcaccatggtctgcaagtaaaagggagggcacaggggtttctccagatttaaaattgtgtcagcagcctccacaggcagacatgggtcccaggttcccaaacactgggcccaaattggtccataagaccttcagcaatgaagattctttgcagtcatcctggtgaaaattaaagggcattttaatattccatttcccccttttgcatcatcttagcatatttaatgttaaatatctgtttgtttactgtgcatgcttgatgtgtatgtgtgagtgcaggcgtgcatgtgttaccggcgtgcatatggaggttcgaagacagttttcaggagttcattttctcttccaccccgcagagtgtgagtcactcttactgtttctgctgtgctgtatagtgcaggctagctagcctgagagcttcagggagatgctcctgtcttcccatgctgtatagtgcaggctagctagcctgagagcttcagggagatgctcctgtcttcccatgctgtatagtgcaggctagctagcctgagagcttcagggagatgctcctgtcttcccatgctgtatagtgcaggctagctagcctgagagcttcagggagatgctcctgtcttcccatgctgtatagtgcaggctagctagcctgagagcttcagggagatgctcctgtcttcccatgctgtatagtgcaggctagctagcctgaggtgctcttccttcctttttctcttcgctgcatgagtgctgtggtttcagatgtgtgccagactgtttcttctaggttctaggaatcatgctctgatcattaggcttctgtggtaagtccacatctatctgcctgtctatctatctatctatctatctatctatctatctacctatctatcagatctatagctatcatatcatctatctatcatcttctatcagtctatcttctgtctgtctgtctatctatcatctatcatcaatctattatgtctgtctatctatctatctatctatcttatctaatctatcatcaatctatcatatctaatcatcaatctatcatgtctatctaatcatctatcatctatttaatgtatgttttatatatatacatatagagttaaaacatataatcattaaatttgacgtctcagtcattctaagtgttttatgtcttagtctatctatctatctatctatcttatctaatctatcatcaatctatcatatctaatcatcaatctatcatgtctatctaatcatctatcatctatttaatgtatgttttatatatatacatatagagttaaaacatataatcattaaatttgacgtctcagtcattctaagtgttttatgtcttagtagcattgaatacgtgcccatgatgatacagccgtcactattatcatccctgcccagaatttttacatcttcccaaacagaaatcctgtctccattaaacccactgacttccctttgtcttctcttcccagctttggcaagcacattgcactttttttctgtctgtgaacctgaacacttcaaggacttcatctgagtgtcctttcttgctggatgatttctcctaggggttatccacatgctctttggtgttagagtttccttcctaggggttatcctcatgctctctggtgttagaatttccttcctaggggttatccacgtgctctctggtgttagagtttccttcctaggggttatccacatgccctctggtgttagaatgtccttccttgctgtctcaggtgatattctgtgtgtctgggtggactcagggctgctcctagataaagtactgaggataaagaggtgactccggcccatgtggttcttctcagcgagtgctagaggagcagatttaccctctttctggtgatattgacacttactgattaagatggattcttccaggtttacacattgtaaagtcaactagtcagcattctattcttgttcattaattactatttttaataagcatttttttgtggaaatgccttgagaacattatcttctgggtcaaattttcactctctaatttggtgctgtgtccagctataattctgttattctatcatccttcagcggtttttggtgtgtgattgtgtgcatggatatgcatgatcacatgtgagtggacacacatgtgccacgacatgtatgcatatgtcagaatagcttcaggtgttggtgcttgcttcctgccttgtttgaggcagggcatctccttcgtcgttccctgctgtggttgccaggctggtctggtcagcccacaggcttctggccattctcctgtctctgcctcccagcttgctgtaggagcgctgggattgtggatgcatggtaccacgccctgctactttaacgtgcactccaggcattcaaagtcagcttttcatagtgtgtagcatgtgctttccccactggcccatctcttcggccctcgtctacattttcaaataggggattctacccagtgtgactttcatgtgaagtaacctagcattttctctgttcacccttgacttacaccactgtttcacagaggaaacagttctttattgttgcaaggttctaacaacacatagtaggtcaaaaccacgaacactatgccacacatctctggccaggactcaagaatggcttctctgagtgtttctggctcaggcctctctctcagcttatgtttctgacctggctgggctgcaatcagctgagagtagctgggacgagacggtttgggctaacctgttgttaaggggtattcagcattaaccacctgggtaaaatctcagaccttagctaggctgcagtagtgcacacctttaatcccagtacttgggaggcagaggcaggaagatttctgagttcaaggccagcctggtctacagagtgagttccaggacggccagagctacactcagagaaaccctgtcttgataaaccaaaaagaaagaaaaaaagaaaagaaaaatcaatcaatcaatcaatcaatcaatcaagcaagcaagcaataaacccagaccttgcctgccaataagacacaatgatcgaagccagtctagattttacctcctcagctaacatgtggaggagctcctaaaacttctctacagatgtagttcaagttagtgacctgaacccttgctttgccgcttcgcgcttgtgggaccgtaggcagatgacatggaataattccctgtctgggacatggggataattaatacccacctcctggggttttgaggtgatcgtttcaatcacacatgtgaatctaattgttcaaacagccaagtgctatgcgacccccagggaatgtgtctgcaagacagactttacccaggaagagctgaaagatgtcaacagccagaggatgcctctttaccccacgacctttgtaagtcacactgacaggagaactggataaatgacaggcttctccgtcctgtatggcttttgagtaaaacctcagggaaaacctgcttagtttggctacagtccctccccacccccaactctttataaagggcccggtgtcatctatgaaagcattgtacagagcgttcagaggctgggatagatgtgagtgcctagggaaactgtgggttagccacgtggttccatcccggctaggaatgggctttgttcttgctgctttcactagagccttgagttgcccttgggagcccagcctcactgctgccacaacagataatgcccaacagggttgcttcttacacacacatatgcttaattgtgtgtgtgtgtgtgtgtgtgaagtatgtatgaagtatgtatgagtgagcgagtttgagtgtgtatctatgagagtgtgtgtgagtgtgtgtattcatgtatgcacatgtgcacattatttgaatcaaatagaggacctggctcttgctagggacacacaagccacatccccagccctgacagtcattggttggactgatatagagacagtaaagagtaggtgcaagtaacaccagttattactcattggctagcaagaaacaacctgtgagtctgagtttccccttaaagaaccttccctcaagtggaaaaaaattatattcccttccctgggtaacttcctgtgttatatcctcagtgcccccaccccacccctgcctgaggcagtttatgctttatctgtgtggttctcacgtatatgtgggtccgaggtatataggttgtccttaatcccttggcctgggtttcattggcctcttaggattctcttactttaattcttactgtctgttaatgtgatttagagagctcaaccttgcagagtccaccaactgggggagccctgggttaggctccaccattattggtgctatacttcaggtaagcttctgttgccttctgtgaaatgaggataaccagtacctgcctcataagcctgttttgaggctcagagctgctgctattctgtgcaacaaatttagatcgttctaaagttaaaagcatagtgacactcaagaaataccacttacattgttcaagtggcagttatgaaacttaatgccaccaccaaaatttattccctatcccaaaacatctgaaaggttcaaatatgcccatggatccggtcttgttccattttctgttgctcaatacactgcctgaagcttgacaatttataaggaaagaagcctatttgtactcatagttttggagactgagaagcctatgggcatgatgccacttctgcctcacgctgctttagttcatggcacaccatggaggaccacacaggcactgctactcagaggacaagggacacaggaaatcttgctttagaacaacctgctctaactgataactaacccagtctcaagagaccaagaactcccttgtcagaaaggcatggatccatttataaggggtcaccgccatggtcccatcacctgacactcgcacactgatgaattagggtgcccatgcttaaagttttgaaggatacacccaaacttagcagatcatgtttgagttttttaaaaaaaaaaaccaagtaggatattaatatgtttatccacttggaaatgaagggggcaggggcacctctgagggccaggtctgtccttgctcacttgcatatattgtttgaaatattctcagaggcatttctcccggtgctttgactttcccagaaataacccaaatcccttgcaaaatatgttctctgatcttaccccctgatcagggcaagtgttcttcactccaagctgcagactcagtgctttgatgattagaccaaagttaaacctgtttgcaatgcatcatgccgaggaaacaggtcttggagtaccccgtgagaggcagaacacaacagccaggcttattgtttagaatatgattgaagtgggaatctcaactttctgttgactgatctttaaggctttggcaaattcaagtgtgtccttgtgaatagtccttggccaagccactcagcaaacctcctactcacgagagccattccagctcaaaacaacttgtgaaggaagctattactaaggagaatactgactagccagaatgatcgacggagtcaccttaggctaaaagaaacaagcaaaagaaaattataacctcaaaagtgagcatgctgaaaatcccgaaagagctaaaggaaagaatagcatctattaaaaagttaagaagcgatgaaatagagaataagtaaagatgaaatgagaatataggatgcaaaaagaaccaattagaaaccggcaagtgtagaatgtcattttgggttcattaataaaacctcactattgacttaatctgacatgactgaagaaaaaagtagtgaattggaagtcagttctgagggacacaacccagagggacagcataaaagagtaaaagaacagttaggagacatggagagtctcagcaaggctcagaggtcttcagtggggatggagagggaatgcatccgaagcaggatttgataagataccaaagactaattttctcataattgaggaaaacagtcctggaactgaaaaagcaccatgcatgatatataacaatgaatccccgtaggcagaggtgtgatggtgcatgcctttaatcatgtgctggagagtctgaggtgttggatctgtataagtcccaggccagcttggtctacatagtgagaccttatttttaaaaatccacatatcagcatgtcatagtggctcttcagaacctcaaacaacacaactcttagtagctgcagagagggtagacagattttctccaaagaaagataactagactgtcagcagcagccactgccagaggtctcagaggagaaccttggaagttggtgcagagggagctcaggtgtcagcctggacatccacgctcagttctgctggcacacggcagcagggatggaggaaaagcatgttcagttagttagacgaaaggaagaatgtttaatatgcactgacactcaccgagaggaactctacagggcggctgtggttggctgtgggttttgagtgtgtcctcatgggtcatgactaggaaacttggtccccagagttgggatagagggggtcctttcagaggcaaggcctagtagaaggggctaccgtcaaaaaggaccagagttggtgcctaaggagcaagttgggcctgaatccctttcttcctatcttgtgtggtttcctcctcttggacaaagccatcacccgcactgtggggcagcccagctttcctctctggtgtctggacacaggaggctccctgatcttgtactgcctcttagtagatgcttggtctcgagtgctttgttaaagcaacagagcaaggacttataacaaaatgcctagttacagaagattaagtccaaaaggatggacttaaagtgaaactaaccaagggctggtgatgttgcttagcaggcaggaaggactttccatagtctgcataaacccttgtctataatcccagcaggaggactgcaagtctaaggctatcctcagtgccatcgtgagttcaggggtagcctgaattacatgagacctttcttaaaaaaaaaccaaaccaaaccaaaccaaaccaaaccaaaccaaaccaaaccaaaccaaaccaaaccaaaccaagcagaaaggttctagaaagaagccgtgtccttttcatctgattgtttccacgcaggaaggaaacccggcgtttccagatctctgtttttttcaagtcaactcataaaagccaaaacttttgtgtgaaatttcctgacttttgagaacttgtgacaaaaatatttaacacatcaaggtcttcagtactttgtaaaggttaaataaaaggccagtccactgtttgtcctacagaaagtgaaccttagttttgcctcagctcttcagcgtctgtcccacgagcaggaaacttcagagtggaggtggtgcttatgccgtgaaggcatttaagcagacctgtaggtaggaacggcccaggggcctcttgggaggataacatgtctgatgggagtgagattgactggggctgcagatatttggatattgtcattttctcatgccctttctccttaagagctgtgttccagataaaccctgccttagtgtatgtctctgagactgaaggcaggttgatggatctgaattacacagaatgtaatttattgagagacttactggaggaagggtggagtatggcccagcatggcagcaaggccagttggctgtcggtaatttggggtggagtgcggggacaaaggagacttaatgcaaattgggaagtgcctggtgtttctaaagctccttatgtgtcaggcacattctttacaggagggggtctagctggaagtctccacacatcagtgtagttggccaagaaattgcaggaaaacccagtgaggagcactcactcaagatggccgcagtcatgtcaaactgaatactcataagctggaagctgggtctttctgagttgtgcagtttggcttctttgtccttgctcttttctctggggcgaggggtggggaaggaatgaacactgtctggtgacaaaggtgaggatgccagtgagaaaggggaggaggagctagccggggacactcaggagatcctgtgggccgcttcccaaggcacgatgtcctgtgtccagtcctttaattggaaacagcgctgtccacagtgtggtgacagtgtggtaattcacaggaatttctcaaaagcgcaagcctctggctctgaagttttctaaccagcagggcagctgtgctcaaaacgggttcagtttctttgacatcacagcggatgtgggtagttcagggaagctggagggtaaataaagtgcctcaggttgtcgccctgcacttgctataggcctccccagggccaggagctgcctcttgggacctgcctcgctggaaagttagagtccaaagccagccctgtcaggcccaggctctgaaactgccttcaaaacttgtcgctcctgatttagtgtgggcaaagctgcatagtaccatggacatgtatacatccccacaatgcctgcagtgttctttcatgtatccatttgtttgcttttaatcacctgtgtatttaatcgcatatagtttaaacgctcacatttatgttgctacttcattttatgatcttgaacattttttaaaaaaaggtcaatttttgaagcacaaaagtaaagtaaaatgacattagcaattgattggcacccatcaatccagtgtcattgaatctctgtcatcatcacaagaggcaaggtggattttggtaaggacacaggttttgtgttggctaggttcagttttcattttgaccttgctcttgtgtgaccaggtgactctggctaagtgacttttttttttttttgcagggtttgggggaggatgatagcatctgccttacagagaggctgtgaggataaaagaataataccttgtatataaaatttgctcagtaaatgttacaaattatcactgtttttgttactattggacaagcacgggagcaagcatccttgggactgtaaaagaaggcttcaaggtcgaggatagagcttatcctatccctgggactgaactagaaggttaggaagggaagctctaaccttcgtgtctcagggccagtgcacatttgtctctgcttctttctgcccatttttctggcctccatctctgcacaggctctttccacctgcatttttggtttgtggccaccagcccaggccttcagtgcccatcacaactgacagaaacacatgttttaatggagatgtcagggagggggaaagcaggctgtgaatattacatctctaatttgaattgccacccaccacctatctattccaggcctagtgactggaggcctagggactgtagtgcactgtaccaggatggcagggggatacacataacctcccctttccaagggttgccagtttctgtactgtaaaacaaggatgtattaagtgcttatgatgtgctagagaatcaaacaggtgataaaccctgccctcgggaactgttctccataggacaccatcaagcaggagagttaccctcagaacctggcctctcatggcctcttctctcgttgtggcttctataatctccttcctcctgcatccatccagtccttcccactgcagtctctggccctgccgtggggtctcctgtctctcaagaacagcaattcccttccttatctctgctctgcctttagcagcttgctggttgtctcctggacagtcctgccatgtctgacagcatcctgtccttcctccagcatctccctcccagtttcctgttaccgtgagcttcacagccgccctcataggcaccgagccttgggatgcttggctctgttttcccaccctgccagctgtccacttgtgtgaatctgtttctgtctgctcacatctgcctgcttctcagtcctggcatggttcctcctggctttagtttcgcctttccaacctatcttattagtcagcctgattaatattcctgaaatgcaccctggtgctctcctcttcttcaatcttatcttctgggcagaatgcaccctcctcccggcatctcacaacttctctgatctggctccacctttactctctagctgtgtttccatagtttccgtattcttttaattaaaaagaatatgatcatgggtatttttgtttgcatgtatgtttgtgcaccactagtgtgtctgggaccctaggaagtcagaagtggacttccctggaccttctctggactggagtttcagaaggttgtgatctgccacgtgggtaccagagagtgaacgaggatccactgcaagaatagccagtgttcctaaccactgagctaagtcgctcagctcagcgttccatattcctgatggctgtgctaacggattcagaatgaggcgtgacttccaggcttcaagcctttgggtgtctatccaccatcacatcccattttccttcttccattctccccaggacttggctcatctttctcattggctcagccaggcatggcccattttgccttcctcctctgaggccctccagcttcccctgacatcctctctactgcttaccatttgttagctactctgtagagaacctataggggggcttggagttcaccccagtaaatacaaaagctaggcaaagctagaacctccctgttctcaactggcttcgaggtaactcccccagtgtctgcttcaaacaagtgccacccgtgctctgcctgcaccaagcatctggacttgccttggttccttggaagtgggaggccccgtcatctttaagtcctttcttcatagcatgcaattgaaggcctgcaaaactgtggccagatagagactgctttggagccagatgtatgactggctggataagcggatgatgaatgccagtttcccttaagagtctctttgtccccactttctccatgaaggtgaaattcagcttttccttctccatgactggctgctttagaacagtgttgaggattccagcactccttcatttcctatctcaggccccatatgagaaatgtgcagataggcagtgcccctaaggctggaccactgacatgagttgaagtgtacacttcacaaggatgcccatgtcagagctcagtatcctccagggactgcttctcagacccactaccccctgctgtggatgctcaagccatgctatatcaagcacgggataggtgcacagacaacataggttcatcttctaatatagtgtaggtcatctttagataacatgcactacccaacacagtacagcaattgtgtcactagtggctgtatcatgggaaatgataataatggatacattcagtatagacacagttagcaccggcctttgttcatctttggtctgcagttagctgaatccaggcatgtgggacctgtacatagaaagggctactgtgaacatttcagtggtacctgggatgccagtctgtatcttttgctggagtattatctccatcaccttcctgcaagtatcacttctctttgcctggccaggtcctcttgggactttagacttcggattagctgtcagggctttcaggaacctctcctgacctcgtttgattagatttcccttcccagagccacggtgacactacactgtgtttgctctgtccccaggttttctctccctgtgtggggattgtactgtctccccaatgcctgcaccatgctggtagacacagggtagatacctaatacacacacacattcaaagaacgcatgaggtgtgtgtggtgcaggaacaggtggctggtgggcgaagcaggtgctaagtgatatgtatgggtcagcacctgtcgcagacctgtctttgacagctgcagagccccagtggcattcagtcccaggtgcttcttggagccggctaggcagctctgttgatctggattgggctggcttgcatgctgagatcagctccttttgctaaggtgagcagagcaatgtagctccacagcttatgctgagaaaacctctagcgatgatggctcgggtccaaggatgagtggacacctggcttccggcaggaccaggtggccataggcacaccacactctattaagcgaaggccagctcctatccaagagcagggggtggatctcacatggcaaaccttggggtacaaggagggattgaaggaataagccttccttggaagcaccccttcactcaaagcattgatcggaaggcctgggctgaagctcaccactcccggaaccttgtgaaattacagctgtctcctgcgtgtcattcattttatcatttcatgaagcctttctccagcatcctctcaaactggggaatggttacacactgtaaagggctatgacaggaatagctagctagattgttctcctgaagtcacttggccaacagtactggcagggatgtgggcaatagagagagggtgtgtggtaaagatgtgaccactggcctggcatcccaggctcccaacagcttaggttccctggtaaccggaagctctttgggctctcataaataacgggcataatgagtttcaaaaagcaccacacatcacgtggttgtaggctatgatcatgaatggctaccaccttggccagagtggcaatttgacaagacaagtgcaccagatgtcccttcctttctccagatggtaagtctggggacaaagtggcctgaaaagataatcctgtggtccaagaaaagaatcgggaagatacccgaagtgttctgcttctgcataaaccctggagagggggcggggggtggggggggtctacctgcataactgctgtgactgtaccccatgttcttccaggctcatctacccagtggatggaaatgctcttgatcatctttcaggagtagtttctccttccagggatgctggcgagacaggcattacttccctcctgaaagtttatggtccttggtgattagcaatgacttctctgcagtggaaacagggcattcagttgggcactggggttaggctggacccacaggcctttctcccactggtcttggaggctagtaactaataacgctgcaaaccagccctggctctggagaacgcatgggaatgggaggcagggcttgaggccattccccccagacacagggaaggcaggttttggtccgtttgtttggttggtttggttttttttgtttattttttttttattacatattttcctcaattacatttccaatgctatcccaaaagtcccccataccctcccccccacttccctactcactcattcccattttttttggccctggcattcccctgtactggggcatatacagtttgcgtgtccaatgggcctctctttccagtgatggccgactaggccatcttttgatgcatatgcagctagagtcaagagctccggggtactggttagttcataatgttgttccacctatagggttgcagatccctttagctccttgggtactttctctagctcctccaattggtttggtttgtttttgaaagatccatccggatgggaggcataaccctagtgtagtgggttacgggttctctgggtctgggccactgctcagtgcagaggcctctggatggactcatgtcatctgaggctgcattcctttctccacaaaccatcacagatctccagaggctggcccttggatggccttgtggaaacacctgggcccaaatgtggccagttcccgcagcgccagaggaagcgcctgaatgcttcttactgagagcacattattatttttctcttccctcttgcatgaatcattttgcctggaatcttcccagtgagggttcaactggctaattgacactgtccctgaaatcggggaatctgcctcacccacccaagtagctgagacttaaagggatagggacgtgtcgttccgggctcacccagtaccgagctcacagtttgagtatagcattttagaatttcagagcccagtggccttggggaagtcatgatagaacttcccactgagtgtagccataagctccgtagggtttgtggtcagcttttaagatgtgatgtatatgaactttccagaagatgggcctgggcgtggactggccattagcctttatgactctccaccctagttcctgatggctaccctgaccccaccgtcttgctcttgacttctctggaagaggaagtcagacagacagtagggtccagcctctagaaaggtggttttgttgttgtgtttgactgagttttactggggtccctgcaattctcagtgtagaccaggcgggtctcaaactcacagagatctgcttgcctctgcctctggagtcctgggattaaaggtgtgtgcctccacatctggcctgggcgttttacttaaattaaactgattaattaattgtgcatatttatatctgattagcgattgtgtgggtggagagcaaatgtgaggtatgtatgtcctttctaagctatctctgaacttaagctttgtcttgcaaatggaagtttaattttccttgtagtggggaaacttataacaacataatcaggggctggcaaagacttgatactttataagaagtagcctgtgggtataaaggcctcctagggaattgaggtgcctttccctcagccagggagtgagtgtgagggtacagaagaactatttcctccccgtttccctctcccttcctttcagccctcccatcctcttccctccatatacagagtctctctaagttgcacaggttggcttagaacttgtgattgttctgccttctgagttccgggatggcaggcatgtaccatcacagccaggctagtatgacccaaactggatcacctttcttcatatcagatgcttgtctatgcactgggtacccttctgggagaaaggtaggctcagagccctataacgatcagggtttcactctgtgccccttgacctttccaacagactacagcaagtagtgggtgtcaccagcttttgtgccttagctgtattccttgctaactatatattccctaccctgaagtctttttacactccgaagtcttcagtagcatatcatccattcattccccaatgaatgccggcccccagcagtatcttcattcagaagggcaaatgtaagacaatcagacaggacaggacaggacaggcagtacagaggaagttaggatctgttgtctctgtgttcttgctagagcagactgtaccgggcaacccacactggtgctggggagaaacgaggggaggccagggaagagggaggaggcccaggaggtgggagctaatggtcacgtgctcagtgctggtggcaggcttcgtagctggaggtgattctggtaagctgctgagcatctaacccgattgaggccaaaatgcagcacagaggcatgtggaggtactgtccatttggctaacatacagtaggcttttaatggcaggatggacttctccactttctatggaatctaaggcccacatcttgagggccagaaaagcaaccccttggcccactgacctagaacagtaaagccatgtgcccgaagtcttatgaagagttgctatccaagcaggaagcacggagacctttgcaccctgctgccaagtggcgggctaacactcgggagggtttttttccacttcagtttaagacctaagagctgaaatatgagcttagcaaagaattccgtatgtgtgtaaaggacaaatggatttatgttgggatgttacgtgcgtaccccgagtgccactgggaatgactgggttccagcctgagacttctaattcactagagcattgggagaaatgtctggaggagaggagccatacacatttcttcgttgattgagcttggctgacaattgcagttgctgagcaggcaaacatactttatactctttgaaggcgccatgcttttggtttgtttagagacgaggtctcaggtggcttgcactggcctcaaatttgttatgtagttgaggttgatgttgaactcctgatccccggctgggctcccaaagccctgggattacaggtatgcactgccacacttggtttctctggtgctggacaggcagtgtaccagctgagctacacccccagatggaggggcttctaataaagaaataacaccgctaaaatgactcactgggagagataaacaaagttgacccctccttcagtggtcccaacaacaaacaaggtagaattccaccagcgtttactctggggatgtgttgggcttcctacagagcaatgggtgaaggctaatgggaaggcacatgggtggccttaaaacagtctcactggaaagtttgcacccagcctggatgactccccgatggctgtgtagatggagaccctttccctagtccttctcagcctaaatactctaactcagaggttctcacccttcctagtgttgtgacccttgaatgcgtttcctcatgttgttgacctctgaccataaaatgattttgttgctactccataactataattgtgctacttttatgaaccataatgtaaatatctgatatgcaggatatctgatttgtgacccccccttttgggggtgactcctcaaaaggggttgccacccacagattgagaacggctgctctagcctctcccagaggccatatgcaactagggcaaaattgcttataactggttgagaggaatggctggatactcaggtgagggtctcacaaccccgccctccccccccacaagagaccatcaatggtcaacaaacccgttgggatgatcttttgcaagtgtgcccagctaaacccgggaaatggtgacactggtttaaactctagtcctgcacaacaataataaacatgccaaaaggattaaaccatgtgtatatcttttgctatttagggaactctttctttctttctttttttgagacagggtttctctgtgtagccctggctgtcctggaacttgctttgtagaccaggctgcccttgaactcagaaatctgcctgcctctgcctcccgagtgctgggattaaaggcgtgcgccaccacgcccagtttatgggttgagtatgagtgggtctgctgtcagatgtgttttgtatgttcccctaaaggtccatgtgttaaaatcttggtcggtcactagcctgcagcactgttggaaagtggtagaacctttacggagcgggacttatgaaaggaaagtgtgtgtctgacaagggtatcaggccgctggactttcctggttttctttttccttcttaatgccatgtagtttggagaagtttcctgtctggcacatcccctgccaccactgtatgcccctgatgacccaaagctgcaggccaagtggtcatatactgagaccttagaatccagtgctggagtcaacctttcctctttttaaatcgatttgcctcggatatttgttacaataacagaaagccatgccttaccagactgtggtacccatggctattccggtctcagcgctgaggcttttaacccatcagcaagctgctaggcagctcgaatggtttggtgatggtttcccaaggcttagcctcaacgttgctcagttggactttgaggacgtgcttagctggagttcttttattacgtcgtacttcactccgtctactcccagggacagagagagtcccccgaagagtttattttgagggttcactgatgggcagtcagatttggcaatgatgggtgaatgagcttgatttatgggaactgtaggtgataataatcaggcgccatgtgctcacctcaggaatctaacctgcattcctgttgtggaatgaatttggggttccctttgagaatcaccgcagacttttacagtgctagaaggaaaacacaacatacacactacacacacccccacacggactcacagacatacaaacacaggcagagacagacagtgagacacacacacacacacacacacacacacacacacacacacgggagagggagagggagagagagagagagagagagagagagagagagagagagagnnnnnnnnnnnnnnnnnnnncacacacacacacacacacacacacacacacacacacacacgcacacgcacacgcacacacacacacacagagagagagagagagagagagagagagagagagagagagaagaaatcagatcttttttgtttctccttctttcctttctgaaaaccaatagggaagaaagtgcgaaagtgcacagatgccagaacgagagaatgaggtcatggctcataattcatgtggcctccaggaacataaatcatgcagcctgctgtaaccattccatgggaagcctctgggaacagtggccacaatatccataaagtatttgggctccagcatgagcctggatagccttccaagtggcatcctcatcagaaggtcaaggaaaggtacccttcgtcctgtaactgccaggtgaatgcacacgggctggaggcagtggggagctactctgctttggcttcctagccttgtaagtgaaggcccctgcacattaagcacatttgaacttgtgctgtcagattgtgttctctcacactattgtacactattttacccctagaggaggcaaccaccctacagtgctcagccgtgcctttcccagggcccattgatagtttgcaaaagttgatgcgtctccttctgttagaggcataatgtctgttgggaagaaacttaggaaattataaacaaaacaaaacaaaagcaaacaaacaaagcggaaaatggaacatgagtttacatgcttcctccctcaacccaaatctgactaggtgcccatttttgtaaataaagttctattgaaacaactatgtacattcatgtttttaattgtctgtggctactgttgtcctgtctactccactctccttagtctcctgtgtgctgactatttacagaggttctcagaatggtgcaatgtctattgtatttgtttccaaggctgctgtggctacagttctgctgacttaaaacacacatttattttcttttggatctggaagccaggaactcaaaatctatcgcactagtgcaaatctgagtgtcagcagagcttgctcctatcagaggctcaggatgagactctcttccttgtctcttttcgctggcaactggcatcccttggtttgaagcctcaccaggagtctgtttcatggctgcattgccttctccctctgtccagtaaagactgtaccacatgtataccaaggcctttgtgctgcctcaagtgagagcgtgtgtttgccttccctgttgtgaactaatggtgcagccaatcactgttaaccggggtgacagacaggtacccagggtggcattttgtaagatgatcttaggcggtccacagggacacagcggccccagtggctcccacaaagggacagtcttcccttttcagattgtcctctgtctctctgattacctaaaatagtctctgcttgcttccagcatgtcttcaacacttctcatccttgccaaccctcttctatcaaaaaagaaagcaggtctcgggctatagaatcctagagaactcactagccttatatctgctgcatttatttttatagccgcccccttttctaccagtggaaatactagagagcatcccatagaaatgaaaacgagctggaaatgcaactcagaggtagaatatctccccccccccccccagcatctgtgaactcctaggttcgattcctagtactgaaaagtaagttgaaagagcgacaatttcaagccgggcagtggtggcgcacgcctttaatcccagcactcgggaggcagaggcagacggatttctgagttcgaggccagcttggtctacaaagtgagttccaggacagccagggctacacagacaaaccctgtcttgaaacaaacaaacaaacaaacaaacaaaaaaacaaacaaacaaacaaaaaaagagagacaatttaaaaacgtgaattaaaccaggtgtagtgatgcacgcctttcaccccaggagacaggcaagcggagctctgtgagttcaaggcctgcctgatttgcacagtgagttctaggacaaacagagctacacagtgagacactctatcttgaaacccccctcctacaaatgaaaccaaccaaccaaccaacccatgaattaagtgagtatagggcaagtctttcttagagaaatcacctgatgacagctgtgaggtctgtgaccgatcagaagcctccaggctggccgtcccctctctgcttcccacacaaagtgaggcatcctgaatccgaggccacagctggatgctctcagtgttaacgacatctcatttttttctcatttcaatgcatctgatcctttagggaccactgggcatcagagttctgaatattaatctcctgttgagattgatcacagccactttaactcagggacttgggcaggaggcggcctggcttctccctgcctgtcctttacatttcattggatatctggaagtcaggaaaatctgacagggactggctattatttggacacagcacaggtgttaggggaaacgttctctcccacctcgtcagattttgatggcgtctcttttgctgactgttccttgcttgcaggaactgcagaactggatctccctgcttgaatggatgtagggaatggggatatcttattccttatctccacagatttatatgaaatgctaattcttgagtgtgggggactatgagggccatatcactttcttttacatggggccgatcttcatcatcagtacaaaataaccgttattattttataatgctagcccacagagcatgcctccttttggggtggaggtgagaagtggaacagtagtgtggactatattactcagtgccttcccagcttatgtgtaccccactcctcagaaagctgcaagtagatgggatttgtttcaacaaagcctctgtagtttgtaggcctacatcatctacttctctaaaggaatggtggaggtaagaccagactgatgggtagcatgtctgacagatatttgggaagcatctctggcacacgatataagacaggcagcccaaagattcaagtatcaggtgaagctaggcaagccacctcatgcctgtgcctctttctcctccttgaaacggaaagctgtctcccaaggctgtagcatagattcatggaaaacactgaactccacaaatgcctgcttttaattccctccagtttgcaaatgggaaaaccacaggccagagatgaactggcttgctcgaggtcacaggacttgacagtgtccaggccaagctctgactgagtacagccaagtttaacgtcagactcagctttggctacagtagcacccagtggcccatttattccagagagagaaacagcttcatcttggagctgatttccttcaaagacttaggagcctggctaaacccttgcagtacctggcagagcctgtaaattccttgctctttttcagacctcagtttttttcaccaatgaaatggtgcaatagctatctcttcttctatggtcagagtggcagtgctgttaacctacctggcttggtaaagactaatgaaggaagatagagatccttgttcagaggaaggagggagaggagatgatacaaagtgctaggaaccagctagcccggacagggacagagattctgaagagaccatctcacagagagggtactctcctggtctcttgggctgctccctgctgctcaaagacaaagcagatgcatctgggcctgggcccaggttgccagggtaactgcctcagcagctgcctgggaccttgcagctgaggcccttggttgccagggaggccacagagctggagggaatggtcagggggctgccaaaggaaagctgcatctctgtgtaagggaggctggagaaaggggtagtcgtgggatcatagaaccctcctgtggggctgtggacaactgacatggaaggggaccctggggaatagctttgtgaccagagcctttggtgctcattgtacacatgatgtttccttcactgcatccctactatgtgccagatcctgtgtgaaatgctttatgcacgtatcaactcttaccattgacaggcagatttagaagccagccaggctggctgtccccagagcctctgagcatctcccctttttactatgtcaggacacagtcccctcctaagtgtctggcatgttatttttaatctattactggcaacaactctgcgggacaggtagagttacttgtcctctacagtgactggacacccatgatttatagtgtacccctggtaaggaaaagtaattttcagtgacattggctagatgaattgactggccacaccattttctctggggttggtaggatacttggctttgggctgggcagtgagggtcttctttaacctgtttttccaggagttttcagaacccactatctgctcctgtcagagcacatgtgcacacatgggagccataggagccagtatgtcctgccctttctgggcttctgtttctattcagggaaatgggtgtaatgagtaaattctattgaatcttaaatgattgctctcctagtgatgaaatagtctacactgtgcttgccgcaaggcacacatgagtctgagagctcgggagacatgcgtgtgctggaggaatggactgaattttaacaaaatttagggctaggggatgagccaccaggtaaagtgcttgctgtgcaaacatgaggctcaggcagcttgctagaagggatgtaaaagccagcaagctgcctaccacttcactgcacaggaagtggagaaggggcatccctggaggaagttagctgagcatactggctgaaatggggtgctctgggtgcagtgaggcatcctgactcaataaataaggtggaccacagtccaggaatacatcacacttgggttttcacatgtacctcatatgtgtgtgaacatgtacacagacatcatatatacatatgtgcaaaaacaacataaaatttcaatagccacccatagctagtgccgactgagttggatggtgtggtgctaacagatgcctagcaaagatccaggagacttctctgaggtgtttgttgtttttttgggtttttttgcaacaatacagtgctggttgtatgatctccatttcacaaaggaaacctgtcccagctcgaagctgactaagtgaacaggtgatcgccaaagcctgctttgctgtcccacaaagcccaggacctccagagggcctgtcctcaaagtcggaatgcattgtgatggacaggcccaggcatacctcagtgacagtggagtgtagggtggagacaggaagcgaggcatggtctctggaagggaaagcagtaaggactcccctgggggacacaccctgatcctatctgtcccttaatccctgtgagctctggttctggccaaatctcttctcccaagtcttagtccattcatccacaagaacagggtgataatacaagcagccattatcatgacgaccaggagagatgcacacggaggtgagacccccaccagcttgccatcctgactagctctggggagctgagattgggtacagggcacacaatcttgctgtttgggatgttcaaaccatgagaggccttttggtgccaggggtttcaggatgaccccttcattctcaagaccaggctggcaggggagatcaggtgggagctgggaggtgcattttaaactacccttttaggtggtattctggtacccgttcatgactcaagagggtatctgcaggctcggggctgaggcctgcaggcaagctggcaggcttccccctgctagacctgttcaccagagctcagcttagcatcaagttctgggtagggctactgttttcttcttttttttcttatggaaaatttcaaccaataacaagagtaagtaagtaaagctagcactatcacacgcccaccctcccccatatcagccacaacagctaagcttctagcgttaactcagtcagggccagctctgcttgacggaaaacttccatcctctatcacccagctcagggttaggatgaagcaaatctaagcagctgtgtgtgtgtgtgtgtgtgtgtgtgtgtgtgtgtgtgtgtgtgtaagtaccttgcaggttacttctctcctgtcaccacgtaggttccaaggattgatctcaggctgtcaggcttggtggcaagcccctatgcctgctgagccctctcgtctcatcagcctggctcagtatttttgtactagggtttatgggactgagcatcgacccagctggagatgaccaggttaaacattcataaatttgccttttatttttctacagaatgatacagtcctttggggctttagagatggctcagtggctcagagcacttgctgctcttgcagaggacccgggttctgctgccagcaccgtatgggggctcacaaccacctgtagctctagttcccaggggtccattgctttcttctgacctctgtgggcaggcagcaggcctgcacgcggtacacatatataaatgcaggcaaaacactcatatagatgaaagaaattaactcaaaaaatgtgagaaaagtgagattcccttttttttccttataaacctaaaaaaatctcaaaaaaatgatctttttttttttctttttctggtttttgggtgtttacgttttgtttgttttgaggcagagtttcactgtgtagccctggttggttgcaacttgctacataggtcaatctggctttaaactcatagaggtaagcctgtctttgtatcctcagtgccaggattaaaggtgtgcaccatcacgaatcgctttttttttttttgaaaagatattttgcccagatgaattgaagatgtgtgtttattcagaccctttccttcagatgtttgtgacggctatctcatggttgcccacaataggaagccctcaacgaggccttcagtcgataagcaaataaatgaaacctgtacattggaatctcattctatggtaaaagaactgaactgccaagttacaaaatgatatgggaacattgtaaatgtgttgcagagaggcagagctgttcaggagggctgctctctgaaagggtccagctctagacgggggtggggggggtggggagaagacaggaaaacatacagggggtgctgagaggacaggatgggcacaggaagaggggcagaaagggtgatgactaggcaaaccacagggggctctgagggccacaaaactgtgctgcatggagcgataatggtgagcctgtcgattacagccttgtctgaaccttcagaaggcagagcaccaagagagaacctcaaagtaaaatatgggctcaaagcgagagtgtatctggactagttcttctgtggtaacaagtatagtgggccagtaaaaatatcattgagaagagaaatggtgcaggggctggggggagggggaagggcgctctccgtgccttctgttcaggctttgggtaaacctgaatttactccagtgttgtcactatgcccctccttagaagtgggaacaaaacacccatggaaggagttacagaaacaaagtatggagctgagatgaaaggatggaccatgtagagactgccatatccagggatccaccccataatcagcttccaaatgctgacaccattgcatacactagcaagattttactgaaaggacccagatgtagctgtctcttgtgagactatgccggggcctagcaaacacagaagtggatgctcacagtcagctaatggatggatcacagggctcccaatggaggagctagagaaagtacccaaggagctaaagggatcttcaaccctataggtggaacaacattatgaactaaccagtacccctgagctcttgactctagctgcatatgtatcaaaagatggcctagtcggccatcactggaaagagaggcccattggacacgcagactttgtgtgccccggtacaggggaacgccagggccaaagggggggagtggnnnnnnnnnnnnnnnnnnnnnnnnnnnnnnnnnnnnnnnnnnnnnnnnnnnnnnnnnnnnnnnnnnnnnnnnnnnnnnnnnnnnnnnnnnnnnnnnnnnnnnnnnnnnnnnnnnnnnnnnnnnnnnnnnnnnnnnnnnnnnnnnnnnnnnnnnnnnnnnnnnnnnnnnnnnnnnnnnnnnnnnnnnnnnnnnnnnnnnnnnnnnnnnnnnnnnnnnnnnnnnnnnnnnnnnnnnnnnaaaaaaaaaaaaaaaaaaagaaaaactagaattcctaatcccgtgggtcttcttgtgcttaggaggctgtggctatgacatggtgcgtgggcctggttattgctgtgggtggcagctttggtgagactgtggcctgcagcgtgagctggaacatgactaggtagggagtctgtggattcttaggcaccgaatgccagagacatagggtctttacccctgtaagcagggggggctactgagaaggtatcaggagagtccggaggtgaatgcttcctgagacctgggctgtaggattagtcttgcctcttctctgagctccatatccccgagtgtagagccagaagacagtactgagtggtcaggggagggtctgaggtcaaagccggtcccaacttcccaagccctccctccctctccctgcctcaccccctttgtttttctgtctcactgtgccatgctttggttggataccttccctcagcgggtgtggggggacatctactgcacaaggctgtgcctggggagccgctccattttgaattaatttgatttttttccctctttgaaatcttcaagaagaaaagctcctagcagccctgtggagggggacacagaactcaggggactgggaaccaactcccccgggggttcctgagcagggacaggctgcaggggggaatggaagggtggcctctgattactactagacaccttgacttccagttagctaggctcagaaggttccctgtgtgcagcgatttggaggcttcagctggctgtgtgcattgggggaggtgtctctgccccttccagactgtctcctgtcattacaggatgatttatgagcttttctgctaaaacatgagaacactggcaagccgactctgccctgcagcccttctaataaggggcatcgtgttatgcagaggacgctggggaggaagatggaggacttagaagcgggttgccctttgttttgttttaacatgaaaaacaccgagctcttagtggattccagtctattgtggtgtgtggtgtccaaagctgtattgtcactttctgaggggcgtgagtttgattcctagcttggctttgcttttaggaccatagcctgatggtgccctctgggccaccactccctcacttacaggggtgaagctggggataccagcagttattctccttctagggattctctgtggctgacacaagagtagcacctgcagaccatgagcccatgaaacgatagcatcatcgagatgattctgacgggggaggttctggatgttggtaggggaatatgcaaaagagattgtcgtggcgatgtgtgcaatgacatttcacccatttacacacacaggcctatgcacgtgcctgtgtggctgatgacagttcatagagtataatgtgaccttcaccaagcctctgagcttaggttacatgaagcctctgtgcatcctctgtagaaactgatggtgtgcaagagtatgtgtgtacatgtgtgtacagtctatgtgtatgtgtgtaaaacctgatagcgagagccacaccaagtgtgcatagtgagcatatacacgtgtatatgtgtatgtatatatggggcatgtgaatattgtgtacatgtggtatgtgtatgtgtatgcatgcggtatatgtgtgtacatgtatgtttaccacatgtatgcatgtggtatgagcatgtatgtaaatgtgacacgtgtgtgtatgtatatgtgtgtgtgcacatgcatggcatgcatagccatgtgacttttgcctaaatgtgtctgggatgtgaggttggtgaagagtgtgtggttatctaaccaatatgtggcatgtgctgtggtcctgtgtgtgaactttgtgtttttctgtgtgtttgtatgtgtgcctgtgtgtcacatgagatcctcatgttcagaggctttgtgggctgctctcctgagggacccgttttgtgctgagagcccacactcagagcttggatttcatttgtagggacctcctatagggcttgcaagaatggtaacaaccatcatccaaagccagtcctggtagtctgtgaatccaggagtcccatggtgcactggggatggtggtggagccagtgggtcctccaggcctcgctggaaggagaccctcctgccagggctacagagcagcagtgtgggcctcctgctgcctaccctcaggatgaacccgaaaggctctgctgttgtacagttttagttgacatataaaatgtttctgtctaagtggaagtagctaacagaggatgtatttctgccatgttttaaaaaattaacattttagaataacattacaccattctcttcaaagtagagcaaaccaaagctcagtaacattgcaattaaaaaagttgtctttccatgaactcttacataatctagaagaatgtatagatggggtgcagctccattcatcggacccatgtagtgctcagatcagggtgtgtgggcatgctcagaccccagaagacaaccttgagttcctctgggtcagcatccctctaaagatgacgacttctctctctaacgctgtaaaccacctttcctggtctcatttttctcgactgattcagtaaacacaaggtccttgcctttcacgatgatgctgtacgcagccctactttctcaccgtgtagcatttccctcaacaatctcacttgagaacaccacttccattcttattggacttttggagttacttctaatgcttcattattgacactgacgttttggggtatttctcagggagtggaattgccaggacatagggagacttctacagtatgtcagtattctcaattgtccattggagagaacctaaaactcttcatatcattttatctttctgaatccataattcccttcaatttcctttacagaattttttcttaatattgttttatacggaaaacttatacatttattgtatttcttttaacctatatataaattaaaatagacatttagacttttgaagttatattttatttatttacttactatttatttatttgaattgtagaggggttgtagtcctttgaatctaggatctctctctctctctctccccatccccccaaccttcctctgtgtatccctggctgtcctggaactgctttgtagaccaggctggacttgaactcacagagatccatctgcctctgccttccaaatactaggattaaaggcatgagccaccaggcctggttcaaggaaggttttcttttcttttttattagatattttctttatatacatttcaaatgctatcccgaaagttccctataccctccctctgccctgctcccctacccacccactcccacttcttggccctggcattcccctgtacaggggcatataaagtttgcgataccaatgggcctctcttcccaatgatggccgactaggccatcttctgctacatatgcagctagagatacaagctctgggggtactggttagttcatattgttgttcctcctatagggttgtagaccccttcagctcctttggtgctttctctagcttctccattggggtccctgtgttccatcttatagatgactgtgagcatccacttctgtatttgccaggcactggcatagcctcatacgagacagctataccagggtcccttcatcaaaatcttgctggcaaatgcaatagtgtctgggtttggtggctgattatgggatggatccccgggtggggtagtctctggatagtccatcctttcgtcttagctccaaactttgtctctgtaactcaaggaatgttttctaacatcagtatttgaaattgttctttttgggacacccagacatttttgccattttgggtacttccatcatagactctgaatgaatgcatccttagtttttcttcaggaaatagagaacaggaccattgaaaggagtgaggtgggaaaggtgtggcattgtcttggcagaactggggagcgtatgggggggacatgaggcgctcatatggactctcccacactttggtctgcagatcccttgagaagtcttgttgtattcccaggtgggtctgtgccagtttgcagataccccttttgatgatgatggtggtgggaaggggatgctgggccattcaaggatgagcttgagtgaactgcaaaatttgtggactgtggaaggggaatcctgaacatcagatccatgctaaagagctggatgtaacccacaggcagaggggagcctggggtgtttttgagaagtacaagttgggtgtcttgcagagctggatctgttgctgctcctgagtggtggcagtgatggtatcaggacaaaacaatgggccatgacttgtaggatatcaggtcacattaagattgtcaggggttgtaaggactccagtgagtttttttccagcttgactcccagcttttgaatggtcctctgggtgcccagacccagcgggatcctcaacacttccccaagtgtggatgaggctctttcagtgctccgtgagatgtttatacatggagcttagggtgatggaaagcagatcagacatgaccctgaggactgctggaactccagatgcattctgatgccctctgggtcctgcctgccctgccctagatgagaaaaatccaaaccctctctctgagccacttccttttggttgacaaagaacaagtctcttgggcgaggcctctggctttttggcaagccctagttgtaatatgtacataggatttaaaaactgttgttttcatagaacgtattgctgatatcccaggctgtaagcacctctctcccttttctggagcttactatattgtgtttttgtctaagcaaactgattacactgaggaaagttagtcagtcctcctgtcatgtggagtaacaatgtagccagtggcctgagcagtagtcagaaacatgagcatgtcttggggtgattagaatctgggaaacagtaggttagactgtctagcagaaaggccatgccgaatctcagcatagcaaaactggggctctggctgggctctgggggggttatgggtccactgctgtctcccgccattccctgatgttccgtgccttgcctcccacagagatccgcacgcagctggtggagcagttcaaatgcctggagcagcagtccgagtcgcggctgcagctgctgcaagacttgcaggagttcttccgcaggaaagctgagattgagctggagtattcccgaagcctggagaagctggctgagcgcttctcctccaagattcgcagctcccgggagcaccagttcaagtgagaagttggctgcgggtcctgggatgggaggcagagctgggcaggagggttgttggcagatgcaattggcgaaggaggccaaaactggaggaggaagtcaggactggaccttgacctgcaaggttctgctaagtcccgccagggtgctgcagcttcctcttgcctccaggagctagttgttcttctgtatcaagtaaaggtagagacggcttccatgccaaaggatgttgtagacaggagatgagtgacttggagctgcatttgctatgcccagccgagactcagtacctcctttcagcacatcctggctttatcaagttggattttacttgggtaccagctcgcccaccatgtccttagaatgtcttctcatggaccgtgtccacagacatccctcttccttgctgtgatggaggacctcagtacttaaacactttcctaccttattatttaaaacacagagcccctcctaccctaactggtcacaccctgacctctgggtctttctgacctggcagatttgaagacctctccttacgctctgagttgttgctggagctgtccaccgggggtgtacacagtgggtcttatcacttcctcttgatttggaagcagctcccctcacatcctaagtgtgagcattggggagagggaagagggcaggcctcggggacacagggatccctaattccctcaccttgtctgtaatgagccctactagctcctcaagggttcattaactcagccaccagatggatgggagccccagctggcaatcaggccaagtgagctgttcgccacactatgaaagtctaattagggggtcacccaggccagtgcagctggggtagaccctctacatgatgctaatgtgatagtacagccctgatggcttttggaagttgagttttctggacaggctgacacaccttggaccccagggtatggcgtctcttcatggggtctgtgccgtgctctgatccttcagcctggatgtcccgagaaatcaggctgtcgcagagattcttcacttaagggtgcccaagttgctaggttacctctcaaggctgaaggagagtcctggggcttgtttgactgtcatttgcaggaagactagctgagggaagagattggatattgtgaacgggactgaggaaagagatgagaggagggaaagggaaaaaagggagggtggaagagtggaattattaattcttggtctgcgcagttcacctgtagcacaacagattagggacagacctgggacaggacctcatgtcctccagcactaggtcaggttaccttttgtgctatggtccacttcttcctacgacccaggctttccccaatctccctgggctttggggatgtttacagctgtggaaggtgctaaatttagggccagacttagccggggtgagttccatgtggacttgatttaaagaaaggcccaagggctgtcgtggtgggctaacaggctatgggacttgctgccaagcctgacaacttgactttgattcccagagcccatatggtagaaggagagagctaacctctcacaagtcgttctctgaccttcacagggcctgatgctggctctcaggtctcccctggggatggttgaatatttgtagagcaggagtgtttccagattgctgtccttctctgacctgagatgggagggatgtgtaatgggaacaacgcagagctagtatgctgggctgaggccttggtctatcccttgtggatgtgcactgggcttcaaagactgaagtgacagagagggtgactggtgagtgaggtttctactacctagtggaaggcttgacccatggttggtacaaatgttgactgaataaatgtccagcggtagttagagttgccatagagggaagactgcctcagactcatgaaatcatttggtgctgcactgctgtgaagacaatgtgaacttgacttctatctggagaatggggaccaccaaagggatagtgtataaggtgtggccacacagaggcttatccaaaatgcagagtctgagggctcacccaacctctgcatcagtagctctggagctctggggattctagtgaccaaccactttgatggttttctagatgacaaatagttctcagtcttctcataggctgtgctggccttccttgtcaccagcatacaagtcacagtcttgtcctttctggagcaggcctggaggagcctgtcttctccttctgatggcctagaaccaggatcattcctgaagagaaagatgctattgagggcagcatataggggcctgaccctgcttctcaggtagatgagtggcctggcccaaacaagttggctaggtctggagagagagaatttctgggaccaattctgtatttgggaatcactgactattctggaactcactatgtagacaaggctggccttgaactgagagattcacaaacttctgactcttgggggctgggagtaaaggtgtataccgccatacacctcagtgtgccagcacagggtgaaaggctgagagagaggtttgtgttaagtaagcctgttgtcttccatctggaagctctctggctatagacttgcccctccccaagataagtagttatactttacaaactagctctccccagcatcccagttgcaaagctctgctgtgcacaaactccaaagtgtaatgacattcttctcaaatagtgctctgtacttggggctcgttttagtcctattcctttggtttggggtagttcttgcctttcaggggagaggggaatatgcctcatgacagacctctgtccagggttaagtgatgctgcagaccataaagaaaagcagcagggaattctgttcaaacacactagaaagatttggggggaaagccagagtttggggagagctgggcagtgcttggctagataccgcataatagtctatggagatcctaggtgccagacagttgggagtgtcttccagcttcacagagcagttgagagagagagagggtcccagagaacaactggcttcatttccaagaaagtgctttttattgggggaaaaaagtgccatggttttcacagctgcattgtgtctctaaaatgatagaatagttgagatttagccttccgggttattgctggacagagaaacattttttgcaacatgtaatttgagactgatgtgtagaggatccagggtgaagaggtctgggcagaagggatgaggaagccctcaggttgggcttgtgtctctattgatcattatgactacttgatatcacagcaatagctgttccaggttccctcacgcctaccataccttgtgctatgtgctctcccaggtaaatagcagccatcttatgccatctacatggcagatgttgtgacatgcaggacagataattctatattttcctagacactagtaaggtttcgagatattagtttgcctgggacacagctatagctgcaggtagttcgggcaggattcgaatcctggtttacctgactccggatgcaaaggcgcctctggctgggctgccatatggcagatccatctctcagctctctgcctgggttagtgcttgctggagtccctatctaaccagacctgtgtgggcatctgatcagcgtctgtgaaaggctctgtgaaaagcctctggtctggcttggctagttgtgggtctcacagagctcaggtcaggtttgtgaggaaccatacagtttatagatctggtctgccaccttcatcctgctaggtccttgaaagcaaggaggccattccttatctctctgtctctttgtggttatctctacctctgtgtctccatgtctcttctctgtcatacacaatgcagaacggaaggctcactgggtctccctgaaccttaacttaaattctcttcagccttgggaagaaagcctccttgatgctcctgcactagtaacacctctctaatcttccagcaaacctcaggcttcagctcgggcctaagatacataatgctgtttgtttcccttataaccacctttctcggctaccgtctatttatggcaagcatttacagaaagacaaccatgactaggcaaagttctttctaaaatatcttcagaaaaagacggcagtctggggagacgactctgtggataagaacattcactgttccagcatgaagacctgagctcaaattcacaaaacccacatagagaccaggtgcggttgcacatgcctgtaacagagcttcagagagggcagaggcaggaggatcactgaggctgttagccaacctagataaaggttcagtgacagaccttgtctcaggggaaaaaagtgtagagagaaagagtaggagtcctgctgttttacacacacacacacacacacacacacacacacgcacgcacgcatgcaccacacccacccacatgcaagcactcacacacacacacacacacacacacacacacacacgcatgcaccacacacacccacatgcaagcacacacacacacacacacacacacacacacacacacacacacatatcacacacacacaccacacatgcaagcacacacacactcgaccatacccatacccacccacccccacaccacacatgcaagcacacacacttaagcacacacatgcatgcatgcgcatgcacacacatacttaaaacgaaaggcagacactgagcctgggtctggggatgctgtaatcctgatgtcagcaccaactcacgccagggttcgtttcccatcccctataggttagtatcttccctcacctttacctcccaccgccagcttctatcagctccaatggctatcacatttacttcatattgttcttgtctacctcccatcatctcagacatctctcttacttccctgcacctctgtcttcactgtgtcacaccccttccacctccacccttcatcgtctccactgttcctacctttcaaccaccatctactttgctgcacaccatctatcttccaccttctcttggcccgtccatcccctcatcgcctgtatctcctgccatctgttttccagcacattccacaactttgcactacgtctggtttctggcttccaccttccatcctccacccccattatcttcttcttctctaacatccacttccccttgttcatcatccactgccttccaccttctgtatcctccactttccacctttcatcaccaccacattcttttctcttccatggcaggtttcttgaggctctttatgatggctacagctccttcttctcttcttagctttccttatggttctcatggctcctacacacataccctggaaacaccataatcatcaaactatttaccaggttgtgagtttgtgtgtgtgtgtgtgtgtgtgtgtgtgtatgtgcatatatttcatctatgtgccaatagcactttttctgtattaaggatgatgggtagctttaagaagtgatatttatataggagtttagttctgtctccatccacttaggtaggtagaataggtaggtggactttaaggatgatataggaacttatactttgcaaattcatccatcagcctttagctcatgcatctgagaattctggtgggacatggaaagtcagggcatgtgtcatagtctccaaaggacagaaaaggggcttgaagggcagacacagtggggttctcaggacccacaattgaagggtgaaatagctggccagagagccttcggttggcccttcttttgcttggttctgtatataccacatgtcatgtccattttcttgctagttaaaccaaggcacagaggtccgtatgggaggagagtgaggctgcccaggtgtttcctagtgggataggggttttcatttcaggactcgactgaagatggggatcaggtgcctgaagagggtgtcaggtgtgggggtttatgctctccagatcccaagatcccaggacactgggtttagatccacatgcctcctgggttctgcaggcttggatctgggttttgtttgctaagcggaattttccagcccccagccgggaagctggcagagctagcttgctgctaatttcattttcctaactcaccagcttggcaaggcttggcctctccagcttcagtctcttggaacctcattcccacctttcttagccaaagaaagcgagcaagctgtgactcaccagaaatgctcactgctagtttctagccataaagaagaaaatatatacatctgcggtagttctgcccttatgtcctagctcagcagcttctgcctgccggggagaggcttcgaggcaagatgagaaaagcaagagagttagtgtgcctgagatgaggggaggctggctcgcttcgttttaatgtcttctaaaatggagactgcagcaaggaacagtagcagagtgagctagagatcagccctgggtgccattttgaagaaagaacgtgtggtcccaggaaaaggagagcggacgcacaggttcctggtactccaccctcatctgtcacctgcactcttcatattgatttctgcagtccccataatgcggatggtgcatgggatgaggtagcaggccccccaggacccagctgccctgcggatcctccagcctcactatccaccacgttcacccctatgaatcttgcttcctctacttcgcttatctttactgagtcccttaaatgtatgtgcccaactccttgccccccaggaaggccactcgtctagtacttttcctttgccacctctaattcttcttagaagcctaccttacctttctcctcatagacacttcagtgaacctcgaagtcaggtctcaagactcctgctctgagcccctatggcacggcatgccccttcattctagcactttctgaccatctagttctacactcaaccgggacatgtccagtgactgtcttccctcagcacactgtcaactgtgtggagaacacacacgctcaaaggctctcttgagcctggccctacagattgcccatcataaaggcgttgcgcagatgagccactgaataacaacgagaaagctcttttcttgtgtttagtgacatggtttgaatagctaggccacaagcataggtgacctttacatggtaacatccagaggaggtaggcataggagaggactcctcccagggccaggtgtctttttgtttccccttggtgactcttattggtggcccacttaggtggtggtgagggtctggtatccttctgcagcatgactagctccaactctaatcctggctgtggacagctcacctggtgtagtcattgcttttggttgctgtgattaagccatgattaaaagagactcagggaagaaaaggttcattttgttggcttagggttccagaggggagtccataatgactgaggcttcttcactagctaggattcacctccccagatagcacctaaccagggaccaagggtccagatagaggaacctaccgaggacatttctcattcaagccactgtgcccagcattgagttggcctgagcggggccccacacatttgtgtagccaaaggacagggaggagatgggaaggcagagctagctgtttcccatgcttggtggaacttcagagtgggcatgctgcttagaaggcagataggttcactccccctgcctgtcccttccttgttccttgtcatgggagtggggagagttgcctctctgactgcagccttgtcagactctgggggaggggggaactgtctcccttcccagccaaaattctaaccttttcttcattcccaaaggctctttctagttccctgggtgcctagccagaaaacaggtgccatgctggatttttcctcctctgctcccaccctaaacctgtccagtttgcctcctaaatccagtcaatacccaggccctgaatccctccacttctcccttggccctggatgccactccctgtcctctcagggtcccactatggacagttcatacctttccttttttttaacattagatccttctatggctccctgatgacttcaggatgaagcttagactctctaatgatgcttaaaggtcttttgctgttggtctctgccttattcaccagattcaccaggcacgatttgtcaccctgggtctcacaccagagtatcatgtaggacccctcagctgcctgtcagctaaccaacatgcccttttcttcttttggctggccctttggtcatatttctctacccagaaggctctgccttgggaatgtccgctctagcctttgattaccccccccccaagtctagaaagtgctttctggatctggtatggggaggctctgcagcctctttcccatgcatacattaatgaggctgcagcagcatctcctgtctatggtgtatttttcttactgagtggaaggctcagacagaggctcacaagagaatttgagcttctacacacacagcacctggatgagctggtgcatgtgaacatgtgcaaatgcgtgcactcacatgtgaacacatataaatgcatgtacccacaagttagctgctgctgctgcatctcacctcctcttcctgcccctccccctcctccctcctacactcttccacaacctgctcttgggctgtgccacctcctggccccacaggttctgttctttctgcctgtcttctgccatttcgttctggccaggcaacctaattaaaggccatcattaaagtcaatcttgcacttccgagttctttcataatcactcgcctttttgctttcctctgaaacgtccataatttttacacatttaattccccagatgctgttcagttcttgcatcccagattgagctaagcccctgaagcaatttcagtaacagctcaattatggcatctctcctttaatcctttcatttctatcaccacccaggaagcagtaggaagcgagatgggatgtcttctctgcccaaacctgcttccttctctgcagtgctccatagtctgtgtcattggcttcctcccagttgcccgaaagccaaatctcagagccaccattctctcttactcccactcccctttccagcagctcttcagaataaaacgatccctgctgaggagtgtttgtttggacctcagtggtcccagtgccaccacccagcattcaccttctccctctactggcctaggattccttcatgagtggtgctgctgtctgtttatgtccatacttacccacctgctcatccatctatccactcatcatctgtatcttctatccttccacctactcatccatccacccacccacccctccatccatgtatctactccagccagccagccacctacctacatatctaccccactcatccgtctatccatccatctaaccattatgtccctacacaccatccaatttctctcagtgattttttttccaaaacacacattggttaaacttgtaaataacctctgtgacttcctatgtcctggaacaggaattctcaactctgactacatagtaaaatgtcgaacattttagaacaccaacatcaagctgcatcctagagcactgaattcactttgccctggtactttcataagttcctgaggctattctagtgtgtaacatgggctcaaacctctgtgtcctgggtggcagggttccaactgctttgacctgacactccacatctgctgcaatcaggcctctagcttgtctttccggccttactgtcaatgatcctctagtagcattctcagaatttggggcttcctgagagaatttattattctctctaactctctgtctgtctgtctgtctgcctgcctgcctgactgactgtctgcctgtttttttttctgtttctgtctctctttctcactctgtctctctgtctctctgtctctctctctctgtctctctgtctctctctctctctctctctctctctctctctctctctctcgtgtatacacaaacacacacacacacacacacacacacacacacacacacacacacgtctgattggaaactccatacttgaccttcaatgacccagtataagcgagaacttttctcaagggtcatcttctgcagcatgtgttctgtggtaaccagcaccttgctgggccctgagggcagtgagtacaatggaaacattgcctgtgctctgagagctctcagaaaggtgagggtgggacatggaactaaaagcagcatatatcaggcagcctcctggaactataagacattccaggagataatttatgaagagaagagttatcttttggctcacagtcttgtaggattcagtttgtaagtaggctttcaggtctcctgtgtgtgtgtatgtgtgtgtgtgtgtgtgtgtgtgtgtgtgtgtgtgtgtgtagggcacagcatatcatggtgtgaatccgtggcacagcagagctgatagccccttgcctgggaagtgtagaagaggaagaatggggtctcatgagactatgctttcagtaaattaaaggccccccaactcttataggtgatcccatcttctgacagcaccactttgggaaccaagtgtttaatgcacggcctcatgggagacactcagatccaaactttaacatagaacttctcaaacatgcgtcagagtccccaagagggcttgtgaagcaggggtgccaggccaaaccccagggtttctgactaatgctcctgacagtctgtacttccaccaagctgcagcacaacgccagggttgcgggccagagaggacacttgaaatctgccatgctcagacaaggtcaggggactgctctctgagaaggaaatgtcatttgagctatactgaagaagtagaggaggcagtcagggaagaaggaggtgcaaagtatggtccaggtagcgagaagggcatgtgtgcatgtcccagcaggaagaacctggcatgcaaacagaagagactggcgtacaagtgcataggaggagcgtgcctgggcttcttgcaactctagcaggatggatggagttactctagagactgctctgggtgtgtctgcatcgttgacctacacagcccccctcttcaattcttctttctttccttcaatctatctgtctgtctgtctgtctttctatctaatctatctatctatctatctatctatctatctatctatctatctatctatttgtttatttattgtctcagcctcttgacaaggagcccctggcctgttgataaacacagctcatccaggagccgctgtggagttaatacactgggatcctggctggcactgaattttaacagatctttccagtgaccagcaaaggacaaatctttagtattctatcttcttcatgtttcctcagatagtcaaatatcctccctgacaatgtgtactcccattattcccaggtcaagctagtgttgctggtctgaccactgcctctatctcttcttccaaatgtttgctgcatagattttcagcccgtttgttgatagaaggaaaaagaatatccatgaagttaaatgggtttcttaccttctaaacttccaggagctggggagctggtgagggaggaacatcccagaaccccctggggcagttctttacaacacccctggggggcaccctggtgaggaggtgcagtcacagtgggagttgcctacctcagtagctttggccacagtggctgcaggggcagaacaaggcggggttaggggcctctggagctagtggagggccttagcctttccacactagaaagtacaccaagaaaaagattcagtcttggagaacacgaatttcccacctagggttaagatggtgtcattgactgcagttgagtttagccttttgcctttctccttacagaagagtgtatgtgccttctcagccctacagaggaatctctgagaaggttgagacagagggattctctgttgtttcattagcctgggaagcagctactgcatagctaaagcttctcagactccagctcacactagagtgcccgggaggccttcttaaaacccagatcgccaggcctaaggctggagaatgagcttctgatctgtttccaggggatcacagtgtgacaccccattttagcataatgtccagccagagtcagtctgagcatctatcggccactataggacaaaagcttatttgtcccataggtacccgtgtcttcctttgctccttttaccacgcccagagcccaagcccttttggccaactcgcacaaggttgtcattgtcacactggtttctaggaggtcaggagctctttagagaaggacaaaagtgtccagagcccaggggactctcagggttagtgtagacaggttagaggagaggaaatgtctttttgtaatttccactgcacagacctagagaccataaaataatcagagatattcttcccagaaaagggaagggtgcatggcagatgccatcttcagagaaagcatagggcatagacagagtcagagacccaaggccagcacgctctataactgtggaatatcaccttaattctctggcctgtttccgcagttctattccgtaggtgtagtaagattgactttgatagtgactatgagactcaagagtgagtgaccaggtgaactgacatgaagccaacctgagctgtcttggttcccacaggaaggatcaatacctcctctcgcccgtgaactgttggtatctggtactgcatcagactcggcgggagagccgagaccatgccaccctcaacgacatcttcatgaacaatgtcatcgtccgcctctcccagatcagtgaagatgtcatcagactcttcaaaaaggtgagctgccctatctgccctgggtctctttcccagaccagccatgataatagtctactgtcatggtgagatgttgcttgggcacaagggaccaggatggcttgtgttgaataatacagagggcaagggctacactgtgctgtcctggctcagatgtgacctctgcatttgcctttgaaagactgtgtgtactcagccaccttagcacccatagccacaggaataaaaacctttaggtgcctaggtgtgcagtatacgtgtattatgtgcaatctgggaaaatggaggtagatgagagccccaaaacggaaacgagcagaaattttatcagtcaatcacttggagattttaagagattatgtatacctgtacaaattcatttccttgcatgtttataatttgtgtactttctagaatgcatacacatttccccctgtgtaagatcataccacatatttgacattgctgcctacttatgtcacctaccaggcttatataatgctctctgtcaaaattttcccacgctgaaaacgttcacttgtgttttgaaagattgcatagccattattctgctgttacaaaaagctccgctgtgcgctttttcccatatccctagtcacttaggattggtttccacaatgagaatgataggaatgctgatttacatttttgaagacttcggtggaacaccgcattgctaaaaaaaaaaaaaaaaaaaaaaaaaggttttacccagggaactatgcaggagccaagggtaaagagaacggtccctttttatgtcccctgaagcctttgtccggagcttctgacacaatgtctggcacaatggagcctctgtgtaaatgtgtgaagaactggattttctgtaaaatgggtgtgtcatgttgccttgtcctctcagtctgttgagtgaggctgaaaccaggtgctccttggggcccacatgaagttcaaacatgctctcctgtgtggaaggacctcagtaggaaggtagattcctaaacgtttaagaaagaaaacaaacttggtagcatcctttaaaaaccctgcatgtcctgtgtatcttcagcttgtaacttaagcctgtgccctgatttccaacttgtgtgaaatgctcactggctgtctcagctggtgttagatgggataagtctttctcctgtgacctatgcatccttaagcttatgacttaagttgcctgtgcctcagtttctcacttgtaaaatgacttggaaacaccctggagggttttggcagtacaggctgctctggccttgctcagagctggctgtgaacccaggccagcagcgattgtaacacattgtagctcagttcgtcttcccaggtaccattttagtgatctggtggcccagcattgctggacacatgaggggacaagctgctgacttgcgggacaattgcctctctaaggtctgatcgtccgtcttgaggatgatacccacagaactgtagccgctggctcgtgtcctcccaatgcacaatatgctacgcatctccacttgatgctgtgtttaggaaatgtggtctgagtttaatatttgcataagcaaacataattagaaaggtaaatacagtgtcaagaaaaaaaatcccacagtgcttcacagaggccagctgaaaagcgttagctgtctgctgctttggagtcctaatcccagtctggtccccgcctgctgctgctgctgtcagagccttttcctgggtggggatgacttagagagaaagggtcgtcaaggcctttaggaaatgaaggctcttttttcctgagttgagccgggggacaagtgagatagatctttgcagttctcatttagtctgacagcagcctgacttgtgatggaggttaacagggtggaaaataatgaaaaatgtccacagctgagctcctggctgccttgttaccaggcctgtcctgtagaacaaaggaagtgacctggcctctgtgggctgggagagtgtcagggacaagtgtgcctggctgatttagcccaccaaggccccattgttttgaccacattatatataacttagaactaagccctgtgctccttataaagggagagttcctgtacttacctcaaccacttctggactaagttttggacaaatggtgggaagatgcattccattttatgtaggtaggccaaagtcttgagccatttcaaggaaaggccaaatgtggctttaacccattatcattagtgtgacagaacttttagagtctgtctctgcactgtctcactgaccactctagtcagtttctttaagtctcagttttctcatctggaaagtgggtctggtacaatgactacagaggggaccacttgaaagagccgaggcaggtcaaatgccaatgtaagatatgatgctgagaccccactcaagaatggaagcctgttagtggttcctaatatggtggcatgcgactactcaggggccctagtgcttggtgggggtttcctgctgaggcagaagagggaattagattctctggaatgggtttaacagacagttgtgagcattcatgtgggttctgggaactgaacctgtatcctctgcaagagatgaaagtgctcttaagcactgagccattccctagccttggggactcctgcctaagaaatggcagcacttcaaattccagaaacccatgtcaccttctggtgcagatctgtcatctagcagctccggaggctgagccatcatgagttcaagtacaaggccagctcctgccacagagtgaatacaaggctaacccagtcaacttagtgagaccctgtctcaaaaaccgaaaggagtgtacgtggctcatcagactaaacatgttccaaagagatacttgtgtctgtcaatctatcaaaccaataaacaatgagccccacagagacagggacttctccaggaatctcatgtcagcagaagggaaaggtgtgtgtgtgtgtgtgtgtgtgtgcgcgtgcgcgcgcatgtatgcacacaagcacgtttggctctctgcacatttgtcttcctgaaagagatttcatcacaatttcataacaagttgaatcccagacaaagatgggtcagtggtgtgactacaccttaactaggacagcatagcctgggctctctgtttaaatttccatctcacttcagggaccccagggttcttctggatctctttgtccctcttctcaaagtggccctcttctcaaagcattgaataaatctctttctgcttcccacttttttttttttttttttttcgagacagggtttctctgtgtagccctggctgtcctggaactcactttgtagaccaggctggcctcgaactcagaaatccgcctgcctctgcctccctagtgctgggattaaaggcgtgcgccatcactgcccggcttctgctttccactgttaatttggatctttttattgctttgttgatggcaggttgctgggcctgacagcacagattgtgactcccataccactcctacctcagttcagtatcagaagggcttgggaggtggcccagagactgaactcttactagcatacataactagcgctgtgctcagtccccagcaccagggaaagtcatttggaagttcatggtggtgggctggctttacgagcagggatctggctcagtcaaagccaagtgggactgaaggagatcctagaggcaatctgaaatgatcaggaccatggctgtggacaatagaaatacgattcaccctgcttcaaggtgggagaaaggggggttttcagcatttccaggatgaccttggctttacgcgcggggggcttttgggacacaaagattattatcagaaaatagtctctttgtttttactgtgtgactctggtatctgtttcccatttttccagaagattgacacttttttgttgttgttaggttgtcccattctcatgaccagggggctcccagcagctccaggcttacatatcttgtctattttaagtccgtttatctagcattagatcttctaagggctgattggcccagcacagtcatgtgatgatcagtgacctcgtgtctgtggtcaagaagctaccttccttgactaagtgtaggtagatgcttacctctggagcaagaggtgctcagttccgctgatccacagagctgaggataggtgagggtggctccccaagaaaagttcgggtgtccttatgagaaacaagagataatagatgaccactggcctctctattccactccttctatcatacttaactagatgtccctcaacaaaggatgcatcttacctctcaggattgctcagtctgtctggggacagctgtgatcaatagacagtccttcgatgcagaaatgcaatattacaagttttgttctggcggcacccttgagggctacaaatatccaataaatgcagaaacctgttcattgcttgggggcagaaatcaaaagaatccagccaggtctttgcttcttagaaacaaatatttctgttcgcttgaatcttctctatggtttgcttgtgctctcccctgaggcttctcactatgggctgtgttgagttcctctgacctgtcaggagaaaggactgaccagcctggagtggagcgggctgtctcaacacttcaactcactgatcatgcctcacctgaaacctctagattttttttttgcatcaatttttttgaatctggcctgtattctgtgcctcttcacccctcacacacatttgttccctttaaacttcatctaattagattctggccaaatgacttaagggacttttcagacagtgagaaggtagcttttttcagaaggcatacactcctcctctgttggaaaggctcatatcataactttttcatgtcgtctttgcctgtgttaccttcttgggtgatttgaatgatgtctcctataagtcttgagccccggtccccatggctgctgtttggaaaggattaggaagcatggccttactgaaggaggtgtgtgactgggtccaggcttggtggtttcgaaaggctccttctctttgtctccttctgtggttcaagatgtgatttctcagctgtttctgcctctatgccctcactccaccatagcagactctaatctgctggaaccataagcccaattaaatacttttttatcccataagttgtttggtcatggtggtttatcataccaatagaaaagtagcctatataccttctcatgacaattgattggctctgtgtttgagtcttttcctttaggatgtagaaagtggggctgagatttgagaatgagttaaacatgagggtgactggcaggcgtgggggcgggaggttggtgttgaagggtaaatgtgagtctcccaattgggaaagggagttggaatctcggacagaatagatcatggcggaggtcagagatagcatcaggactgaggttacaaacagtagtctaagccaaattcagctcttaattaagcataatctgtttggctcgcattacattaagacagtggtactcagcctttgtaatgctgtgaccctttaatacagttcctcatattgtgctgaccctccaatcataaaattatttttgttgctacttcataacttctactgttatgctacttcataattgctactgttatgaatcataatgtgtacatctgtgttttctggtggtctccccaaatgggtctcaactcacaggttagaaaccactgcattttaaaacttggagatttcaagctgggtaggttggcaggcacacacatataatcgcagcacttgggagatggaggcaagaaaatcaggagttcaaggccagcctcagctatacacagtgagctttagacaagccagagctacttgagaccctgtctcacaaagtccaaacccaaaccaaacaaaacagtgtttttcactgcccagcctcccgaatggtgtctaatatgctgtgttgactcctttgttttatcatcctggccgttcctgcctttgagtttgaggtcttacccttaaacatagcctgccagtgagtgtcatagtctagcctgcgttagagtcccctgaaggtgtgctaggtacactgctgggctccaccatcacagttgtggatttagtaggtcgggggatctgcatttctaaccagttctcagccaactgtggaaacacgccagggaaggacttccagtgcagcctccttgttaaacagaaactgaggcccatgtctgctaagggcatattcttttcccaaacttaggtatttgacccagctctgagtctaccccttcatggtacagcagctgggagagggtcactgtgtgtcacactctttccttctacccctgtctgttgctgagactaggtattgaagcccatcccatccgcagcctcaatctgttttcttcagtttccttaacaatagccgtccattattctgcactccgatgcctgtagaatttaattacgtgccctggccgtgatgtgaatttgattgttggaagctgcagcattctggaagaagcactaatgaggagagactcttagcagagccgagagggcgtttggggggccagtgtttgaaagcagccattcactgtgtggcaacaaggacttgctcttgagtgagttttctcgtccccgcctcgaagatgtccatcgaatttcataaataaatcaaggcttttgtgtccgataattgctttgctttgtaacagagatcaaaagcagccatggccttggattcaaagccaagtttatttttcatttttttctcccttgcaggagagagtgagggtttgcaagctggagggtccagcagtgaggtctgcactggggcggggagaacaaagagatgagagacctcagcctgcctcctgtgtctcctagggagacagcctgtgaggcaggcctcagcaggcttttccaatcgttcagtactcatagactagtgctattatgacagcagataaggaattgtagcaaagaaaggattaatgagtgcttagtctatacaagaccctaagcggtctatgtgctctgaattctttacatctgtccgataggaacatagtgtcatcaccccattttacagaataggaaattcaacaaggtggaagcttcagttttatatccaactcagagataggtgatgaacaagactggaaatagtccaaacacaatggcctctcttggggagctcccagagtagtatagaagttacagtagatacaaagaaatggttcgtttggatgcaggggtgaggggcgatcatcccgacccaagttctctcagagggaggttcaagaagatgtgatattggggattcagtgctgcagtaaaactggttaacattcatcactgcttggcttctgcaggaagctggctctcagacaggcacagagcagaataggttgggtcctcacctggagaaaggtatggggagcagggcgttcagggacaaagtgtgtggcagttatagggaagctgagacccctgccttgtgcttagaggttgggcccttccacccttctactgactattcattgcttggtgcttgtctctagaagtgtgggctggggaggcaggggtgcctgcttagacagatggctccttcagccgcggatagcatttcctaggaggatgttcttagtcctgaaggggagcttgagcgttacatggccttggcaaatccacggagctttgggaaaatgagagaagcagagatcagagggagaggcagagcagtaccacagctgagccccgtctccgtctctttcagccacgtgggcgaagcttgatgccttccactctgctttctcattttcaaagtggagctaatggacatctccttcccatggctggtacaaggttaagagatgagatgaaatgcccacctagtacacagggagcagtcaacgcacgctagtgattcctaggattctttgttggcctttgagaaggaatgacgtgagggaagattggggacaggatgctaggaaggttttcttcagggggcacaggttaaacaaatcctcggaagacactcacaaggctttgtcttcttttttattttttataacctcatctttcttccttccttccttccttccttccttccttccttccttcctttaccttatgactttgactaggacctctagcctgtacaacatagaggaaagaggtacccttgacttctaacttcttaccatttaagaaaaaaaatgaagaaattgggaccactaaagaccccctcagcccgatgaagacggttcaccagccccgctagcaaatcctgcttcctgcttcatggctgctcataagattaatatgcacacgttaagaatgttcctgtgtgccaagctgattcagttaggaagtgtcattaagatgcatacgtgaggagagaggagtgagtgcagattaatgtccttgaagcacaaattagccacatcccgggagtgttggtaatggtctgtcattgccgttcagatatacatatttcatagttcacattgtaattccttcatttctcataataatcaaattcatgggtttctccctcttgttcaaaatatttctgttttgcttttgaggcagggtctcatcatgtatccctggctggcctggagcttgcaacacagagtgggtcagccttgaactcacagaaatctgcttgcctctgcctcccaaggctgggattaaaggtataaactaccatgcctagccatttcaaatatttttaatagctttttattattttaaatttctaactttgttgtggtttgggctggtgatatctatatctatatctatcatctatcatctagatatatatccaacaacaaaccctacaacaacaaacaaattaatagattgatagacaaaatacttttgagataaggagaagatatttggtcttcacagaattaataaaattttaatacccagaaaataaaatcaacttttacaaatccagaaggaaggagtaagaaccagcccaataggaacatgggtaagagatacatctgcccaataggaacatgggtaagagatacaactgcccaataggaacatgggtaagagatacaactgcccaataggaacatgggtaagatacaactgcccaataggaacatgggtaagagatataactgcccaataggaacatgggtaagagatacaactgctcaggtcacaaacagtgtaaccgcagtactaacaattgagaaaggttactcatactgataatcagaagatgcttggaacacaacttgatgccaggtggattgacaaagtccctggaggagactagtttatagcatgtcagggattgtcataagaatacaaattgtccagtatccttggaggaagtaaatggtctagtattaatagaagaagaattacagactacaacctagcaattccacttttaagaataacctgaagatgtcctaagccatttgcacacatactcctttttatgtttttttttaataaacagtttaatatttggcacacagttgtaggcaacagtttgttgcttcagggaattcaaggcaggaacccctagccacattacagccaagaacagagagaagatggaggatccctgctgccagcttatctatcctggtttgacttcttttgctcttacatagttcaggtccctcctagggaatgtgctgcctacagggggctggagcaatgaaagattaagacaatgccccacagacatgttcactgttcacccaggtgtagataatttcttgaagcatctgttctgtgggctggagagattctaagattaagagtactggctgctcttgaagagcacctgggtttggttctcagcacctacgtgatggctcataaccctttctaactccagctccaggagatctgacactcattaagcgaatggttaattacatagctatggcagtcacatgctagaacagtactaataattacgatcaaggttctacatctgttagcatcaatttgtgtaaaatttgcaaatgtgatggtgagccagaggaggagggttggggatgatattttccccggcaatgtggtgcaggtctatggtctgagtactcgagaggactgaacaggaggaatttaaagtttgaggccaccgtgagttagagagagccagtctcaacagtctctccttcaaatgcagagcagcattttagtaagatgtagacccccctcccgccccgttcttgcgcgcgctcgactggccagcagtaacgacactgcaacaggatccttcagcacacgtttattgggagagcttgattgtagaggcgaaaagaccccaagcccagaactggtgctgcttttataggcctaggagaggcgtgtctcacacccggattggttatgcactacgcctcatttgcatgttcctcatctgattggctactctctctctctctctctctctctctctctctctctctgtacctcacagaacctcattatcatacctcatttgcatgtctcacatctgattggttatactctcaaagcctcattatcatgcccaggccaggcagtgtctttgcaaaaaactttactgcatatgtacacattggttgtttgtccaaacttatgcgtggtggccagcagtagtcagtgccactctgcaacggcacatgtggcttcccacacctcttgaaaaatgtatattgctcatggttttttaggtctctgtctagaacgaatctaggtggctgtgggcctgtgagagcacacaccagctgtagaaaagtcactggggaatgagcagggaggaaggatgcgagaacagttgtctaacatttcactttctaaagtagtttcaaagaaagaagaagtggctccaaatcttaataattattaaacttaagcaatgtgttctttgcttttttctgttttaaaaattggagagtttaaagtgagggtgaaagtcagttgaggcaagctgggtcagaaaggcgcctcagtgtcagacagaggggttgggctgtgttttctacacaccgaagacccactgaacattcttgagtgagcttcattcattcaaggagactatctgtctcaccagtgacgtgctcagagtcatgataaaaggtgactaattttacacctgcatttggtgtctttgaaagcagaaatgctgaaccaaggtggggaagctacacgccgttacacacatcttcttttctctctttttcttttattagatattttctttacttacattcccctttcctagtttcccctccaaaagccccctatccccctacccctttccctgctccccaacccacccactcccacttcctggccctggtattcccctatactggggcatagaaccttcacaggaccaaaggcctcttctcccattgatgaccgactacattttctgctacttatgcagctagagccatgagtcccaccatgtgttttctttggttggtgctttagtcccaggaagctctgagggtactggttagttcatattgttgttccttctatggggtcacaaaccccttcagttccttgggcactttctctcgttccttcattggggaccctgtgctctgaccagtggatggtaatgagcatccacttctgtgtttgccaggcactgacagagcctctcaggagacagctatatcaggctcctgtcagcaagttcttgttgtcatccacaatagtgtctgggtttgatggtacacacattttcttaaatgcacagtagttatagagtattctcaggggtggattagggaaggtggtatgaaaatggaaaggaaagggaggaaggataagtagatgggaggttggatgagtagtcgaataaatgagtggatgtgtaggtgagcagaaggaccggtgaatgggtaagtgggagagtggaagtgtaggtgggtaggtagatggatgtctaggtcagtgggtacatagatggataggcgagtgaatgagtagatgtgtatataagtgggaagatggatggatggatagaagtataggtggatggatgaatgaatggatggacagatgggtagacaaatggactggtgtatgaatggatgcataggtggctgggtgggtagatggatgggtgggtgggtggatggacagatggatggatagatggatgtatagatagataggtggattgatagatgggtgggtggataggttgatggatgggtggatgggtggatggacagatagatatatggatgggtgaaacgtggtgaatagatgggacacacatgagtacaggcatttttgaaatgccaatataattctcattctccgcacccccccccctcaacaatgcaaacaaagtagaagatcatgctgtaaagtggtggggagttagagaaatgcctttggtcagtgacttagtggtagcaaatgattgacagtgttttcaatggggcatataagcccaagagcatccatagacatgaaactatagtggagagggagacaacaccaaactcagaactgaggagctgaaggtcttcatgagaaactggtcttgcatactccaagacaggaggctcctactcttggttattagtttcttatctgtaagacattctagaagaaaaaagcaaaaaaagcaagtaaatggaaaattgtcagccaccatcaggacatagccaagaaaggttctggtaagtttaatgcccacagacatacagcccagtgttgttctacaccacctctgcttgcaggaaagccaggggttgtgtaaggaatctaatcaccaatgatgatggattctacaagatgctatggaggactgaatgttatctaatatctacagtgatctgaagcacagtattgtgaatatcagaatgctttctagaacaaggcatagggacatccgggtacgagggttatttttaagtatttccaaacactgccactgccaccaccaccaccaccaccaccaccaccaccaccacaacaacaacaacaacaacaacaacaacaaagaccagaaaagaaaaaaagaagggctttctcacagaggcaatagaatggaaagtctgagaacagcacacttactgtcctagtaacagtgggacaatgatgttcctttattgggcgtctgcatcatgatcttcaaagtggggatgcctccaccaaatggctcacacaggcatctgagaaagcagttagagtggtgctcagcatgtggcccagaaacagtagctaatgctgtcattatctacaatgatatgtaccattcatagtaatagcactaaacactgttacaaatgatgatagcaggcatctgcttaatgtggttactagtagtagcagcagtaccagagatccggaaacttccatcctgactatctcagtcactgatacatagttactttctcattgctgtgaccaaatccccagcaagaagccacttggagaagaggggtttactttagcttacagtttgagatggaatacattctgtcatagtggggaaggcatggtgtcaggagttacacacactgcaccagacttaggaagaagcgagagggcagcaagcagggctagtttataatacctcaagaccctctccgaatgacccacttcctcttgcaaggtcctacctccttgggcttcacaaccttccctgagagtgtcaccagctggggagcaagctccactctacaagcctatgggacctttgcacgttcaaagcacatctgtgaggaatcctgggatgccctcgggccagttattttagtgggtctgaaaaggaaactttctgagtcaaaactgtccccaggagatactgagagccactgctgagttagaagaggatgagaattcagggtgcccacgaggccaggttggctggttaagctggaatatttccgtttgcatctgcagcagcaggagacacgtgtaagttttgaggaaagaagcaggtgaagaggatggcccagaacagggagaagtaacctagtcgagatagaatattatctaaggccagggtggaaggtgggcaggctgaggaaggtgttctgagggaaggcagcactgtatagagccttgctattgttgacttaagacccatctaggaggagctagctgtttattggtcggagccaatgagttcagggtgcactttgcaggggaacagataggtccacacccccctgagacacacctttaaggctttgctctggacataaggaagaacacagctgtgctgggcattggtcagggctcacatgcgccaggcatctgaatatggagcccccatgagtcttaaggttgtgatttgatgggcaaacaagccagagcatggaagacaatagaaggatgtgtcaggacctaggactgaaagggaggcggggtttgctagttcttttttttttttttttttttttttttttttttttttttgcttacatatttgttttctttcatttatttggagcctcagtattagcaggactctagactggccctggattgtgacccagcatgagagcatctattcaaacaaaggtgagggaagagagaaaggcctagtggtagcagggattggtgacacggaggggaaggcccaagagatgactgacagacacgagaggttagtcctgaccaagagtgttctaaagagctatttagaatggaggagccttgttaattaaatcaacatttaaaaagtttttacgttgtttgattgattgaccactctgtgtgtgtgcacatgcacgcatgcgcacgcacacatgtggagaccagaagacagctagcaggagttggctcattagtcccacatgtggattccagatgatgagtttagtttcatagcaagtgcctttaccttctgagccatcccctgtccattttaagacagtattaatttttatttgtgttttaaaaattattattcttgaaagattttcatatgtatagtgtttattgcttctatccattcgatactacctccaactccgcctattatactaccacccatattcttcccaacttcatgtttcttaaataaactgttattaataacccactggacccaattaatgctgctcatacacatattgggatgcagccatccagaggagtatggacaaccttccaacggtcctcaaaggagtgtggctcccctcctttcctcagcagctatcattggccaatagagctccttatggaagggtggggcctcagtgcctcctccctcagtcatgctggaaccctggctgacttaatcttgtgatggtcttatgctagcgacagattctgttagctgctgtgtacagaaaacacgtcatatccagaagtctgcatgccgcagctttcttccccattctttctgcccttccttctgtgaagtctcctgagccttggatggtgggaggctgatagaggtgactcgttcataggagagcactcggagttacttacgcttggtgctttgaccagctatgagtctctgcattaacccactgtgagtgcgcacacacacacacacacacacacacacacatgtgcacacacgtggagaccagaagacagctagcaggagttgggagtggtacaaatctgtgggtataaacatagatatttagaatgcagctagacagcatgatcatttaacaaagtaacagtagtagatattccttagggtctggaatctcctctgtcatgggcttttgacacagaaccaggcacaaaaatcccttctatagagctggtctcacgttcagtcagaggacagttgttttaccccagtaaccatcataccccagtaaccaccatactcctattgtatcggtgaacacagatttccatcagctcagtattatggcatgcagtgtccagtgctgagtaagaccactgattttttcccccagtagcctacatagcaccttcggttactatgtaacctagcagcagggagagggttttctgctcagtttgaggttgatttctctatgtctggcttctaaagtgaatgatgtcttcatcagtatgatcttaacacatagttatggcggacaaccaggagcaatagcaatagcatgtgttgcttgggaggcctttggggtcttcttgactaataacttgtggagaagtagcccatgcttggcactggaatgttcattttaataacccatatattctggaagcagcagcatctaccatgtccttgtattcaaactcctttaaacaaatggagggctttggtggtggtggggcatatatctttaattttggctaactcctaggctctcctctcttcaatctctctctccacagtcaacccttttcctcaggcatttctcctgtctcccttcatgacgtctatattctctcatctaaactaattgaatttttccttgtgtcataagattgtagttttccatacagtttttcatgcacccttcgttttggttaagccattggccaatgtcccgtttttttcatgcctcgtccacttccacacgtggacctccccttggacctcctaatgttcttactccttcccttcagttaaccggtatttcaccatttcctcttccgtgaagcatccattcacgtccaggggcctgtttctgaagtcctgactttcacatgcactactgaaggtgaaacacatacaacaaaggattcgaagctaggatctgcgtatgaaagagagcctgtgattcttgtctttggggtctaggagagacctccctcgacatcattagacagtgctatttttagatactgtcctagtgttgtgttgctataactgagtgatacagagtaagtaacttatgaagagttcacgtttcctctgatcacagttctgaaggctggaaggccaaggatgaagttggccataactaacaaaggccttcttgctggtagggatgctgcagaagcccaaggttgtgcaaagatcacgtgggaagacagagtaggtggtacaacctgcgatctctcttggacaaagcccccaatcctgtatggcggacaatcctcctaaccttaactaatcctaaatgccttccctattattatcacacgggtttgagggttatgtttcagcagagtttgggagtgggatgaacactccaaaggtaggagatgtagaaatgacattagtgttagaaacggcccaacacggagttagcttgatgggaatatggacagactccttaagaattaaccttttaaaatctagctcataaccccctaagatctatattaaagcaggccttttgttgttattgctgggggtgggggggtattttggggtgtggtcctggagagaccgaacacaggtctacctctcagctacatctcagtttgcagtattaagagtttccgctgaaaagccctgcattaaaaccagccctgcattaaaaccagccctgcattaaagcaaatcacccatggcattgatttcattcaggaactgtgtcattacaagagaaactttgccatttcatctcacgttgatgcaaattaatgttttgttttgatgaagaaggacaaaatggccaccttttatttttaactttaagcggcatctatgcgagccttcttgggcatttatagagccccttttgcatgcaaatctttatggtcaaccttttacaagaaattcccccaaggataaaagcttcttgcttcagcctgggtcacaattcttcccctgatccaatccttgagacaaacttccaggtcactgtgtcacagccacagtctggtggatcagccaggtctagggccagcctcacctgcatctcatgttctcttagaaggaggaatagagaagcaagcaatgaccattgaagctgatgtatctctagttgggcaattgaaacaaaggggagcagactttctttggtggggatgggaaaaggttggggggaaggcctgggaagcaatacctgagcagatggggaggcagtacatcagagacacaggcagtgtcctgtgggattggcctccttcccgcctgcctgtggcctggaccctgtccattgcggctttgaagtggctgtttctcttcggtgtgtctgtatgctgcgctgagcccagaaaaaacagaccaggcttttgagccagaccaaccaaaagctgattgcaggctctgtcactctctagttcatcttgggcaaggtgctcagtccttcgaatctctagctctgcccatgtgtcaaaagagaatgatagcagtagccactttaaaggtttaaattagtgcatggaagggactttgaacagtattgagcaaatggaagatgtttcatgagcggggttttgctggtcagctttttctacagtgcttggtagagacagctctctactaaatattgcatgcatgtgtgagtggatccaaagctagggacgaactggaagagatgtcattagctcaagcactggctcagagtgccatgaatccacgtgggtcttggtgctggggtctgctgagtcgtcacaaggctggctgtgtctcagcaaccatattcttcagaagctcccaccttttgggactgtcacacaatgtacagaattcaggactgagaactgcacggttgagttatagaaaaaaaatccaaaccgaaatctcataatgttctgagtaagtttccatttctgacctgagttggattcatggttatcctggtatatatagaagcccacagctgtaaggcagatgtacctgagaggaatgaatgctggatgaaaagcccatttacacgtcagatgtcctggccagcagatgccatccttatgagcacccagaggtgcagatggctactcctctctaaaatgactcctggttttggagttataaacggagatacttctgtgaggccctaggccctgtggccagctggaaagcttgagacttccatagttgacacagggtttggactactggaccatctagtcttcctagagtagctgaaaattaaggcctataagggaaatatcttgattgttaaattctgggaaagtgctcagactttctagaatcaccaagtggccaaacaagagtattcttgcaggctagagggactgcggcctggaggccttgcctaacacagtactttgctgaggaatagtttaaaccctccatgacatcaaagcaatatctagaaatgactgtggtggctacaacttcaggccaaaggtagagattactagtaagaagaggcaggtaggctacccaacacccagccgtccattcataggatggtgccgaagaaagagttagttgtccttaagggagtttaactggagttagctgttgagaaaagggaggctggggacacctgctttacagtggctggcccttgtgactagctagcctcagtttaccgttagtttgtcagaaaggcaaggctgtggggatggttggatcttctttggcccaaccttgtgtgtgaaggaagtgacttccatccagtgtcttttgcaagcatgaaaataatgcaaaaaatgtggagcgccacggtcagttgttattgggtccccaaggtctgggtgtggtggcctgttgaagattgtcttggttttggcctcttgtccctggtggaatgtttggtttgggttcgttactcagtagtatttggaactgtaattgggaatacttcccttccttaaccaactctgtccataaaaaaaaaaaaagacaaaaacaaaaataataagctttgaaggctgctggccaggcatcaactctgtggctgttcggggagatgcccaggagttaatgagctatgactcagcaggtcccatatggtggtttacagttctcttgaggaaatacaagaacatgcctccagccccaccagttcaggctctgtgtacaagttcctgtttctgaggtgtgtccctgagcatcctattctcctactcaaaagccttcaatgtctcccagttctactctgaatgaagtcagagcccagtcagcctccatgatatgacctaggcaaaaagtggtagctttagaaccccatgtctatagtgaggatgtcttattctaggaactggggatggaagatgaatttgtgttcactaggatgctctggctacaagtagcagaatactggttaatatgtcttaagcaactaagccacagaagtagatggagactagaggctagttctgagttttggatttatcagtacttagatagtaatgaaaggaaccaggttccttttactctgtcctcctaaagctacatactctttctatctctagatgactgctggtaccaacttgggctatttggagttttgctcacagttggtagaagggctaaaaccttctcctacatcacacaagtcctgcttttctatctcattaagtcaggccaggactgtatccgcacaaagaacaatccatggtttagagttaagatgggatgaagtaccctggaagaactgagctggagggacaaatgcagaccaatgcgtgcttctattaggacatagggaaagctggattataggtagtgaacccccagttcctgctacaaactgtaaaggattgggccatttgaaaggcggctatgaattgaggagaagagataatcaaatgtctatagagtgtcaagtttcatcttgacagcccaggaaactgtcaccccatactttaaaatcaaggtgctgggcatgtgtgtgttacttttcggtaatttgagtttgacaaccagaccatttctatgggctgacatgtgttcttccatattccagagcaaagagattggcctgcagatgcatgaggagctgctgaaggtcaccaacgagctctacacagtaagttctacccagaaccattgctacttgtttgggtctcttgtctttagcttgagagaggcagggcagaatttggcgtgacagtcatcatgaaagtttttaatgactcataacttcaactccctattccttatgtttgggatgggtcctgggcatggttagtgagttccactgtgtgagagagtaatgtgatctgccagacacaggatgagcacatgagcactcatgagcacaaaggtccttcagtggaggcaaggaacatgggtgcagagtctccagagggcagggatatggacttgggtgccaggtgccataggctccaggcagagagtgctcttcggtgactgtggccttagaagggcacagagcttgtttagatccctttgtccttgtccctgctctgagaataccctgaagtgacatggtgagcacgcctgactgtttccagaggagaacatcacagtttaggccatagctgatctggctgcctgctttgaagccaaaacccaactacactagagatgggcattagaacaggatggttgtggaatggagagactgtagggcaagaactgactttggcttctgggtaacgactgtggagagtctcgtagatggccttagggtacagtgtaggataggttcttcaggtgaaatgccaagtagaattgttatgtttgatgtacatagaggttctttataaaagtcctaatttaacatgtaaatacatgtaggctgtgtgaaggctgttctcttattattactgattgcctcccaagtgctagtattgaaggctaaatttactaccactgcccagctcatattggatataataatagtcaactagacatgacttagagtcttatgggaagaaagtcttaagaaggtgttatttaaatcaggttggcctatcagcatatctggggtggattgttttagatataagaagatagtacatggcgggggccaccatttcatgggctggagccttaactgtctaaaaatgaagaaagctagccaagtatcagtgcaagcaagcagttaatatgggggtatttatctctctgctcttaactgtggcaatctaccgagttcctgccttgattttgcctcaataatggactgtaacctgaaagtgtaagcccaacaaaccctttccaccctcatgatgctttttgtaggatctttgaccgcagcaacagcaatgaaattaaagaaatgcctgagcttaaacctacaccaaaagaactccttaaacgtgctccaactttgctcaaaactaaaaataaagctggacctagtgaggcagaactgtggtcccatctagttaggaagctcaggacggagggctacaagtttgaggcctgcccaggctacagagtatgagcaaagcctggacaacagagtgagagcttgtcctataaaatatatattatataatattacattatatgtgtcctatgacatataaaatataataataaaggtaaagataggcttgtgtgtatagttcagtcataaagctcttgcccatctttctcaaatgccctaggtttaccctagtagtatagagaaaagaagtgaagagaaggcagacactctgaagtcagaaactgggtcaaatctaatttttaactgaaaagaacagtgaaatcctcccacagtctcggtaggaattggttcccgaaagcctcatggacctgaggactgcggatgctcaggtctcctgtataaagtggtgccgtgtcacacattctcccaggtactttgaaccagccccagattgcttactacagcaggtacggcagcagagctacacagacagctgcttctctgggttatttagtgatgagaaaatgaaaatctgttctaaatgcttagtgtagagaaaactttcttccccattagtcccagccttcagttggttgactccacagatgtggagatcacggttatagagggccatttgcacatgttaagcacggttagtatgataggctctatagcgtgccagagagtctctgtatcagtagtcatgactgtcattactgtgtcaccctcaatgggtgtgagataggctgttgtctgtactccaaggagtagggtgaatgatgagtgtgtaaaggtagtgaatgaatggaactgtctagcttagaattctgtaggtgacttccctaccctggtcattacccgtgctaggtctttcctattctccatgagtccctctgtatatatcacatttcccacactagttctgcaccacacctccaggcccaggaccttgctgctcctgcttaggtctctaaccttccctccaccctcctgttgggcaccacattttgcctgtcctgatttgcttcaggttgctgtgataaaaacaacctggccaaaagcaacttggggagaaggggatctatttggcttacttccaggtctcaacccatcatcgagggaagtcagggcagaaactcaaggtaggagcttgaagtggaaaccatagagaaccactgctaactgccttgctctctagattgcttgcttgctcatactcagcttgctttcttatacagctcagacccacctgcctagggatgatgctgcccacagtgggctgggccctcctacatcaatcaccaatgaagatcttttctctgaccaagtcgaggttccctcttctcaggtgactgtaggttatgttcagctgacaaaaaaaaaaaaaaagtcaccaggaaaactgtttatactcaccccctcttttggtatatatgtaggagaaggaccctcagttccaacaataaataccccatgattgctaactgtagccttgtttatccataggtcctgcatcctatgagtctgaaataccccctgaaggctcatatgctaaaagcttgttctgataacacagctttatttggtgattttattagggggtagagatggagtggcctgatttcaggaagtaggtcactgaggacatgtccttgaaaagtgtcttgtccctagcccctttctgtctgtctctctgcttcctggttgctatgaggtgagccactttgctttgacctacattcttgacccatgatgctccgtctcaccacaaactcacagcaggggaatggattggaatctctgaagccatggaccaaaaattagtctttcctcctttaatttttctcaagcacgcgccactgtgacaaaaagctaattaacatgtacatgttcaaccaacctcgggtcaaaatttatttttttttaaaacaatctctaataccaaatgtatgcagagttcttgttaacttcttaagcacccatgacacgatagaatgcccacttatacagtgtaacattgtgttaggtcctatgaggactctcaagatgatgaagtaggaggggcttgtgtaggttctttattatcactgcaccattttagataagggactggaacatgcatagatgtttttggtatctggacacatttatgaggagatatcctgaagcaattaccatagacactgtgggatgatcacagttatttagaaatgcagtttaatccccatattcagggcttcccactgtggcatcaaagaacctttgttgtctgaaaacttgaaacattttagagatgggctctgtcagcatcttgcccatcctcgatgctcccatggtgcgggctgaagcaaagacatgaggaagtggtgtgtggccagtgaggagtgttagatagacctgagcataccgacaagctggagacaacatgaagcagagcttgaggcttgctcaactgcttcttaacaaattgcctccaaattcagtggcttcaaacccaccatgttatttgcttatgagtctgtagattagcaatttgagctggttcaactgcaaccagtcttgtggtggcaattttctggatgattaagaaaaagaaacccagagttagtggaccccagtaacttctgctagtaatctgctagtaatcacttttgctaataccccaaagcaagttacagtcaagccctggatcccaagatagaaaaataaactcccttttttcctgtattcacaatgttaaagccatgcctaggcaatgtctgggcggccgtcacagctacccagctggctggggcattggggacctcttggacttcaccgctagaagcttctatgtaacatcccacttatacacatcttcccagctcccttgttgcccagtcctagcctcaggggtgtagtaactaaggaatgaatgagggaggaaggggctgtgcaatcaaccctattcttttccttctccatgttctgtggaagaagtggtctgcttggaggccctgaagaaggtcatgatgatggtgatctgttctattgtctgttaaccctgcccctttccagcctccaccagctgtctacagtatagtctttgatcacatattgacttgaagtaaagaagaacacagagtaagattgtgggccagggtggaatccttccaaagaaacagagacaaagcaaatgacaaacttcagctaaaatcacatttaggttttcattgtatttctgggtcatgagatacaactgttgttttggtaactgattggtgccctggtaggccacttcagccccttttttgtgttcagtagctctgcgctggctgctggccctgccttgcaagcccaggcagcaggaagagcgctgttcctttattgaaagcagaatgacaaaagcttcaggtgtccacaccaagcaggagctagtgaccaacagacacaaaaaccggagtaatgactatgccataccttgtgcaaagtccaacttgatttgattgtgtgccaagctcaggggtatgaaatccactctgggcctccaggaaaatatttgtaatgatgcctccctcccagtggccctgctcaaagatgggggaatggagagggcttcccactgggagctctgtatttgacttctagtcccagctctacccaggctctctatatagctttttatttttacgtgcgtgcatgcgtgcgtgcgtgcgtgcgtgcgtgcatgtgtgtgtgtgtgtttatgtgatggtacatgcatatgtgcatgcacatacatgtgcacacatgtagaggccagaaagcaacctcaggtgtcattcctctgacaccatccacttctttgatacagcatctctcaccagcctgtagctcaccaaggacgctaggctggcaggccaaagagcctccggtgtcttctagatgacatttaaatacaactcttatggtttctctatgccactgggccccctaaattatttaatactttcctttaatttgtccaaatccatcctcttctccttttctttaaattgtctctgtcctgattaattagtggaaatgcagcctgtgtgctggcaaaagcacaggcttcagaggccctgttaggagagcccctgattcctcctcccaggaacacatgagtatttccagctcctcatctggagatggatgaggagctcagtggctatggaggctatcccagtgcctgctgagcactggtgtcctgcccctacactgcctccgttgctagcatcttgttagtggggtctccttccagagctatttttttccagtcagtgcatatgtccaacatgcttcacacacccagttcccaggagagggagccactgtccctgcacactgcctcttgccatggtcattgttttttcttcccccacacacggtactggtcgcaggcttggcactggtctgaatgctccggaggtactgggattcagttttgttctcaccgtgatctttgaaaggaggaggcatcattaccaccgtattctggtggctctaagggacagagggtcaggtaaccagtccagggtcacccagctggggagtggctgagcctgtgccagagttcctaggcttaagagcccatcctggaacttctaaaggaaatatattaactggttacataaatatatgtcaactacagctgtccctgagtaattacagggcattggttccaggacccctacagatgccaagacctgagaacatttagttccttttataaaacagcatagtatttgcacagaatctacacacaccctcctgcaaccttcaaatcctcttgcttattatgtattatgcccaatgtaggtagacactagacagacagttgttatgttctattcttttgaggatagcaacaaggaaaacatctgtccatgctgagtaggggcataaacagtttctgtctttgatctacagtgggctgatcatgaggaagtggaagcctaggtacagagggccgactggactttcagagataggctttggaaggaggtcatatagtttatatgagcagcaaaattcaacctgatgtacaagaagcactctgcaactgccctggaactcagcctcactcagtcactgggtagctgcagccagagaccagcattaaagatgcatcagtgttagtctgtcgctttcccatgtatacccaaagggtcctcagagcattgaaaagattcatagcatactaggaatattggtaatcatgttgcttacataaataattcttccaccaggtgtagggaagaccctacacagtcaactagcctggattcttggtcacccaattcagtgcaatgaaggactagagtttgggcatctggtgggtgtttgtgtgtttgtttgaatttctgccttcacgccaccctgacaatgagggaacatgtgatgtatgaggtagctctgtcaggtcaccacctgccagctgaggttctttcacctggatggcctcctcacctcacggctctggctatagcccgggatgctcgctcagtcacagctatgcaggctgctgcttatttgtgtgtggatgatgagatgtgaccagacactgaaaagaactcctccgtgggggtctgacacagtgtgagggaacgtgagaagtgagccagcatgatgaaatcgtcgagcatcctaaagtcgacggagatgagatggcctgtgacagagcacgagggggagaggacacagagaggagaaacaccagggaggcagccgctggcctgtgggaggggcctgcggctctgccagtcagcattgttcaggagtcactgccctaagcttggtgagttgggatcaggattgatatggggagctgaggagctggggtggaaaggaacctgcctttgggggctcattattggcaaaggacagtaatccagtgcagacaggctgttttgttgttttgtggcactgtaactgagtgtctgagactagatgatctgctaaaaaaaaagtgctatttggtgtgagggtctgagatctgggaggtccctgagcatggcattggcacctggtgagtgctttcacactgtgccatctgtgacagaaaaccagaggccaaggaaggtccactacaagcaacaagaggaattgaatctgttggtaaaaatgtatacttgcaataacgaacccattctggcaatagtcacctctcaacactattgcattggggactaatgttcagatgcattagtctgggggagccattcataccacagtaccaacataacattggtggctcaggtgtatctgggtctggggacttgcctatcatttcagggtccatctcaccaatacagtgtgtactttgagggcagaggctttgtcatctgtcctatgatattttgaggacatcaggtgtaatcctggcacaaagctgcttgattaatatttaattacagtgaagtgtggttcttctaccccttccaatgtactcactatctctgaggcagaagaactttgcctcacttcttccttcctctgttctttcttcctctccttccttatttccctttcttccatccatctgtctatctatccatccatactctaccaattcattgtgcatccatccatccatccatccatccatccatccatcatcttttcttatttgggaaccagcatgtagctccttgtggttttgtttcttctgtgtgagcttctcctatcaattttgcctcatcctgacctcctggccccctcctgataccacagtgccactctctcatcactattttaaataaggtcccagggtagcatctaattggtcgggtttagatcattagccgccatccttatgaccagattgaaatgatgtttaccatttggctgggcctgggtctcatggccactgccaggattggaggtcatatccatttcccatgaactccatggactgaaaataaaggaggggaatttggggggtttcctcaaataaaatcaggaagctgttcctggaggaggactagatgatcctaggcagagaaaaacaacagatgttcactgaggggacagccgggaggggagggggagggccaggcaatggcactgagcagtcacctgatatttttctatgcatcggctattcctcagccctgttcagctcctccttctcctacgctagtagttctttgtctgaaatagcccgtgcgcaccctcatgcaccattcacccagataacaggaactctttcttcaaggcttggtttagctaccacttcccaggaagctttcctgtagtgtccaaactccccacctcacagctcttactagaccctgtgatagaatccagtattgtcgtttatatccccaccacagtgtacattctattagattctatatgtcctgtaatctgtagtattttctggtgtatagcctaatatagtgtggggtacataagaagtatttaatgactaagggtacaacttctccttatctccaaatgccatcagatcaaagacagaggaaaatggtatcttcaccattttcccttcttttttttctctctctctccctctccccctctctctttcatctctttcccttatacctctcacccatgcatcctcccattcacctttctacctatgcatccattcaaccatattcatctagtccactcatttacacgttcccaaatgcatacagatatacagtgactcctgatggcagtctgcctgtattctagcaaaggaaaagaggcaaggtcctggtctcgggactttgcatgccagtaggaacaagacagtctatagacacaaaataagcaaatgaaaatagcgatcaagttctagagaaatcataagtcacttcagtgggttgtcttagtcagggtttctattcctgcacaaacatcatgaccaagaagcaagttggggaggagagggtttattcggcttactcttccacattgctgttcatcaccaaaggaagtcaggactggaactcaagcaggtcatgaagcaggagctgatgcagaggccatggagggatgttctttactggcttgcttttcctggcttgctcagcctgatctcttatagaaccaaaactaccagcccagagatggtcctacccacaagggccctttcccccttgatcactaattgagaaaatgccttacaattggatctcatggaggcatttcctcaactgaaactcctttctctgtgataactccagctgtgtcaagttgacacaaaactagccagtacatgggtgatcaaataaattgtaggacttcccttttttcctagatgtctttttaatggcttggtccaggagttcaggcacactcaaatgcttcagaatgtggcccttcttggggatcaaagtatacctagactgtatcttttagaagatgtttcctagcaactgatcctcttgatgccctataaaccatgtctccttatggatgctgttgacttccaagttgtctgttatcttttgcacttgaatgaggatctgaaggatcttcaccactttccttccagtatctgggcatctggaaagctgtgacaggtacatgaataccaagaaaggcaacagaattactagaaaaggccaggccttaggggtcaacagacccagcctctggtctctgttttgttttgttttgttttcccttttcatttctgattttattaatttggatactgtccctgtgccctctggttagtctagctaagggtttatctatcttgttgattttctcaaagaaccagctcctggttttgttgattctttgtatagttctttttgtttctatttggttgatttcagccctgagtttgattatttcctgccatctactcctcttgggtgtgtttgcttctttttgttctagtgcttccaggtgtgctgtcaaactgctagtgtaagctctctttactttctttttggaggcactcagagctatgagttttcctcttactattgctttcattgtgtcccataagttttggtatgatgtatcttcattttcactaaattctaaaaaaacctttaatttctttcttcaccaagttatcattgttcagcttccatgtgtatctctgatttccattggttttgttggtatttcagaccagccttattttgtgctgatctgatagggcgcatgggattatttcagtcttcttgtatctgttgaggcctgttttgtgaccaattatatggtcaagtttggaaggtaccatgaggtgctgagaagaaggtattcttttgatttaggatgaaatgttgtatagatatctgttagatccatttgcttcataacttctgttagtttcactctgtctctgtttagtttctgtttccatgattagtccattgctgagagtggggtgttgaaatctcccactattattgtgtggagtgtgatatgtgctttgagctttagtaaagtttcttttatgatgtgggtacccttgcatttggaacatagatgttcagaattgagagttcatcttggtagatttttcctttgaccagtatgaagtgtccttatcttttttgataacttttggttgaaagttgattttatttgatattagaatggctactcctgcttgtttcttgggaccatttgcttgaaaaattgttttccaaccttttactctgagataatgtctgtctttgtcattgaggtgtgtttcctgtatgcagcaaaatgctgggtcctgcttatgcatccagtctgttaggctgtgttttttttgaggggaattaagtccattgatgttaagagatattaaggaaaagtgattgttacttactgttatttttattgttacaggtggaattatgtttgtgtggctatcttcttttggatttgttgaaagattatttgcttgtttttgtctagggtgtaatttctctccttgtgttggtattttccatctattatcctttgtagggctggatttatggaaagatattgtgtaaatttggtttgtcatggaatatnnnnnnnnnnnnnnnnnnnnattgtgtaaatttggtttgtcatggaatatcttggtttctttgtctatggtaattgagagttttcctgggtatagtagcctgggctggcatttgtgttctcttaggttctatatgacatctgcccaggatcttctggctttcatagtctctggtgagaagtctggtgtaattctgatagttctgcctttgtatgttacttgacctttttcccttactgcttttaatattctttctttgtttagtgcgtttggtgttttgattattatgtggtgggagaaatttcttttctattccagtctatttgaagttctgtaggcttcttgtatgtttatgggcatctctttctttaggttagggaagttttcttctataattctgttgaagttatttactggccctttaagtttggaatcttcactgtcttctatacctattatctttaggtttcttcttctcattgtgtcctagatttcctggatgttttcagttaggagatttttttgccttttgcaaaaaaggacatatgccccaccctagtgtatagcttctgaaggccagtcactatgcacatctgtttataaagtacctatacatcctcccgtccaaatgacactaggagagcatgaagacacccatcctctccatagacaccaaggatgttataggatagttgggaatccaagttcttctgaagtcctatggactttaggattctgtcatccctttgcatggtggaaaaagcatagtaagagggacctacaatcctgtgctcattagactcccacagtggggtcggacatcttggctttgaaccttgactccagcaatgctagtgttttgacctcaaggaagatgactgaagtgtttttaggtcctccctataaatcagagttcacaggtgccttttcatggtttttgttttttgtttggtttgttttggtttgtttttttttgtttttttgtttgtttgtttgtttgttattaatgagaaatactgtggtggatgtgggtgcttagatcaaggttcatcatgtaggaggtgctcagtaagccttatgtgacattgctgtttaaactgatgtcccactgtctccaagagtgtactaaggatggcttgaaatgctccttcaatggatgcagatgatagaaagatgcttgtaaactttgaagtaccaggcaagcttaaatacaactttacatgtcctgaactggaacatcaagtagactcttgtaggctattgaactaaattcttaccctactgaagtctgtgtttcaggtccagttggttctgggtatctgtctgttttgcacctgtggaaatattcagaaagaaaagtctacactgagcatgaacagactttcttcttacaattattctcagtaactactacatactcagtaatctacttacataacatttgcattccattaaatattgtacgtgacctagagaggacttaaagcctacagaaggacacacttaggctttgtgcagttgtggtactgtttatataagagacttgaacatttgcagattttggcatccatgaggcagactgagaaccagcccttcatgaataccaaaggataactgtaattaaataaaggcaacaattgagggttccggcataaatcaactcatttctgagaggcctctaaatacactcttcagtggcagctgtctgccatgtcaccatgtgcagttgggttccctgttatctttgggaccagccatcaatgggatcatagacagttgagccccaggttctcgggttttattcttcatgcatgggagttttagaacagcccaggaaggatcctgggaagtttggcttgtagggcataggaggagcattgtgtggctcaagggtgtgtgtgtgaaaaattgaggtaatggcagggggtgggtggggtgggagggaaaaaaaaacgaggcaggtggaaaacatgggaagcggaacacccatctgggatgctgccctggtgcagttagacagatgcacatgtggatggctgagcagaagatccagcatggcgtttctcaacctttccagtactgtgacccgttaatacagttcctcgtgttgtggtggccccccaccatcaaattattttcattgatacttcataactgtaattttgacactgttattattatgcaaatacatgatatgtaataggtggtcccctgtgaaaagattgtacccaaagggtttgacacccagggattgagaaccattgatctagacacatgtagaaatgcttctcccaccccaatgcattacccagtgaggatgataggttgatgctgagataaacagacttggaaagctgaagtagaaaagttgatgtagcaatcttcactgaacccaggaggtgtgtgtgtgtgtgtgtgtgtgtgtgtgtgtgtgtgtgtagatacaagcagcagaagctgaatgcctctgagcagagagggatcgtggagcatctgaagggacaactgcagtaggtgctaccaactcttgactatcttcaatgcttgctgtgaaccacagcctaaagaccctgggaacaacaggaccttgtcgctcacctggaaggctgcactcattccttctggccactagatgtcaaacacgtaccactgacaatattttctgggctgtggggtttacaaagagtgtcctggaactggcatactggagtggatgagatcagtgagaagtgggttctcaaagccctgggggaaactactaaagtgagccctgtcgggtgggctgcagaggagtctccatcaagatctgagaggaagcgctggctacgtgtctcattcataggatgctttgtaagcttggaaaggtttcaggatgcaacttcaggctcagaattccccctgttataatcatatcctgttttgtaatagaagctgagcagcagagtgcaatttgctttgttggaattctttgtatagctaaggttgaatgtattccagggaccgcagagtatctattaggttatgtaacagggccgtgtgcaaagcccattttagggcttttccattgacttcagggtggagataaggaagaaggatacacggatcacgtctggcaggactagagaggatggccagcaagagcctggcttaccatatcacttgtaggttgtcgtggctcttcttaattttttgtttattagctcatgcttgacacttagtagggcctcagtgatgtgatgatgataatgatgatgagggtgataatgatgtcactcacgataaagctgtttcacctgaggagcatcttcatttccagccctaagggactctgtgcagaagtaaagaggctaaggtgaatgtgtaatgggaaagcaagagttctgtggcccttggggtggggccagggaccacagaatgtaccgtgctgagccataatggcctattggtttcttgtacgcattgtcctcaggtcatgaaaacctaccacatgtaccatgcagagagcatcagtgcagaaagcaagctgaaggaggctgagaagcaggaggagaaacagtttaacaagtcaggagagctaagcatgaacctgctccggcacgaggacagaccccagcgccgcagctccgtgaagaagattgagaagatgaaggagaaggtgagtgagaggaatggggcaaagcacggagaggagagcggtgctctcagccgctcctccttcgcatgaaggatgaaggagcctggcctggttccatttgtgtggctgggataaaacatcctgacaaaaagcaacttagtggagaaagagttactttaactcacacttacagtctacgacagcagagatatccagggagcaggtcctgaaaacggtttctcatatcacatccacaatcaagggcagagaggatggaacacatgtgctcacacaattgctcgcttatgctaagctagcttgattcacttaacaaagttcaggacccagccaatgaggtggtgtcaccacattcagggtgggtcttcccatctcacgtcactcagttaagacaatctcctctaggcgtgtccagaatccaacccaatgtagacagttcctcattgacactctcttcctgggcaattctgggttgtcaggttaacatttaaagccgtcacaagtctgttgtgaaattgccattgctgtgtcaaagaccatagcttcagaatcactgtgtatgggtgctgcaaggctttttgtaggcatggtggagggagctcaagatttggagcctggggtttattcgtttgtttacttgcgtacattgtatgcaagtgtatgcacaatcgtatgcagatgtggtcctcaccgtcttgtgtctatgtagagaccagagggtgacatcaaataccttcctctattgcactctgccttcctgtttgagacagggtctgtctctgaacctgtagttcattggctagactggctgtccatcaagcccccaggagtctcctgtctctgcccctccgccagctctggggttacagacctacatttagtttccacatggatgtcagggatccaaacaggtctttatgcacacacagccaccacttcacccactgagccctctctgccacctctgagctggggttttaaatgctacattaacactgatccctgagtttcagttgttaaatctgataaatacgtctcattgctcatgttggctctgataaattgataacggctgcccaggatgctctattgaggattctgaagctatatcaaggcttagctgaaaaggtgctgagatcggttaatgatgtctgctatggccagagagttttgaagggcaggacacatctgtgacttctaactctcctttcttcttcaaaagctataatcttcttgctgaatctctatatccatctattccccagcaccaggaaacatttgcagagttcttctatatgccagccactgtgtctgatgtttatctgctcttccatgggcctaactctatgattataggatccgttagaaattacagactggatgggaacaaaacccaatagaacctgggtaaacagggaagcatataaaagtgtgtgtgtgtgtgtgtgtgtgtgtgtgtgtgtgtgtgtgtgtgtgtatgtgtgtgtgtgtgcatgtcctggtataatttttgaaattgaggaagacccaaaatccagacaaagatgtcataccaaaatgggcaataaataaagttgaatagacatttctttttttaatattttatgtctatgggtgttttgtcaacatgcatatatacaccccacttgtatacctggtgccctcagagactagaagaggattcatattccctggaactgcagttataagcagttgtgaaccaccatgtgggtgctgggaatcaaacctgggtcctctagaacagccactgatcttacctcttgagccatctctttaacatctgaatagacaatccttaggaccctgtctaggtggtctgtaaatacagagcagtctgcgtggcatcactaaggatgaaggaaatgtaaacaaaaaccatagctcaatagtgcttcacaagccaccagaaggaccacgataacaaaggctggcaggaagaagcagggatgcagatgtggaaatcagggaaccttgcaccagtgtcagggacaggttgtgtatgtgggtggttctgtcactgtggaaagccatctggttgctcttcagtggaccaggctaccatgtgtctcagtagcacctctcctgggtgtctgcccctggggcatgaaaacatatttgtataaaaatttgtatgtgaatgttcacagtagcactgttcatcatacccaaaagatgaaaactacttgaatggaactcaatcatgaaaaggaatgaagtcctgatacaagccacaatgtggatgaaccccaaagtgaaagaagccagacacaaaaggccacatgctctacaaaataacttatgtaaaatgtccggaatagacacaccgagagacacgggaagtagattgttggtaatctgaggaattggaggagaatgagagtgtggctgctcactggggcaaggtttctctccagaggaagtgcctgggtggaaagatactggctaagattgtagaggctcattcctggtgtagtcatatgctaattagcaacttggctcctggacaagccacttttcttcttgagttctcatttccttgcctataaatagatgagttcagctaagatgccatgactgtccttttcaattctaaaatgaactcagtccaggaaagtggtctcaaggtcacagtgagtccctagatagggtcaagagtatccagactgtgtggatgggtgtctcgctgttactggatgtgaattccaggagacatatgctgaatgatccccgagtaagaggatctaggagcaagtcagaggagatgctggaggacaatttcaaggttggccatggaactggtatactccaaagctaaatctcacaaggaatgaggaatggaaaggagcagctagcatgttttctttaaagagaccctgccccaagacgcctcagtctgaaagggcagttatccattgtgccttctcttgctcctcccttctgggctggctaagcataaaagtggctttgccaagattctgggtgctctaccctgtttgtcctttcattcagacccagactttctccttcttgtctgctttttctcctcctccccttccccctcttcttaaaaatgatccaagacttgcttagtcagtctggtttgggtgcctcagatccatgacccacaagcaagacaggtcacggcatcgactttgtggaattcgctttcttgtgtggatgctaaccatcaacaaataaaccaagagcttctgacaggacagaacaggggagcagagtagagataagagggatgcatagcagacagggccatcatcaggagcttggtaaggtcctgagtgacatcaaggaacagcttgcttagaggcttgggtgtgtgactccagaaagtctgaaggactcaaagcagaaatgcacttggtctcttgaggatggacaaaagaggttgcatgagaaaaggcagatatacagagaaggggctggaatggtgatctggagtgctagccagcagctaagtctttggaagcccatggagggtacggagggtggagtgtcttacctacaccccactggtagagaccacctggaggtctgctgtatgacaagtgatcaagtatattgcttagttcagggtccaacagcactgccttggtacagaagcatcccataactaggaggtgggactcattgccagatggttcacatggaaatcatcaatcattaatgaccctgataggctgggctctgatggctatgtcttctccctacagaggcaggccaagtattctgagaacaagctcaagtgcacgaaggcccggaatgattacctgctgaatctggcagccaccaacgcagctatcagcaaatactacatccacgatgtctctgatctcatcgatgtgagcaacctgggtggcctggggctgggtgagggtttcacgcaggctgcaacaactcatcagctaaagcaagtctgggactaggtgggaacctatctaggctggtgcttctcacaagttgggggggagatggagctggccatggtccttaactgacaagtgggttggccaagcttttgtaaccctgctagagaggataagggctggaagtgtttggggttggggtatgagctaattcatgcctacactttctgtagatggaagtgatctctggtgaactccccataacttgattagttagatacacaataccaacctccaaagtcctcccttctgtaccagggcctctgctaggagtgagagcacagggcaaagtgtatatatacagtttgtactcttagaggctgctggtatggaagagaaggaggccatttattcagaacccttgttgagtccagccaccatgggaaagccattgggaagttctcctgggaggaatgagtttgaacactgacagtgggtagctggctgtgcagggcaccctggagagcatcaggcttaaagaaggatattgtgagtagagtgatgggagataatgtcttagagccaggactatttctctgtctccccttccatgctaaatggagaatccatttctgtaggtgtgcagtagtaggtttggtagtggccgctggattctttccctctaacccaatgtattctattctggaagccaggacatggggtttgggggcagcaatctgctcagccttccaacggcctcaggctagccccctcctcttccctagctctcagctttcagcttttagcctttatgccttttcacttgccaaatgattattgagcacctactgtggactagggcttaaagctcagcagtggggggcaagagccagcaagccccttagagcacacctgcctaaagcacattactagacaattccaaaggcaggtgacaagggccacagtgagggaagcagagagcatgtagatgtctgaccaaaacccagtatggaaaacttccagaatgaaatgggctataagtttaatggcaaatggagaacattccaggcagagagcatgcttggaggtaagattgtgttgagagcctggggcaatgaaggaggctctgttggtacccacatttcatctctgagctccctctgaggggtttgatatggcttgttcaggactccaaagtgctctgcaatggaaggtgatcataggtccccactccagctctcacttgtacccttctgtcctctgcctctccccaagtgctgtgatttgggctttcacgccagcctggcccgcacttttcggacctacctctcagcagaatataacctggagacctctcgccatgagggtctggacgtcatagagaatgcagtggacaacctggactcccggagtgacaagcacacagtcatggatatgtgcagccaggtcttttgccctccactcaagtttgagttccagccccacatgggggatgaggtaggcttcctgccagaatcctacgtaatgagtccagtttccattaccatatgaaagtacctgaacctgaatacgcagtggttctcaacccgtgtgtcatgaccccttaagggttcaccaattctctcacagaggtcccctaagaccatcttacttatccgatatttgcattagaagtcctaacaggagcaaattacagttgtgaagtagcaatgaagataattttatggtgggtggggtcaccgtgacatgaggaactgtattcaagttgcaccatccagaaggttgagaaccattgagctagaggcctcttcggtttagatacaggaaagctaggagttctaaaagcatggtgctggtatctgcttgtcaacttgtgaagactgtcctggtgtaaaatgacatggataccattctgcaaggcagaacaaacatgtagctcgggtcggtctttcttttgcttctgataaagccactactgctgctgtggcagcaccttgtcgaaacctagtcacttcctggcagccccacttctgaatcccattttcacaggactttgagaatgagtttcccatgcctcaaatttgggagaagggcgtgttaacatcatagctactacttctgttctcttccatgctcctagtgcattgtgggaggagaaaaagcccgagcacataggccgttatttacctcggtggcctagggtcagctcttaactcatgagcttcttcggatgatctccttgtcttgtttgctaacgtcccctacctacagaattgtaggaccttggctttccttagacccctctcctaggtgtgtttaggaaacttcaaggatgctccagtcttcctagaaatagtctcctatatccttggacctgagatggcctcatctgacaccccttccaatactgtgagcctctgatgcaccagacaattgacttttcttccatgcttgtgctgtccagaccctaactgaggtctggagaggaaaacaaacaaagtcacaggtagtaacagctttggaagggaagaccttgaaagaatagtgcagccactctttgtttctgtgggtgactgcttccaggacactggtgatatctgaattcaagggtactgaagctcctcacataagaacactattcaaagaacttgtgcgtatcctcctgtatacttgaaatcgcctctgcattacttagcatacctaacactatgcaactgttgtgcacggttgtgttgtattgcttagggggcaataagaaaatgcctgcctacattcagtccagagattttttccccctcctatatatactttctgtccttggttggctgaatttgtggacatgcagtttgtagacaagacagaccaacaatgtgattgtcacaattgtctccggtgcatctttactcattcctaacagtgacaggagcacttgtcaactgcttctggttcactgtgctcactactgtctgtccaagcagttactttcattccacaactccctgccttgcaactgattagtctggcttgctaagattatgttaaaggtctcttcaagcccacagtgactgtgcaaatatgactgaagaaccacgctggcgacagcaggagggtagacgctagagtaagaggaccctagttcccatctggtactgcctttgccgtccgtgtccaacacgggtaacccagggcagactccttggccttgctggacctgtgtcctgggctctggatggaatgttaatgatagcccccaccctggctccacagatctgcaatgacagagttcctttctgcaggtctgccaggtcagtgcacagcagcctgtccagacagagctgctcatgcggtaccaccagctgcagtccaggctggccactctcaagattgagaatgaagaggtgagtgagctgctaccctgtgtctagtttctttgggcttgtgcagtggagtctcatgccctggactgtatagaaaatgatggctcattggtgggagactatacaaccgcacagcccacctgcactaagaatatttagtgccctaaaggatgcttacaagacctcacgtgaaagggaaacaagagaaagccggactctatgtttagaacgattgcagatttgcaggcttagaatgcttgggaaaatgttttgaactgtgagccttggctccatctcagctgtagagtgattgatagttactaatgagttcatgcttttctgcctcactctctgctgtaagtttgggttgtcatcatcaggagtcagagttaatatttaaaatcacacaatgaaataggtagtccaggccaccctaaatgtattgtggattttcaaaccccagggagtgggtcagcctcaccagtccagggttcctcccatattgctgagtggcacagtatcacactgtgccgacccattcggacatagactgaagaagccaggcaggcagtgtcagaggaaagatgtcagccaaccctggggccctggagaaaagaccccaggatgtgggcagtgccattaaaggtggtgtgcagtcaaggtgtaaggtgaggaggccactgtcttcaaatgtcatgaaggctatcctggacaatagggacagttgtgcttggaatcgctatagagggcagagctaggacagagctgagctgacataaatcgaagcaggcctgggaaaggtcacacgaagacaaaccaacttgtttttttaaacctggcaagacatatacagcaggcagacagaatgcgtcctttctttctgcttatcttctgtctccccaccaccacctcaaaggatgtttaatggtttacatgtataatgccattaatgaaatttaaatggaaatcagggccacagggaggagacagaggcacacagccctctctgtgagctgtggatgggcttggatatgcttatcctcgaatcagcttcctgtcagtctatgttggaaaaaatctttgattttgatgtattcactcatttatccattcaacaagtatttatttatgtggtatttattcacataatacatgctaaacattattctagatagagagtaaattaagggaacacggcctcataggttttcctctttctgatgagaaaactaattaaaataggaagaccaatgaatgactgcatatggagaaacagtgaaccatgagtgctatgatatgtgaagacatcaggagcctgacaccattaggaggtgacatttcggctgagaaacaatcagagagacattaagtgtcaatgatcttataataaatagagtcagatttttttgccagtgacccctttggactgacctagctctgggatatggagtctgccactgagatgcccttcatcccagggcttctgtgagactgaggtcctcaaccctgcttctgtcatctctgtggtgtgtggttccactgtgccttaggacggaaacaagtgttccaactaaatcctgtggcagtgagctaacttccccaaggtcctgtctcccagcagatcacacccactattagatgacctcttcctccatgaatgagggaaaacatgagagaatttctgttgatttccatgttcaagtggcatccctctagctcccaggagaagtctcgtttaggttcctctaaccagaccagagaaagaagcctagaagcttgactccattatcctcatgacattcctcagcagaagcaatccattaaatgaccttagatggggcaatctggtttcttagcctgccagttacttggtcttggaccaatgaccaattcacatcactgtttatgtcaatataagaagatcagccatcttgtcctgtgtaccttctagagatgttaagtaaaagaacaaagagattctcaggaaaaggacttagcggtgtcagaggcatgatgaaataaagggtatttgtggatatactgtttttccctaggttcggaaaaccctggatgccaccatgcagaccttacaggacatgctgaccgtggaagacttcgatgtctctgacgccttccaacacagccgatctacagagtccataaagtcagctgcttctgagacctacatgagcaaaatcaacatcgccaaaaggagagccaaccagcaggaaacagaaatgttttattttacagtaagtagcatccagtacctagaggccactgtctgttgacaccctgcctgtggctttggaagaagtctgaatgagagagatccagcaaaatactatgacataaatctcccaacatgcttttcaacattaggttgcctggattggttttctgaagtgtagagtgactcacccgtgggtggtattggcattgatcctgagtgatggtcactgatgcctttggaaggaaccaaagagagagttttagtcatttgggttagatcagtggtttgcaaagttcctaatgctatgatcttttaatatcccatgccgtggtgacctccaaccacacatttattttattgctgcttcataactataattttgctaattataaatcatattataaataactgatatacatgatatctaacatgtgacccctccccaaaggggtcaagacccacgggtagagaacctctgggttagaggaacctggtgaaagagtcagataaccacctagagttctttgcacgcattattttcttaaattggtgactagacattgaaaactaggacatcagcattgcgagctagttactcaggagttgctagtctctctcctataaaatcccaggttccagaccttcaattttaccaggggacaggaggataattggggctttagttcaagttaggcttattgaacatggaggctggggctgtaagggacttattttccatgtggtacacatccacatataggtcatggggactctgctcaaatgcccaaggtgacaagctttctttcatccatcagccctgctgcttgagtgtggctggtactggataacaaagcttttctttgttatcatcaggaaacctaccaccccaggatccctgggcattggtctccatgctgttttctctggtgaccagcgtgaagctgatgctatctaacagtcttggctgcagaaagctggggtttccattctccaggttgaagaccctgaatttcccgctctcccttataactttggttctgagtagcctcagcatcctagtggctcctgaatacattctctaaagtcaaatacaatatctaaaggcaaagtcgtcaaggacatatgctgccatgccctatacttgctttgatttgtttttaagctcggatggcatcagctaactctctctccatatgcagccaggcctccctcctcttaaaggtcttgcaggtaacaacttaggtaggtcctccatgagctatcctcttgatggactcatgtcacaggtaccagttgtcagaatcttaatccaactgctcaacacctatgctcttctcagatctcgtatgatgtgcagattcagggaacacggtctccaatatcttaaagattgctaaaaggaaaatgtaatggctatgccaggctatcggcaggctgaaaaaccaagtcacttgagacatacagctagactgatgttgactgaattatcctcatagaatctgccacaaattaatccagttctagcctctgactctatattgtggttagccttaataagaccctgctgcaatcccgtagctggcacatacctcattccttccatcggtattctttgaccttgtcaagaaagaaaacaaagctagtgtcttagtcagggtttctattcctgcacaaacatcatgaccaagaagcacttggggaggaaagggtttattcagcttacatttccacactgctgttgatcaccaaaggaagtcaggactggaactcaagcaggtcagaaagcaggagctgatgcagaagccatggagggatgttctttactggcttgctttccctggcttgctcagcctgctctcttatagaacccaagacttccagcccagaaatggtcccacccacaaggggcctttcccccttgatcactaattgagaaaataccccacagctggatctcatagaggcacttcaccaactgaagctcttttctctgtgataaccccagcctgtgtcatacatacatacatacatacatatgtgtcaagttgacacataaaaccagccagtacagctagtcttcatgacctctggcaactactacttctattagaggcctaagggggagcaggaagtacaaattgggataactagaatgtcacctctgcagtagtacaaaatctgggtaacagaagaaggggccgagccttgtatataaaggaatcttgtgtctttgaccaaggaaagacattatatttttttctttatgcttatatatattaatatgtatgcatactgatatgtgtgtgtatacatgtatgcacatgtgtatggaggctgatagacaactcaggtgccatccaccttttatgtgtgcacctcacctctggtttttatgaattcttagacgtgataacatcagaggtactgtttgttctaagcctacatggccaacctgtaagtcaacccttagcgaaggtgtgaattacccagggccagggcacttgcttgaaattcaagtgcttcatgtcctatcctcctcagcagagctctgaaatgtggaagtttgaaggccctgtgattcctcccccgtgagaaatgaagggttagaattgaggtatcggaaagcagaaattttcatgttgacctggtgaggagggtgctggtcctctgctacatatctgttgattcaccctaagtctactctcagcttacctccaagagataatggtggggagaggggagggtgtctggaaatagacaggcctctactccaggctgcacagcgaggagcccaactctgtgcttctgattccttagaacaaatatgatcatgctttctctaccagccctccaaggtcatggagaggcatgattctgtgtatgtatgtgtgcatgtgtatgtgtgcatgtgtgtatgtgtgtgtggcactcagtggaatcacatggcaatgacttttaatgaataaaaggccagatccttagagttacgtaggtccttggagaaagagagaaggcatgatagcctcccactcatctgagaaatcccccagggtgaatggcaatgtggcagtgatattagacttccccattattttttaaagcaggctgtttctgacttgcttcttgctggcttctctctgccatgttggggtaccctggttgggaaagtaggtttctgtgtgagacattagctgatgtatcagccactcacctctgtctctgtgacttgattctcagagtgccatcagcaaatgcaacaggccagacattctgcctttttcatattctgactccatgtcctcttgcactgttgtgactacagtcctggacctcaagctagagattctgctttcattatttttcagacaagatctttcttagcacaggctggcctcatgtgtagctgagaatagctttgattctctttgcacttaggggtgctgggatcataggcaagtgccactattcccagtttctgtgtagttaagctgggcaaacactctaccacctcagcgccatcactcctgcttcacattcaccaccagcatccgtcctgtctgacctactggcattgcgcttactctgtggttcagtgactgggcagtattctggcgctgttggataggggtggagcaagagaagctgatacctctatggagatgtggttgaggcccaggcaagtggtgnnnnnnnnnnnnnnnnnnnncaggcaagtggtgtgtgtgtgtgtgtgtgtgtgtgtgtgtgtgagagagagagagagagagagagagagagagagagagagagagagagagatatcagctgtgttgcttttctggatggctctccatcccttgtcactgttccatagcacaccaaatttgacaaggacagtgacctaggaggtagccagaactctttcctggtccccctcttgccattctgtgatgcttggggaaaagcattttgtgtacactcatccttagctcatccgaccagaaaactattccccccagtatagtgatgggagaagtcccattagaaggtttccagtggcctacacaggccttcctcatgtggaagaaaggcttgtctttggctctgctctgctagcccttggcctcagctgcaggacctctgctctcttccttgttgctctgatactggatgcatagtggagctttggtgaccagaggagcctttcaccttgtgctgcccacagtcctcactgtagaattggccaccaccactgccatagtctcctgcctcttgcgtacacaatccaacttacaagacctgaggatccctaagaattagccacttggaagagcttcaaacaggtgcagaggcctacctgtccccataccaggtccctgggtagcctgatctctctttggtttccctgtcaggaagatgacatgaagaccctgtcatcacttgactatgtgaccttaaccttccttatgcccatgtgtcttacagaaatttaaagaatatgtgaatggcagtaacctcatcaccaagctgcaagccaagcatgacttactcaagcagaccctgggtgaaggtgagttgatgctggagagcccaagagggactactatatggcctggagctgctgagccacctcagctcattcagcaccggacagggaaagacctgatgctggactcttgtgccttcactagacaggttggaaaaactgccttggtacaggggctgggatgagtcctgtgtggctgtaagaaagggcaaggccaaggggtggatgggtccccataagtaggaggtgggactccaaggacacagggacaagtgtttctcagcacgtcaggaaaagtgttggagagcctcaccaaggttctagatccagagaagaaaaataaatacatggtatggtttagtcgttaagaggccagaaaattaggtctgaagcaaccaagcttccaatggtattggagtattcccagctattccaaaaacacagggaggtcctgggtctgtttctttgaccccatccaaaatcctacgctcctttagtgtgctccagctatgttgggaaagcttaaaacttcaagccttagtcctgctgtcttcaagtctccatgtagaaacgttacccagcatagggtataaaacatttctattaacctcaagaatgtccacgcatccctttttagtcagtctctccgttctctgccaatagaaatctctgatctgattctcttctctctctctctctctctctctctctctctctctctctctcacacacacacacacacacacacacatacacatacaacctcactccccactctaccttctctttgtttttctaggttctgactatatagaccagcatgattttaactttataaacctcctgcctcaggcttgcaaagtgctaaaatttcaagtgtggaggagttagctgcagtgagctttgccttcatctgttaagttcctcccctcctgacctctaaggattggaccagtgttgagaaggtcaagtcagtgtgagtgacttggtgactactagtgttttgaaattaagatttcctaggcttagaagcccaagtactttttaaaaaaaaatccaaggtcctggttggatccttggtctgtgggatagaaaggtttctgttccctgctcccctctgagtgctaacccatttctatccttgtctgcatggccttcatgtgatcataatgtttggctggcatggctcctagtccatttggtcttccaggttttatcaactgtgtctcacactgagattgtcatggggtccacttaaatccaaccaacaaatccaggtcaatgcagatgacaaaaatttattgtaatcaagcagctactgatggatcagggcaacagaacagactcaggagctgaactacaaccctgaagaaacattggacagcatatttaaagtatgacaccatgaagcaaggagtagtagagtgggctgtagtatcatctaatcatattttgacataaggtattgagcaagggagtgtccatcaatcaggataggagttggttcctaggcctgggaacataaacttagtttgaccctggcagcaagatggagaagttgtccctgacatgtctggactcagacaactgtttctttataatagaagctattccgctattgggaagtccccagctcccctgaacctgggaccttgactttactttctccctatgattaaatgagtctaaaaatgaaatggcagtatttagaaaaagtttcttgtgcatgttaccaatgagatgtgacctctggagtctcctttccgagttttgagctggttggcaagaataactctgagaaaatgatgcttccgaatggaggaacagctaagaaccacctagaagccccatggtgtgatttttagcaagtcacctacagaaaagcccaatgtgcttcctttgacattagggacagatcgtagtagactggtcatttctacgaaagttttctttgtataaatgaatattttatttagaatgggttttaatttacatagaaattgaaaaaaatggtatcattctcatagggtcaaccctcaattcccctttattaacatcttatattactatggtatgtcacaattagtgctattaataatttttttttgagacaggatcttatacatcccagactggcctcaaacttgatatataaccttgaattcaaggatagccatgcatttgtaatccttctgcccctggctccccagagctctccaagcctgtgctgccaccatgtctttctttgatatactaatacaaagttaataaagcactgaataactgaaaaagaaaaagacaaactaagtttacaccaagatgctgttcatattgcatagctatgatctaataaaggcatgttgtgggttcttagggcactgagtaaggcaaccagaatttgagctgagcagacagacagagctcagagccttatcaaatccactcttataaattattattttttttgagacaggatctcactatgaagctttgtctggcctggagcttgctctgtagaccaggctggacttaaactcacagagatccacctgcctctgcctccccagtgctggcattaaaggtgtgcaccactctgccaggcctattctaaaatgtaatctccaagtcacctcagctccacctgagcagtttggatcgatacctaagtacaggcagggttagggtgtggttaggcctcatcactggtctacacctgccatcagagctatttcatgttgctagagatgaaatgaaaacatttaaaaaaaagagatgagctggagagatgtctcagaggttatgagcactgactgctctcccagaggtcctgagtccaattcccagcacttacatggtggctctcaaccatctgtaatggaatctgatgccctcttctggtgtgtctgaagacagccatagtgtacttatatatatgaaatgaataaataaatctttaaaaaatgagaaatatggtcctcagaaatattcaaaagtattcacgctgggtttgttgttgttatttcagggatgtttgtttgtttgtttgtttgtttcatgatgtcatatgtctccatttctcctaagcacccctttgacagtgtgactcaaggaacctgccagttagaagaaaatgtccttccaggtcattttcatttacaagcaaatttttgttcccctaagacagggtttctctgtgtagccctgactgtcctggaactcaatctgtagaccaagctggccttgaactctcagagatccccctgcctctgcctcccaagtcctgggattaaaggtgagcgccaccatgcctggccaactagtgaatgtttcaaaggcggctaagtactcatcaggctggcattgctgttcttgagagcacacactcacagtccacactgtcttgtgtggtagtgtcattttattgcccagagaatttggtttgttgttgtctctgaatcttttacctgtgacctccctgtcactctgggcatgggtcttctgtaagttcctacctgtgtttctacctgggatgctagcacatttctactttgctgaaggtcttaagtgttagtagtttattgtctgtaacagagatggaacatagcttagtcagacccaagcctaacagcctatcataaaactaaacagtcccctggactcaggtaccaactatattttataatatgtttctaaaaccccaatgatctctgattgtaaagacaatgctttaaaaagaaacttggctgatatttgttagaaatgataattcatatctctaaataggttgcccgtgggtttccagagagcaaggatgcagacagaaagctgaagggtcccagaggagggtccaccttgactgttttaggtcattcaaggccatgacctaaacctttgcttcctaccttcttgcttcacacagctgtcttccatatatccaaaagcacagactgacagggctatgccacgacacacggacagatggggttccatcctcacagggcacagctaactacctcagtcaaccagctgcatacaagcattatgtaacaatgaggagatcctctgagaaataggttaggcaactctatcaccatattaatatcacaagcagttctgacacaaacccaaggctgactattcccacagggcatatgatgcatgtgtgagatcacattaagagattaatgcaaacacaagagaaaatgacataatcaagaatgactgaaacacaagctgagggtgctttcggtataacacaccatgctgtgttacagcaaactcatgtttttaggagaagaaaagatgttttctaaagtagcataaacagtagatatcacttatcagtatcaagtgttaagtgtacaaagtttagtgtgctctaattttataaggacagtgtagtaggtgtgtttacaccattgtgaccaccatgggaatgtgctataccatcatgacctcatgaggtcatctctagacgtgtattgcagcttcactctgaccctagaagttcatattcacaatctaccttgtacctgagaaggttccagctgtgtgaaaagatgggcaagaggggtcaggacagaggaaatagtgtgtgacactgtgaggagcccatagcaagcccacggaagagtgggccatttggaaaccaaaagaaggagcaggaattgccttactctgtgctaagggtagcagttggatgcagccctgaggaaaagggtatgtgttatggctggccatccttacccagaacaatctcaggccatcgtgaagccttttcatgggatgctgtgggttctcccaagtcactgcatgatgatttaaccggagtctcatgagtctatgcagcagaccccagacacacaagcagattaaacagaatacatttgcctgctctacctgacttctcccctgccctggctggatctttggcttcagttcaaacttctgcagtacaccctgtcacctgccaggcctttggtcaggggctgaggaacaatatatgtctgtatgttccatgttctattctcagatctcaggttaccatcttcccccttcatttctttctttctagccccacactaccttgcattccttaggggagaatgcttctgttctttcttaaaaacaaacaaggaaacaaaaccttaggggctggggatttagctcagctggtagagtacttgcctaccatgcataaaccctgggttctagccccagagtggcatgaaaacctagtcaatggcaggtggaggcagcaggatccaaagttcaaagtcgtcctactttgcataatgagtttgaggtgagacactcccccaacaacaacaacaacaacaataaaacaagcaacacaaaacaaaccctcatatgaacattagtcagattctagtctagagctgtatctccaaggtgaaggccgtgggccgtgataagcgaatatagaaagaagagaaacagaggagctctaaggagacccttgtctactccaggtggaggaaactctactctgcatcctgcttttcagctgggatgcaaaaggctagtgagaggcagctctgcaaatgtcatgggcaagacaagcccagcaaacaaagaccaacatggagccctagaagagaaatctatgacagagcatcatggccggaggacgaaggagtctttgtacatgtaacagtttgcagagtcccctggaaccttgaatagctaatgaatacagagacagggaccctagaaagcaagaggaagatgaaacttgctctggctaaaactcgttctttcactgctgaattgggaatatattgtattgaactaggaggtgcacttagaaagcaagagatggtaggaacctgggccaagatggtggtgttgaaatagagtgaaatgggccattgaggttaagaaggaaagagagctttgaagagcctttctctgacttccaaccgaagtggctaagtgatgtccacttacggaaatgttgaagacttgggcacgagtagtttaaggacaggggaagagcattttggggaacaaagaatgaagttcttggagggcagtgttgtgtgactcatcccatatagggaaaccccagcagaacaaagtacagctaggaccaaagtccaacttggcgaaatgatgaattttattggggttccttacaggaatatgggtgaaggattacttataggaacagaaatggctcaaagacaactgtatcaccaaggccaatgccagctccagtgacagctcacaaagctgggaacctagagtgtactgcacagcctgcaggcagctcaatgggttggagtgtcttttccaagtgcctccctgccagtttctgcctcttccaggctggtcttttctcaagtcttctttgcagcttggttcccaatctaagagggactcagcttttgtttactctggcaaggagggccctagtgaatctgtttagtttcagggtctccctgaagctatttggagctgttcatcttcctgcctaaggagctttcttgtggggtggaatgtttcaagctgggaggaaactgtaacacaacaggttgttattgacaagtaggcaaggaaactgtagtctggtcacacagcgaaatattactcagccataaaaataaatgacctcagaagcaggtggatttctgagtttgaggccaacctggtctacaaagtgagttccaggacagccaggactatacagagaaaccctgtctcgaaaaaccaataaataaataaataaataaataaataaatacatacatacatacatacatacatacatataaacaaacaaacaaataaataaaatgacctactgaatcatgctgtatggataaacctcagacaaattaccgtaagctaaagaagacagcttcaggagagaaaccacaaggagagggattctctttctaggaaatgcctatcaaacctgcagagacagaaagagtagcagttgcctaggacatgggggcaggattaaagaatgactgtagatgcatacatgagatctgtctattgttgttttaagggaaagaaagttctcagcttaaaacaatgaccaaagccaaggaaatatcaacatgcaattttgttttctttccccaggggagagagcagagtgcggcacgaccaggtgagagccggggaatctgtgtcctttgtaatggctgnnnnnnnnnnnnnnnnnnnnnnnnnnnnnnnnnnnnnnnnnnnnnnnnnnnnnnnnnnnnnnnnnnnnnnnnnnnntagggtgaagacagcctgctgggagccagggacactggatagtcctcacctttggggccaccggggtgatgggagagggggcagtggctcctgaggctgtattgcttgctttagactggcaaaaccatgcacgctcctgtaggctggccacagggaactttcatagctgctgaggggcagtggaagagagttgatttcagggtggctaaaggtgctagcagaggctttaggctgcagagctgctgttttcttcttttggatgttacatggccactgcccacactgctcgttaggcgctgcaggtccaggctgggtcctcagttgctaaggctttggggttggctgatgctatgcccagatgaccacgcgcatgctgcttacacacggacgtgtacccagattacctcccaccctaaacccctgtactgcccatcatactttggcttgaagtttagtgggaacttggatgcactgactaggccagtaagatagggaacccaggcttcctcctggctccttccgcatcttcctttgtgcttcccctgagcacaccagagccagtgaccacttccactcagcagtcttcagcctttcacaggcattagatgcctaagcagccagtgctgccctggtgtctggattttcaacaggaatctagcatttggcccagagatccgccctctatcgtgtgtggcagttggtagctactttttttttttaacctcgttttgagatggggcaaggggctcagtgacccagtgacactctacttccaaaccagtcctttccaatggctcagaatcctgaaaagctgtcctacttggcaacagcaaagatgacccttgaactcttccctgctcctggggaagcaagtgggcgtggcaaaggcttgggaagctgtgggatttaaatatgttggacctggagatttagagctttccaggaatccagatgttcatctggcccaggcagtttggaaacaatgagatgattcacaggcaaggaccgtcccacgtgtggaacagcagttgctcaggtcacatttgaaaaacccaaatttgttactctttttatttttttctggtaagagagtattgctataaaactcagagaactttataccaaagtgggatgaattgggccgtgtcttcctgcctcctaatctgtaagatgcaggcaggacattgctccagcagactatggggtcggggtggagaagagccataatatatcccttggccaggtcttaggctcccccagccccaagaaagcccaggaaatagatagatagatagatagatagatagatagatagatagatagatagatagatagatagatagatagagacagacagacagacagacagacagacagacagacagacagatttgagagttctagaaaagtcagggctaaacagaaaaaccctatctcaaaaaaagaaaaaaaaaaaccaaaaaaacccaaacccctatatatacatatttttttaaaccgtctgaaatactgtcttctacaattgctttggcctagggattgggaagtcgaagtttggatgactagacctcccacttaggcatcctgtcccaaatttcagacctagccagatattttctggctcattattgagcttgtggacctcactgtcaacctgaaagtggttttaaaatgagtcccagaggccccggatgatctgtctctgcacctcggctgtgtcgacagtagattctcacagtcagaggcatctgggaccctcgtccgtgcaggttccctcagccaacttgctcttgcccttgtctagttggcctctttctcacacttaaagccagatttgtgaacggcctcaattcaccgtagccccgctgttctcaaagctgttcagcagttcctataggcagaccagatgtgctaatggactttgaagaattgattaaaaacggcaaagtgagatgcaaacaccagttcttgatcattatgatttgaaaggagatcagcttccttaagcaggttgacaagaggcccgagtccttatgtgaagggagatgtcacgacctatcagatgcagctcagtttatatccaacttcagtcagcttccaagaatccacaagcccttgaacatcagtgttgacaccattttggatactgacacccacatctgttgggttgtttgggggaattcttaatctctcgctttttgtcgcagactaattctgaggccacgcctgtgttgccagcatatgctaattttcatcccagctgaaaggcagagaggggccattgccattgtctctggtatccttctctcctctctgtggcttgctcctgttttcccttctctctctctttcctttttttgttttgttttgttttgtttttgctctgcaactgagcagcagaagagatggaaggcttaggctgccccactttccttggctgagctgcccccctgctccccactttgtgccccacccagcattccagtaagttgatacagatttggtgtcattcaaagttgggatagctacgtttccttgtcagagattccagccactccccagtgcaccatggggtggggaaagaggccttcattttcttttatactctggacttggcaggaaaaacctggggaagcatatcctgctcctagagctttcgactctgccttttcagtgcctgtgccaagatccccattcttgccggcctcgagagatggatagacagttagcaagatccctctctctacttcatacctgtgatggagcttccagtaggaagaactgcattccactccactcccggctcttgatagatcccatctgcgtagccactggcaaatttcttaatttcctgtgggctccttggcctcccagacttgcgagggggttaatcatgcaatgtgggagaagtgtctccagagcccacagtactaggaaaacaaaaatggtggcattgccatcctccttattcttcatccctaaatttggatcctgtggctttgtgtcatattttttttttctcttggcttttacatttgaaaattcaaaagcagagagccactatatgagattccccctccctgttttcacacattctcaaaaaagatgtagtatttttttacaaaaaggaaatgacatggacttagctaaccaaattcacatccgtccgagatgggctggagataatcctgccagctgtttctcctcagagtttggattgtgctgttcttttggtgcccttgattgggtggcatgctgtttggactttgcccgtttgcccatgcatgtcctggagctagcagcctttgctcaacacttagaaacattctggaggacttggctagagtgtcctgtatggctgggctgctgaaggacatgggcacaggaagcccaagggagagaggcagggcaagcctccttcgtgttggttggttccacagtccatataattcttgcctgtgtgggctgaggatatactttagttggtagaatgcttgcttagcatgcacgaggccatgagttcagttgctaacaccacattaaacccagtgcaaaggtgcatgcctataatcccagcactgaaaggatggaggcaggaggatcaggagtatgacgtcatactcggctacatagcaagcttgaggccaccctggactttatgagatcctgtctcagaaacaaacagaagattcttgccaatacacagaagtcaatcaagacttggagaaggggcaagtctttgcttctcatatatgcccgttatctgcctggctgaatatacactcattgttcccatagcttgagccaaaccatttgaaagtaagctgcctcatttgggaagggtgcttcctccaaactttctaaaatccctttccctgaaggtccccagtgttgagtcgggccagtttgtgtaaggaaatgagcaaagaagccagtccaggcccatgcatggcgagcaattgtggacacgggtctggtgtctgtggccatttcattgctcctggtggactgtggtatcaggactcccctccctgtggctgacagcagaacccagggaatggagatccgaaagcaaagcaagacactttcaacctgactcctgccatggactgatggggcagacacgtctgcagctagaaatggcatgatgtcctggcactatgcccatgacttgaaacgtaaaagacaaacaaacaaattaataaacaaacaaactcacttccttggaggggaagtgggtagaggtgggtgggtctgactcactgctctttttctctgagccttagtttctgtagaatagagccacgtgtaataggaagacaccgggttaagtgtggtaatgggtttgacagcgctctgatccaaaatgttcttgaccgatgagtgggataacatcccaggccacctacggatcctaaagaaggagcagcttgcatcctgacatctatctgtctagctctcagatccatgcaacaaagatgagtcatatgcctttgaaatgccaagaggcatcaggaagagagtgcccttggtacactgggagttgggccttggtgacagatttaagccgatattatgaaaaattaacccttttgatgatgcttgaaagtctcttgctttcttgggctacagatgacacctttctcccctcctcccctccatctggtctgcaggatgccagcctctggttggcattgcaggggcttcttggatacaccccataccccttaaagtagaatgcatttgtgttttgtgagagttgctcctgcttggcattgtaggtaaactaagacctaaaccatccagaggccttcagatggaacatggggaacgaatgtgttgggggccaggggctccctctgcattttgtgttctcttccagttgtgggtttgaagagcgtctctcccagcggtacgtttatgttggttgccttcttgatttcttttgttccgttttcccctaggcccccctgtcttccccctaaaccacagaaaatgaggagacctaggcctctttcagtgtatagccataaactctttaacggcagtatggaagcgttcattaaggtacttgctggggagccgtggagtccgcgaatgagtccaaagtaatggcagcctctctttcccctgtcccttccagctaacagccctggcaaccccttcgccaggccccatgcagcttctcattgcagttcattcttagcttctgtgaggcttagtttcatcagagcgttctgcttctgactagcggaccctaagtgggcagtcatctctctcagccatatggggaggggtctgatcagtcatgcaccaaagagatggagtctcaggtcagtggtcctagccagctggcctcattgctccacgagctgcagtcctgacacctgaagggcaatggaggaaactccactattcagcttcatccccttcttcctgaactaggactaatcaaaaacagcacaaagctagcccctgaggggttccagacaaggcaactacagtttgttagctaagtagctaccagcacaggaagccatgcaatttttcataagaaaaggtgtttccacttaatttggcttcttagtggttggtttgaaagatgggaatagagttgaggtagcccttgtaaatgccaggttaaccctcgatccagagcttagggaagttaaaaatgtctcagctaaccgagttgactttttctgtttttgtttatcaatcagtatcaaaccatccgggatcaaactactcaaggcagagatggtgttgagatgtgtccttaggggaaagaggaggggaggtcttagatagttttctgaaagcctacctgtagctggtctttgctactttgtggattcttctttttctaccatttatctccctaacactagatgggagaggaatagggatagagagggggagagacattaggaaagccggtgaatctaatttctttcctttagtttcttctttgaccacaactactaacaagtcacaaccaaccccccttgaacaaccactaaccagcagccctgcttgtaggggctctagcatgtatttaccctctgaagattccaaacatcactcgatcacagaaactctccacagctgacaaaaaacacgcctctgccagaacagaagccaagtgtcatagtcaagcactgtggacagtccaaagcgtccccatgtccccacacctgggattaaaacgcaaacacattcttaccaatatttctgggattttaaagaaacccaaattccaaaattgtcactacacccaccagcagccaatgagaacagtttctgcagaaaagaggactgtgtcagccaggggaagggcagaggctcgtgagcatctctagtgattttggagttatagaggctgccccatgcaccggctttctgtcctctgccctccctcctccggcagggtgtagcccagacctagaggacagagaagggctcagcctcagggatggatggagtaggcaggaccatcttaggccaaagaaaaagactctgcctatacactgagtcttcaaaacagaacagaagtgggccgggcggtggtggcgcacacctttaatcccagcactcgggaggcagagacaggcggatttctgagttcagggccagcctggtctacaaagtgagttccaggacagccagggctatacagagaaaccctgtctcggagaaaaaacaaaacaaaacaaaacaacaacaacaaaaacagaacagaacagaagagctagcgaaagagggctttcccctggacaaggatagtgcaaaatacctcagagtgcttcaaatgagaaccccctcagggactgtgtgacccacagggagccacccagagggtcatggcaggtgggggtgtgtctaaagagtgctttgcttcctcactgcctctgtcccgcctgtgcctccttctccctctcctctgcttcctcatcggtggtgtcagacttcctcttagaatggattccctgctccaccagaattaaaacctccatggagctgaggtgatgatgtggtaattataaggcatgtcctgcaagcctaagcacatgagttcaatccctacaacctatgttaaaaagctagggatggaggcacacacttggaatcctggctctaggggatcagtggctccctggccaaccagcttagctcaaaatcaaggtggctggtgcctgaagaatggcatgtgaagttgacctttggcctccacaagtatgcactcatgctcgcacacacacacacaaacacacacacacacacacacacacacacacacacacaaacacacacacacacatgaacaccctcctactaccatccccagacacatacagacgctccctttgaaacttagctttgtgacaccactggaggtatgaagtggtaagaggaagtatggtatagcgaccctggtcaattggctctgagaaaaacgtccaaagaggaaccactcatctctgttggagtgcatgtcagagttctaagaagaagaagaagtcatttggctggggaagaaaggtgggtttgtggaacacaatagcacgtctctatactccctctgctcttaggctacctccaatcagtgaagtctaacaacttcagcaatggaccaactctgagcagagtcaccagagtgacatatggcataggtttactctgaaggatccaaagagtccagagaggcagagtctatagtcagtcttccaactgccaagaggggaatttcagtttttattcagctcctcatccggtctgaacacatatcagactgagtcctcagctttgacaatccaggcctatgaaaagatttgtggttgaataatcccactgtgttgctgtgattatgacgagagaagctccaagttaattatagagaagatttctggagttggacttatgggcttcctggagtcttcctgactccaaaccaaaaaaccaaaaaccaaaaaccaaaaaacgttgtgtttcattcctctcagactgaaggggactccatttatttattataagtccatggttaggcccagaaggtctacctgtggggttggtggagagtccccaccttacttctatgaaataagaataaatctactctgtgagtttagggtaagcatagaatgggctgatacatgtatgtttctagaatcttctggcactgtgtaagcctgttcttctttcttttcttgcctgttcttaattagattaattttaggacaccatcccgagactccctttggaccaggctgttgctgagttctagaagtcatgtgggtttagctgacatcattgcaactcagatcccacgtcgtgagatgccacgactggacatatggtgccccaggaaggttcacgtctcttagttagcttgtccttttcactgagcttgggttagactctctgcctacctcccacctagaccccaagtcactgcacacatgaccagaaaaatcaggcaagatctctcagtgtgggaacaaaggcttcagtccaccatcaaggtcacaaaggtgttccaactgactttctctcatcttcacccttccaagcttctgtgctcccagagggtctcagtaccagggcaacagtaagtggttgggaggggaaatagagccatgcttccagtcagagaagattatcaaggtattggatgtgtttggagtctggaatctggtgcgacctcctggatcccatctaaggagagtttgtgaaatagaatatctaaccaacaatgatgcttccagagatgaatgctaggaaccagtttacaatagacatgaaggatcccttctataggcagatggggtgaccttgtatgtggtcagcagactcttgtcattggtgactccctcatgttgagaaactgggcatggatccaggaatggggtagacacacatctcctacagattgacaaggaatgaaagaggcccttccatcactggcatctgagaaagaggctaggcagcctattgaaaggctggggactgctccagaactcttaggaggtctgaagaatgagggcccttcccttgggcaggctggtgggcaaatgccccaggaccattgctggctgccattgcgttttggcattcacggactctgaaggatctgcatactctaactgatcttactcctgcataatcttttctttttcttctgctttgctgcctgtttctcttttttgttgttgttgttatcagaggaagaagaaatgctcgaaccaggaaccaggtatttactagataggcccgaaagccccatgcaactagtagatccaatgccatctagagtaggaccctagatgtttgatgggcccatctcctatcctctccccagatgcagcatcagcaagtggggggtgtggcagagccaagagcccaccaacttactagccttctagggaggctactcatgatgtgatctgaagtaacaagaaggtcaccctttcagggttttagaaccccaaaagaaaattaacccttgcccaaccactagggactatagtctaatctagaaaggtgtaattgaatatccttttgtgtcctgggtacaactctttaaattgcatccaattcatctcttttgatttggcatcttctagaatgtctccatatactatgcttactggtaagcaaaatatgtacctggatatttaagttgagacatcataagattcactttcccttcttagagccccacagggcttgtaagagccagccctgcttcatccaaagtgtgtcctcagttctgacactagataccacagtaatagggaaaggcattgatcctgactcttggtccccaagccctgggaaaagatgctgatttgggcaaagtggagttgggagaggcaggtcatgcttcaaggtcagaatccaggtacctccacacactggcttccgtctctcctgtccccagtgtgcctgtcaagctgagcccagttccttgccagctgggtaagaagagagcatttctttgaatgtatcctagctatgccttcttccgcacttaactgaaggccgtatggtaactatccctggagactagagttagcaattccttgcttgttttcctactaatcacgtggtactaatctgttggcttgacttgatcaccatgtttgcaacgtcttttgccagtggtttggtggcatgcctgacaaaactcacatgtgtttttttcccttaaggattcaggacaagctataccacttgtagttgagagctgtattcgattcatcaatttatatggtaagcaccatctcattcagtgggttcagttcattgtggagcaggtgccaggctgttctgcaagaaaaaataatattctcagtcatcttggaagattcttggaagtccatgctctgcttctgggggaataaaaattctccagggaatggctgttactccaaacactgtctttggagtctctctctgtatctctgcctctgtctctgtctctctctgtgtcactctgtctctgtgtctctctgcctctctctctctctctctctctctctctctctctctctctctctctctctctctctctctctctctttgtgtatgtgtgtccagggtgtgtatgtgtgtccagggtgagggaaggaagattgtgtgagggccccagggtttcaggtcactgggcacagctctggcgtggacagaagtccgattccagctctgtcctcactcggagtcaatcaggttgagagtctgaagctccgagaagggaatggtgtcaggaatcggttaaccatgacgttaccaggagggcaacttgtgtttaacttactcacaaacctccattttggctgcggggaactcagcagtgatgaaggcaagcaccatggcaaccctgcagtttccaaactcagaagaacaaggaaatcaacagcagaaaaagaacttttagtcatcctttagcacctctagagattacatagaggatcactgccgacccccagatccatagactctgaggtcccttgtgtaaaatgctgtggcttttacacataacccatgtaatcttcctataaatatccatccatctagagacagatagcatcggaccctgtgtaaatgctagataaataatcatactgttttgggactaatacaaaataatctatacatgtttaatacagaggcaacatttttcctgaatatttccaagccacctttagttgagtcactgaatatgggtagctcatgggtagctcatgggtagtagactgtaaaaataatttttttcatagtgacactgccatgaaactaattcagaggaaggtagatagtgacatttgggggcaggctgcttgactaaagtgagaaaagacccctgaggaaggcagccatgcaactgggatggagaggatgggggctagctggtgtgagagaaagggcagtattccatgtgggcgaaggataatccagaagaatggcaaaagtcttggctagtagaaatcaacaaaaccacactcatggttatatgtgcctgtctcagcatcagggagatggaggcagaaggatcaccaagagctggaggctggcctgggctacagagtaaggtcagggtcagcccgggcacaatgtgtcatagcttaactatccaggtacataccttcagtatgcatgacccatgaataagttctaacagttgctagtgtcagctgctggccatctagtggctagcctgcatggtaaagtcagacaaaacccccaacaaccaaagagttgaactgcatttatcgagcatgtaaaatgttcacgccaaatgtccactaaaccctgacttttcagggtaaacaataaattgtaacatgaataactgttctatccaaaagaagtgtgaggcaggggaagatgcccagggtctactctaattttctcttgagagaggcagaccctctgattcctgcaattgtataagttgctgttaggtcccaattgctaccaggtgccagagaccccattttgctattgtctcatagaaattatatatatatgaaagtgtggttgccctttagtaatgagtccaagctctttcttttttctttcttgggaagggatcttagtctgtagcccaggatgtccttgacctctgcaaaatcctcttgcctcaatttcagccttgcaaatgctgggattatagtatgaacaattctgccagctaaccagtttattgtgtttatttatttatttatttttgatgctggggacctaacccagggcctagtgtccataagaccaagcactctatccttaactatgcctccaactctctgactccctgactccccaatcccaggccaggatgtaccccgaagtttacattttcttaagggaagaagttacccacgtgggaagaaaggaatagtgttgatagcgttttccttcaggcccaggagcaaattcacagacttatgattctgtatgtgtctgagcaattgtgccagctgtaggtcattgtcaaggccagtttgtcaccaggagcttgtcaccaggaacaactgttctaaaagatagaagggaaaagagagaagcatggaagagaatctccaacatttccaggagctgggtgaactcaaggcctcatgttatttgtgcttaccgttggcttgtatcgttatttctttcttaggactccagcagcaggggatcttcagagttccagggtctcaggttgaagtcaatgacatcaagaattcctttgagagaggtgagtgcagactgactatctcaagcttgtgggcaggagaagccaaagttaacataggtctcaaagccaatagtgcacagaggcactgggtctgcagcagctttctggagatgtctgctcactctcttactaactcttcattccaagacatcctgatggtagctggaagtcagctatgttgggggtgtttacaccacagaaatagcaaacctcaagatctttctatcagatcttagacttccccactcttctccctttatctttcatcacaggctaaatgttcctaatcccaactctcaaacccagacatttgagcatttggaagttccacatttacctccatgtgacacacacagccaagctgcagctacacaactgacaccttgccaagtcaccctcagcttgtgtgtgcaactcggatggtcttttaagtagatacttgatctcagctccaaggcaacaaaattctaaaatcccaaacttcctggctccacccactttagtgtttaaggtttttatgttttgttatttatttagagatagtgtcttgggtagccttaaaatcttcctaatactcctgcctctgcttcccaactgctgaggttacaggtgtgagctattatgcctgactttccacatactgggtgtgtttttcatacttgtgtgggtatacatgtatgtacatgtgcacatgtgactgtgtgcatagtgtgcacatatgtgtgtatgtatatatgcatgtatgtatgcatatatgtatgtatgtatgaatgtatgtgcaaagctcctatgcttgcagtggtctcagaagctttgtaagcataggaggacccagcaaaggaagaaccaactgtgtcatatgaagctcacttctcaatgtctgcctttgccacacagtacttagcttcctgccatagtagaactatgaactggaaatccaggaaaaagcattcggatagtgtgatccctagttgtagagccaagcccactgctgtccatctcacattctcagtccagggacaaggagaagacatggggtgcaggcagcccaaactgaattcccactttcagtttcacaccattttggaaagacacgccatgcatcccagctctctgacttagtgccttattctctgggaggctctgatgctaactgaggtctgaggactctgatcccagaaccaggtcccagcagcacatcccatccctatgggcagtgaaacacacactgtctttcctttctcagtagctcaactgcttcagacacactgtatagccttgaactcattgtgatcctcctgcttcagcttccccaggattacaagctttggctagaaggcattttcttatctttttctttttctgtgagccttcttggtttaggagtgtatggcttaatgtcattggctgagctctgagcaaaagtgtgttagacttccactcatccggttcccacatttgttatcatccttggaggagtgaagtctctgcctcctgtacccttggttctaccatagggcatgtctggcttcagggtgaaggaagcattctgcagcctgtacagtccagctcttttgtaccccagtcaatctggggtagcattgagtattggaaacaaatctggctggctatggtgcccagtggccttctaggggacaagggagtgtcagctctggagaacattccagggtgaaggacatttaacaccagcgctgctgttttcagaaactgccagtcatttcttcactcggcaaacatgcaacaaaccttaaacagtacgagatcatggaccaggcctggaaatacaatctgagcagaactgtccctaccaatggggaggccaggtcagtaagcagatagtatgcctgagccagaatggagttcactggttattatgggagcccttagcctgcatggatgaaggaaagaggaggagaagaggcagggaaggatttccagggtggaagcacctaagctaaggcaaaaggaaacgaaagcatccaggctaagggaacaacatatgcagaggccgagaagccagtgttgttcctcactgccccaacctctcctcatcacttacagactaggccaggatctgcaactcaccctctctgatgctgtggtacccttgaccttccttgctgtaaatgaatagaatgtcgttctagaacctttgctcccatgggctccacccatcccttcacatagagctgcctgggtcctgcccttgactccctgggtaccggtccttgaagaagaccagcaacctggcaggacctcccctgaccttttcctgcattgtctccctctgttggtaagcctatggcaatgggcaacaccgcccttgccccagatctcagctaaggccagcatttccggtcacctgcttgggtggaagtgaaaagccttctctgctcttgtcaagccttgggtcctcacatagcaggggaatctcctgaccacgcatcccagccacagaaaaagaaagagaaaaacagaaacaaacaaacagatctctattttcttcttccatattttcagttaggccttctccttgtctcctcagtccaaaatgactctccctctccccgcagccttgttctttgggaaggcacgggactgcacgggagtccagtcctcttccaggactcagtgggactcagctttccatcaggccacctggaacaacagctctcattcccctttctagataagccagttgtctacattctcttccgctttgatttggtgttcctgagcccagagagactggtcttacagaaggccaaaggcctggactattgtcagggaatgtcatggtgatttcattcagggagacaggcataagatgatgttggtgatggtgatagtcatgatggtgatgatggtgattgctatatgtatttgtgtgtgtgcatatctatgtctatgtaggtacacacacataaatgggtatacagaaagttaacatgttaatcaagcaattatttttaaaagtgttttttcttccttaggggagaaacattctcaccttcttggtgggggcatctgagaggttagcctagggagcatgagtgtctgggctgcctcataccgctgttcaggctggacacttgcccggctcggaaggcaggtgggtgggctatactctggctcatgctctgtaagctgcaagcactggtacagaactcgagaagactttttctgattggcactaaaacacattgggactagaagagactgctggtaccacatgcctgtttccaatgaaggcagagggaagagatccaggttgggtactcggatgtgttcgttgcttggcagacacacacaggtgttccagctgttagcgcaaacttccctcaacacctctaggaaggtgttagattactctctgcttcctttcacctcccctggaaaaattctcagtaatagaccagcttagcagcccccagttaaacggcagagagccactcctccgaaatgccctatccaaatggtagaaaacctcagaagactggcaatatgccatgggcagagctggggaagacaggcttctccaggactacaaagtagtgtggccccaatgagagggctttgactacaggtgagaaaccacacccacggtgacccagcgtgcccccttccaggaacagagctgagacctgcctccacaaatacaaatgcgcacatgcaggctatccactgtggcagtgtttatcacagcaaaagactgaaagacgtcaaatgtggagctgctgatatatggctcagtggataaatgcatttgtctaagcctaatgactcaattcctgggatccataagatagagagaattgacttctacaagttgacctctgacctccatatgtatgccttgtcatttgcatataactaactaaataggtataactagtaattaaatgtagaactgtagaaggtcaagtgagtaaagtgtggcctccctcactcactgacacacctcccagtccggagaggcaatctccttttcaaaaatatttttgtcatatttgttgaatcccagatgtgcaacttgtgaatgcagagagctgactatagatgcgtttgctcatctgctgtagtagaaacacagcagacgagtcagactaaagaaaatggtggtgtttgaggtgtgtagggaaagggtaaagatgggccttctctctgagaacctttaaatctggtttagggagctgagcagagaagggcctcggttcagatgtccagcattcatgtagaagccaggcatagcagtaggtttgtgtaaccgcagtactggggagcccagaccagtggctatctggagctcactggccaagctaacagaatcaatgagttcctagggttacaaggcaagacccatcactggagactgaccccatgtggtgagccatgcttaccacagggactagtgggcagacttacagtgccaggattctggtctcacttcacaagtctcatgtttgtagcaaaaaaagggaatacctctatggtgtttaaagggaaaaagatctaccaccttaactcagtgctctgcatacctagtagcagtcattaggtgcctctgtattctggtccaaaataaaaaactccagtcaagtcatgaggaaaatgaaaggcacagtatgagacaattctgcaagacagcgagacctacatcatcaaacacaaactcagcactcaaaaaacactggagtgtattttatacttataaaacccaagaggcagccattgagctgggcatgccggcacatgcctttgatctcagcatttggaagcagaagcagaagattgtcccaagttccaggccatccagggatacatggagaccgtgtctcagacaaacaaacaaacaagaggaacaactgccaaccagcaaatgaactgtgggaactcaggatagtgcttatatttttaaaacaaaaatccatgacaggcatactgggatagttggcggagtttgaatgtgggctgtgtgtggtgttatttttggaaggattgttctctttcttaggttagataaagttatcgttgttagccgagagtgtcctgattcttaagagaaatgtgtgatagtgtcaaaaattctcaaaaatttgagccatggtgtatataataaatagagaactcaggagagggctaagtaatgggtgatgaacattcataattggatgcttatcccttctgagtattttctaataggaaatttaaaacatgcagagactgagagtcccaggttttcaggcttgtgccatcttcttcctcctgtctgtctggccatgtctcttcctctttcaattgaggaaggagaatatcttccagtgttggaaagagattctctttcctcaccagcctaaaacattgtctccacacaggtgaagaccccctcgtggatgaccaaaatgagcgagatatcaattcagttgctggtgttttaaaactgtatttccgaggactggaaaacccactctttcctaaggaaaggtttcaagatttgatatctactattagtaagtattttacaggtgggatggcccattgcttcatggatctttatagaagtcgaagtgctggcctctttatcctgccaggcacaggagaggaatactatgaacaaagtatggttcttagagagcttaaagtcccagatctctaggtagcacaatgggctaatggacatggtatactccctaagtacaacaggagctaagaggagaagcagagagaaacctgtagtcacagagtaggcctgggggagggacacgagcaagactgccaagaggaggggattcggggaagcctggaagggttggggacagtggcccagttgaatcagcaggacagagcatggtgcagtcaaatgtagcaaaaggagtagatttgaatgtctttgaaggaccctacagctttgtaccttgatgggtagggatccatggaaggtctaaggaatcaggtcagcaaacaaggggaatgatgatagttaactgactgggtgattatctctacactgctggtcataaggtacttgactgatggaagagatgctggccatcaggatatgtcccagatgtaggacagtaggagatggtacagatgtgggctcacattgttctgccttcagcatgtcttagaacatatcctcactgttaaatatttgcatgtcaccttctaattaaaacaaaggattttccttttttctcatattagtgatttaagtaccctctttataaaaaaaaaccctgtctttaagaactatgatgtcgctagtagccataggagggtagctggcatgggtgactgacaggagggtctagaggatttatagaggagcataagaaactgaccgtgagctgtcctgggtgagacttctttcagccaggtcttgaaggtgagctagagggaccaccctgttgaaattgaaggcaggcaacatcaatccacatgccctatacagtcagggcatgggggtgacggatgccaatatagacttccacttactcttcaaccccacacaatgcctactcaagaagcaagaaccccagctttggtagtagcacctcatctagacccattgtcctaggtcgttttcaatggaagaacagtggccagaagataaggcatgcaagagtgtcagtagccctgtcatgctggctactgaggagaaaaggggtcttttggaggttggagttctgtgaggaaaatgtcactgacaacgtgtggcttgtccaccctacacacagcattgacacctcacttcttgtagttctggtttgccaacttcataggtgttccgtcttgctgtgccatcacaccagcatttgactctatggttcgcctgagaacagatccctgatctagatcctgggcaggcgctaagctttctggtcaataggtcactcaagaagagcccgtgcttgcactattcttttctcggtgactgcagcattcccaggcctgtgctatgtctggtgcctctcacattttactaaaccactgtccctgtctgtgacaccaggactccaaggctgccagtgactgaaatccaaaccatctgagtccataaaacagtttcagatcctctaccagaaaactaggcaattcattttaggcttcacatggccactctgtgactcttctgaccatcagataggtttctcatttctggcagaacccttgctgttccagattttctgctacccaagtcccaggcacctctctataggattccccacaagtcctcaagaccagctcaaagagattctaagtaggctagcccccaacctgtcttgttctgattggctctagccaggatctcatatgaatcccaactgagagtagagccttcctgattgatccctatagctgatgggggaggtggagcctagagacatctactgccttgctctccaagggtgttggtcaccttgaactctctgtaccttacagaactggagaacccagctgacagggtgcacccaatccagcagatcctcatcaccctgccccgcgtggtcattgtggtcatgagatacctctttgctttcctcaatcagtgagtacctggcctggggagccctctgccactggcctcctctgggccaaggctcttatgaatgctattttataaatcagaatatagaaacttctgcatttgggttgtgtccccacttccctctcccccgccccccgcaaaaaaaggaaggaaactctgggggaggctttgccttgtgggtgaacagtgagtatctgttctctcctagcctttcccagtacagtgatgagaacatgatggatccctacaacttggccatctgcttcgggcccaccctcatgcacatccccgatgggcaggaccctgtatcctgccaggcgcatgtcaatgaagtcatcaaaactatcatcatccaccatgaagccattttccccagccctcgggagctagagggacccgtgtacgaaaaatgcatggctggaggggaagagtactggtaaggcatccttccccttaatattcccgttagcatcaccctattgttaaaaacaatcagaagccttccagttttctcattaccctaggggacacgcactatagctagttttccttgtaaattttacagcagtcccatgtgagagacaactacagcagtcaaaattgcgtaagttacaaggagtaaaaacatgccttcagatagcctaagccaatatgcacctgtagtttacctcactaaaacatttagggctatatcttcaggtatggctggattcagaggctcagcagttgtcagcaggacctggccttgcagtcttcatcccttggcttcccttagaggctgtcagaggacagctccagttttgtcacccactctctgggcaactccaacaccaagagagccttccctttctcaggtgttcctgtggagacttcccaagagttatttcagggctctatctgggtccgaggggctcttataatgtggtagctggccaagtaacctttccttctcaggaaacagaggagtgagtgtccccacaccaacctccagccactgacccctcccacccaggggttcattctcccagagtctcatgtctttgcatgccccacctgaggtcactagtcattagtcaggtagcttctatgatgctctgtataaggagaactagtaaggcaccttttcagacccaggtctggcttccttcttcaagctaaccctgaaagagtgaaggtggctatgtgtttaattgtaatgagtgactatgtagacagcaccaatctaccagatgtgtcaggaaactagagcaaagaaaggttttcacactgaaaaatgattgaggggcttcgggtatagcccagtgatggggcatatacttactgtgtagggagtccttaattggatcctcagcaccaaagtaaaacaaaaaaaaaaagattaatgttggggctggagtgatggctcagcagttgagactgtacgctgctcttacagaaagaggagatcaattctcaacacacaagtctgtcagctcatggctgcctatactccagccccaggcgacctgatgccttctgccctccacgggcacctgcatttatacacatatcgtccccaccctccacatacaaataatttttaaaataaaataaatgtttttaaggaaataggttcttttacccctgatttaaacatcccacaatgtgtgcatacattaaatggtcacatgacatctcacaactacatataatccttatgatttttgtacagttaaattttaattaaaaaggaaaattcagtgggggaggagggatgcagagaagagaaaattaagcatgctgcttgagatcagccaaatgttcctgctgtcacatcgtccccagcccaggtcaacacagcctgtatgcttaaatctttctgccaggtgcttgtggtgaacgtagttacttcagtttgctttttttttttttttttttttttttttttgcaaaagagtctcattatttagcacatgctggtcttgaacttgtgatcctcctgcctcagtaagcgctgggatcatagacttgatctgccatgcccagtggagatttgggctttgattaaagtcctcctggatgtttggatgacctctatcgtctatgcttatgcaggcttcaaagttgaacattctcccccaaatagacatgaagggctacgagggtggctggtctcagtggcatctgcttgcagctctctatcctcagactgtacgagactcttgtgcatctagaaagcacaattcctacatgaagagaagctaaacacacagattacacagcttgttagtacacagtactcacgtaccacttttacacttttcttcatttccagtgaggctggagagttagtaattacatggtcatttggaaggcattttccaaaccaaaacgagaggtgaggctgaaggtctcagtacagtaagcaagactcattcactcagcaatgtctccccctccaccatccagaatcctggggcctggatctcctgtggcagggatggtacctgagtatgattagctccagtggaaggagtgttgagagacttctgttccagaaaggggtccctgagccaattaccaagaaaggtttcccaaggaggttagaaaagagccaagccagcagcttaaactggagccaactcacagaggaccgggccaagaaagtcctaggcctggagccctcagtagaatgaaaagtggcttggtttgttgacatggagtatgtgagaggagggtggaggggtttcaggctccacaggtcagctgaaggctgacgtccttgatttggctctaatacacacatatacatgtgcacgcaaatacatacatacactctttcacatgcacatatggacacacacacacacacacacacactcacacgcactgatgtacacactagggaaagccccggcttccagaagcttgcagtctgccactgccatctggatctcactgaacacctaaactacttcgacccacttctggtactgaactagaatacttgcgtctgagtcacctataataaactgatatctatggggctcacggttctgagaactaagaggcatagcacctgtgtcaagggcctcatgatagattgtcctatggtggaaggcagaagggaagaaagtgtgagaacaagcaagatggctcagaggggtcagttggctctcatgataactaaaccactccttgattgacaccaatcagtttctgttaacatagtccttgtggcctcatcacctctgcttaggttatacctctaaacatggtgacattggagatgacatttccaatacatgtgggtgatcacatactcaagcctatgacaatctagtcagttccatagctagggttcactaagggagtgttcaagaaaacccccacctcagcaggtcttcttcctgtgtttgcttacagtgacagcccacacagtgagccggggaccattgatgaagttgaccatgacaatggcacggagcctcacaccagtgacgaaggtgagtagcacagaaggtctaggccaaaaacctcacagggccctgagccagccacaggtccaacctcacagcccctcacctctccaagcagtacagcgtgcccttcagcatggagggagacctaggaaagccttcatacatgcctcaggtcccagcacaggcccacatagatcctggtgggcgctatgcatttactacataccattcctggcccgtgttgtcctctgtgtgtcctgcttgggtcctaagggtctgctctgcaccaggcctttgctgggacctaggatgtggtgacgaatgaggtgaatccttaaggtgttgtgtctctcagaagacatcaacagaccggaagcagcttcttaagaacagactgacaatgtgagattaaagggtcatctccaatgcagggacacctgtgaattacctcaatagtgaggcctgtggagagaaacagaagtgtgtgtggagagagagagaggggaaggggcccatcctgattcctctactcctgccagatgagggacagaatcatgctggtttccatggaaaccggaccacacagaagcacaatctgagtgaagtgggctcaggcctccttacccactagatagtgtgtgcaggggctaggtcagaacttcacaggggcttctcgtgcttacacaagccagccacagggccagtccaagcagcacagctgcccttcaggacctgagagtggtactgaggaatttctgccacctttgtctacctggaaaaacagcagggtgatattctgtctagagatctgttgcccatttcaaatttatcttttcagtattgggttggaacagctctttacatattctaaatataagttccttacctcaaatctgatttctgaatgttttcttccattatgagacttgatttttgctttacaaatggtgtcctttgaagcacaaaagagttttgattttgatgaagtccagttcatccatcctatattttgttgctcatagttttaactatattccagaagacccttgtcttgccttctttcttgcaaggtatcttaattactttaaattactgtagtaagataccatgaccaaggtaatttatagaagaaagagtttatttgtggcttacagtgtcagaaggttagagtccaaagcccaccccctcaagtgacacacctcctccaacaaggccataccaaatctttcccaaacatttccacttactaggaactaaatattcaaacagacaagcccgtagaggcagttctcatccaaaccaccacacagagaaaccagccagtattttaccacaagagagaatattcattgtcaggctaattgttttcttttttgatgagtgtctgtgtgtgaatgcatcttcacgcataggtgtacttgtgtctggcacacacataaaaacatgaagagggttgttgcgggtcttctgtgttcactctttctctgaggcagaatccgtaaacctgggctaacatattttcacctggactggaagccagcaagcctcagtgacacctctgtctccatccctcccggagctgaggtcacaggtgtgtgccagatgcctgccttgtctcctggatacggggatctgagcttcggacctcatgattgtgcagcaaaagctcttagtggctgagctatctttcccagccggcagtaaggttttcagaggtgcatctgtcaagtcaagaaagctgccttctgttcccgttttgtgggatgttttgttaggagaaggtgttaggttttgccaaatgcttttctttatccattgcaatgattatgtcatccatgctttttatttatgggtgagatgggatacattctttgtctttttagatgctaaacaattttacattcctgggataaattctcttcaggcatggagcatgacccctttaacaaacccctgcaaccggtttgctaatattttgtagagaaatttctcatctatattcattgtgctgtcagcctgccgtttcctggtgatgtagtccaggttttgtgttagataatacttgcctcatgaaatgcattgccaagtgtccccccaaccccttgggctttttggaagactctgtgaataattattattgtttaaatgtttggtatagttcaacaatgaagccaactggggctgggcacttctctctcctgctttgatgggtggtgcattctcctggagactcattcgggtttcctgtttcttttcataagatgtatccttggcatgtgtgcatgtccatgtctgatgggctggcacacttgtgacatggcatgcatgaagtcgaatgacatccttctcctttgttttgttgagacagggtttctcttgtttctgttgctgcatgcgataggctagctggcctgggagcttctagaagattctcttgttttccaccccatctcaccgtggcaggagtgtgggaacagagatgtgcaccactgtgtgcagctttttccccccctatgtggtctaatgaatgaggagagaactgaggtcatcttaccagcttgatattctggggttttttaaaaatatttgtttactgggggggggagtgcctttgtcgggacttgtacttgtgaggttggaggaaaacgtgcaagatttggtttttccctttcaccacataagactcggccatcaaactcacattttgagtttggcaacaagccgcctttcctgttgagccatctcattggccccagatatcctaattctcaagaccattttagtagtctgcatttttttaaagaaatatgctcattttattccactttctagtgtgttgatagacagttgttggtaatgtttctttaggatacctcttttcccttcagagtaataacattaacattcctctttcatttctgatcttacacgtgcctagtgtgatttttttcattcttattttcttagtttatttagctagagatttgttaatttcattgatcattttcaaaacagcagcttcgacttcgcctagctccctagtctctgtctcatttaattctactctagttggattccatcttcttctgcctgcttccgcttagtttatacttctaatgtctttttaaaaaaattttttttagatgtttaaatttaattttaacattttgcctgcatgtatgcctatgtaccttgtgcatgcagtgcccttggaggccagaagagggtgctagatcctatggaactagagctgacatgtaggtgctaggaatcaaacccaggtcctctggaggagcagcctgcttttaaccacccagacatctcttcctgttttttaaggtgaaggtgaaggttattgatttaggatttctcttagcacagccatttgcagctctaaatttcaccgaggcagggcattagctgcatccatgagcttgaatgtactctgccctaattttcattcaccatgtggaagtctaagagccattgaaaggctgattgtgaggctcagtgacagagttccttcctagtgtgtgggaggctctgggttccatccccagcatgacaaaggaaaaaaagaaagagagaaggagaagagagtcacagaaagtattgtgggtgaacagagatgggactctagtgctgcgtgcaggcagggtgggggtcttatgtgtaaagtggaccagagagaaaagagagcccatgggaaagtgaagatagagtatatgctggcatgcagaaggaacagagatctcctctctctctctctctctctctctctctctctctcacacacacacacacacacacacacacatacacagagagagagagagagagagagagaggatacagggtctcagactagccttaaattcctgttatcctacctccacctcccaaatgcttggattataggtgtgcattaccacacctggccaaactggcttcagtaattatgcaacagaaaacaaggatctggcctgccagctccctatggacattttagatttgtttgtttatttactttgtgtgtgtgtgtgtgtgtgaaataagttatcattatgtaacccagactggtcacaaactcacagtcttcctaccctgggctctagaatgctgaggttgcaggtctgtgccaccgagcctagtactcagtggacattctgagaaattgcatggcttgcctaagatcaaggagtctgagcctggcgcgcaggggccctgagccccagcccatgtgttcatcaagcctgccgcccgtgattcctcactgaagctaaggctgcatgagtcaccggccacccctaagacctcacagatgctctttctcttgattttcttctagaagtggagcagattgaggccatcgccaagtttgactatgtggggcggtcccctcgtgaactatccttcaaaaaaggggcctcactactcctgtatcaccgtgcctcagaggactggtgggagggccgccacaacggtgtagatggactcatccctcatcagtacatagttgtacaggacatgtgagtgggaactggggccttctgtgaagaatgagggaatagattagtgatgtctggaatgggcagtggaaggggaatatatgtacaggacatgagtgtgataactggggccttctgtgaagaatgagggaatagattagtgatgtctggaatgggcagtggaaggggaatagatgtacaggacatgtgagtgataactggggccttctgtgaagaatgagggaatagattagtgatgtctggaatgggcagtggaaggggaatagatgtacaggacacgtgagtgagaactggggccttctgtgaagaatgagggaatagattagtgatgtctggaatgagcagtagaaggggaatactgggaatttgttcttccggattcaatatgtttgataatctctaagaattttttctaacttcctttaagtggaaatccacagaagaaatatgcatgtttctcatccttccaatgatacagagatagtgttaggtctggggtcaccatccaaatccatgagccacatctaggttatcactcaccatggtcattagcatcccacagtcttctcgtatccctcctgagctttttctgtagccggtgatcagctcgccaaccctaaaggcgcttagtcctttactccagatgtgaccttcaaagggggtggagaaaaagaaatgttcctggtctcctttaaacagatgtcatttgtaatgatttaaggagttaaaaaaagccacacatcctaagaatccagcactgcccagaaagttcaagaaatcaacactttgtttggggttctctcattcctttccagcgtggacaggcttagcagagctggcctgtcctggtagtagctatggagctaagctccacaggaagggaatcctaagcctatattgtgatgcaggagagaaggttctcagcttgtgcaaaggccaagtgaatgagaaaggggatgctgtaatagcaggccgactggcagccctggagtccacagacctctgacagcaagggcaagtcactggaaggagaaggctatagagggaaactggcagggcacccctaaaagcatgggccacctcacaagaatcctgtaccgcagatagggagataagggactgaagtggcccttccttgcttgcttggctctgaaccaccttgtatggagccataggaaactcagcatacagcaccctatgctgggagactcagcactcagtatcccacacccagcttgcagactccaacccccatttcttcaacctgtctccatcattgaaagggtctaaaagaacaagctagtaaaagataaagaaacagagatataggggtagactacaagggagccacctgctagcaagcctggctatgcgagcattgtggtgggtgtgtgtggagggaaggtgttcaccctgggctgctggaatagccataggtgtgtgcagacagctgtgaaggagttctgggcatcccggtccttcctcaagagcatgagaaccacctccaactcttgtctctctcctccccagggacgatgccttctccgatagcctgagccaaaaggctgacagcgaggccagcagtgggccactgctggatgacaaggcctcttccaagaatgacctccagtcccccacagagcacatctctgattacggctttgggggggtgatgggccggtaggaaacatgggttcatttttgtttgtttgtttcactagtacccatttgcttgtttgtgtctgaattgggagaagcaagagggcaggaaggggaggagaaggctgttacagcaccttgatcctacaagccacgaccctgggaacagctgggtgggctggctggaaggacccaaagattctcgggtgtgagccacccagctttgagggggaggggaggggcattgaagaaggtggaggaagacatatgctgggctcatagaacttttttattttaaataataatcataggccagcctgaccacatagtcagactgtcttgaaaatttaatatgatagtagtgagagagagacacagagagacagagacacagagagagagacagagcaataagactgtcttgagtactaagagaggcagacgcgcgcgcgcgcgcgcacgcgcgcacacacacacacacacacagagagagagagagagagagagagagagagagagagagagagagagagaagttggcgagtgcttttcttcctttctccagcagctcccggatccttccagctttctgctggaggtgatttgtcatacaacatttttaaagatctaaagctcccacagtcccccatccctgaaacacaccacttaaacagagagctcacacctccttttgtgccagtgaaagttgatacccgactccgcccacctgtttagtgggagcagatttgccagtttcttcacagaggctgggctgcatcacatgacccttctgccagcaaggcgctgtgcaagtcctcctgggaacaggaacaagagagaaagctaacagcctgtcactctgcctcacccccaaccccgggttctcttggaatgtcaagtctgtgtgccccacccccacccctgctgcagaagggtcatgtaatcaacccagtctttccagagattggaagccacctgtgtcagcatacaatgggagcatactcaagaatttattttagttgaggtcctgatggctctttttagagctaagtctattcagtttggctttggacactgcaggatgatagagtccacagagaagtcaaagactggggtccaccgatgagaatggcatggtcccctgctcctaggagggccatatcatctcctgtctctctcccctcttgcctcgctcatctttcttcttttctttctcaaaagcctcttcctccccaacacctatgctttggtcctattgggccacctccaggcttgcttagctttgctggggtcagagggtttgaattgccaccagtctcatggaacttggtccattcccagcatcccattcttccctcccctcatgaagacctctgtatcttaggggacttccataggacagagccatctttaagttatttttaaacccactcagatgtgggcaggtgagagatgatagttcattgatgtagctgattcaccggatggacttgggagaatacaggaaagctgtggcagacatgggtcaaaggcttgtgccctcccttcataagcagctcatacccttttataccagtagagcactggaggtggacaaggtacccatagaccagaagcatagtttaaaatgatgtattcactcttcaacgacttggtttccattggtgggtgacaacagtgaacaggtgttttgttcctagaggtcccctcctgtgcttactgtggccttttggtacagtcaagcctcagtgtttcaaaccagctagaatctgaaaggcttcaaactatatatgaccagagctggccacagcatttccagtttggaatcttcctgccccgatctgaccttagaatctactgaccttagggtctgcagtattgccatggccagcctggctcccactctccacattcctccctgggtcaggttactcctcccctttaggggaggtgtcacaggtctgagcccgccttttattgctaaagtgttcattctggctgaatgaggcttcactgtgctagctcctctagattcctgtgtagctgtagcatgggggttggctggtacattctgagactggcgagggttgacttctgccccatacttcctgcccctggctcctttgcagagtgcgactacggtccgacggagcagccatccccaggcgccgaagtgggggcgacacacacagcccaccccggggcttgggtcccagcatagacacgccaccccgagctgctgcctgccccagcagcccccacaaaatccccctcagccggggacggatcgagagccctgagaagagaaggatggcgactttcgggagcgctggcagtatcaactaccctgacaagaaggcgctgacagaagggctctccatgaggtcgacttgcggttccacgcgacacagcagcctaggggaccacaagtccctggaggctgaggccctggcagaagtaagggccccacagaagacacttaggccagtgagacacccagtgggacagagggtgggaagtgcagagtggggaccacagtggccttggtgggacttgagactgagtcagacaagacaatgagttggcttcctttccatgccactagctatggcccttggaaagactggaagacacccccccccccagtgttcaggctggagagagggtagctgggttatggggctgggacaatggcagccctctccctgagatgctatgattaagtccgtgtatccatgcatgtatctatccatgtatccatgcatgcatccgtcctttgttcatgactctattgatttagtgatgaatcttgactgggcatctgttgggtgacatccatcaccttcgatgaagtacagtggagacctgatgcactttggccctgcccatgtgagcttagagttaaagagaactgccgacacgaaatggctgctaggctaggcatctttaataagtggggggaggggttacatcatattttgagagtctacagtttagaagtaatgcactgggaggagatgaggagatgggcaggactgaatagtagaagcagaatggaagactagctcaggctcttctagagtacttcctgttcgtttttgtttgttttttgtgtttgtttttgttttttgtttgattcccccccacacactggccagatgaacagcacaatgcattgtttaccagttcacgtcactggtcatgtctagtttggatattgcattcccagaagtctccattgttattgccctagctgtaatttggggcagcggtccattacacacctctcttgatgctatctctcacttaagagataacggggcccaagagaccctgcaggttgaggggaaatctcttgtgctaatggcctttgagtaccattcagaaggggttgaggttagcctgtgagcttctgagcacgtccttacaagagtccagggaagatcctcagagaatcccctgactggaagcaatgcaccaccagctagaactccacacgtggcctctacctcatgtactgatgcctacttccagagagtacttggggtcagtaccttggcatgggccatgcaaaggagacagccaagttgaccttctatccttgaaggctaatctcttgagaaccatccccctagcacctagaatcttctaaagactctgccagtcacaatggggcagaggcttcataaagctggcttgaggcgctctacatggccattcaaatgcagtctggggcactgtgtctaacacatcgcagactgctatgagatacctgtggggtattctgcagttagcatcatttatgctgtggtactctaagtagaaatgtgtattgacaagacattttagagctttgcaatagtttgttgagcactgtggatctccagcaagaacagagtgtattccattgccagacttctttagttttatttggggagcacttcgtcagcctagtctaagaaatacactcagcaatcctatgcacattgtcagagtgcacacccactctaactggatagtgcttttcaccggtggaagtgaaactgaagctcatgggaaacggtggaaacagtcaagaagacgctggccagctacctacttgttcaacttcatctctgagtcaaaggggaggtggtatggagaacctcaaatagtagatggattcaccctagattctctggtctccaaatgccctgaacaatgtagaattaaagttctggtaacgaggctgctatggaaatgtgcagcactgtcatctgaagtggggaggaagtgacaaatgagaaccttccccacggtgtccctcagtccccagtgcctctctgcagcttcacctggcagacttatgcattcctcatcagactaatgcaaggctgcagcctaaacccttcagcccacctttcgctgagctttctgtctttcccatttacactctaccggggatggggagatgagaaaatttcatcttagttattgacacttttatctttcagctcccgttacattagagcaaacaaaagggattgtggggacaataggagactaagtcccagaacagtgctagaggctggggtgaccctgcacaatacatagggagaagagtcctgcctgcggagtcacttacaactgagcctctgaataaagaaactcccaaagattccttcttaaaattgccagcacagcatgcaaagagttaatcataaaggggaggcataaaactggttttagtcactagcaggatatagagagcaaatgggatagacttgcacagggaggtgagcaagaggctggttggggaaactttggagtctggcaggaaggaggatgcctgcagatccatggagagcatgaagaacgctggtaggtagaggcctcttcagtatctccaggctccagccccatctgtctccccagagccatgcatttcttccagggctggcctcggactgcttaagaacaagtatcccttagcagtcagcatggctcagattgcacatggcacctgcaagtggaggttttaagacaggtcccttgtgccctcttgtgggttctgggtcagatcagcttggatacggcagcagccccattaaaagccccatgaacaaggacgtgaactctgaggagttggatgaccactgtctggcaattggcagagcttcctcctgtccatcctctcactgcatcttcccagtgagtgtgggcttccaacagatgggtgggctgcagtcccgagtggctggtgtctgcccagtttgctcagcttctagtcagtgctgccttcagccctagccctgccctggattggtagacaaggagctcactgaggtgtgccacagctctgactcctgaggtactctctttttaatgaggctgcagagacaatgacgtgccatctacattttccccacacgagccttttagatcataatactgggaggaaagcggtcttcctgtcactctaggatgcacggtatatgttctgtagagagtcatttccctttgggcaatgattttttattttaaaactggtatacagttatataattcggtagggtggagtatgaattctctcgatacccatatgtgttaaaatgtaagactttgttttttttttttccattttatttcatgtgtgggtgttttgcctgcatggatgtctgtagaccacatttgcacagtgcccacagaggcaggtgaggtacagcaggttgtaagccactgtgtgggtgctgggaattgaacctgggatctttgggaaagtagcctgtttccttaaccactaagccatctttctacctctaagatgaaggactttttttttagcaaaacaaaagaacaataacacaatggctggggcagagaccctggagccagactgcctgggttctgacttgcattgtcttgttatttagctgtgtgaccctgggcaagggacttgactagactgagcttcagtttccttatgtgtgtaatagttgtctctaccttatcgataaattattcaaagctttggataagtgttcagcattaggtatcattgcagcggggactgttattactgtttctgagtgcttgctatgtgccaggtgccatgcaaggtcccgatcattttatatatccatcaaccctcagagggagggattgtaattgtctgcagtttgccagtgagaattctcaggctcagagtggtcaatgcagctccataataaggcggtagtagagtccgttttttgactgaatgttgtctgcctgccataacttgatctgcctttatgaaggtgacttcctattcagggcaggcacagggaatgaatgctcgcgctggttccctgagttggttgcaagacgcccttggggtctgatctccctctgggccatagggcttccagaaaacatcctctggaaagtcttgaactggctagcagttctgaagacactgtgttgaccagagccctctctgccctctaggacatcgagaagaccatgagcaccgctctgcatgagttgcgggaacttgagagacagaacactgtcaagcaggcaccagatgtggtgctggacaccctggagcccctgaagaatccaccaggccccatcagctcagagcccgccagccccctgcacaccattgtcatccgagaccctgatgctgctatgcgccgaagcagcagctcatcgacggagatgatgaccaccttcaagccagccctgtcagctcgcctggctggtgcccagctgcgtccgccccccatgcgtccggtcagacctgtggttcagcaccgatccagcagcagcagcagctcaggtgtgggcagcccggcagtgacacccacggagaagatgttccctaatagctcctcggacaagtctggcaccatgtgacctgcaggactggtgacactgccatggcccactgcagcacaccaaggcctagggtggccttagtggcttccactagcttcccagggatctcctggccttggagggcagatcctggaaggtcagcctgggagggtgtatgtctgtggagagcagaggcccaggcgttagctgcaactcccgctcagccatgtgaatgccacagacctcttgtaggcaaacagacatgccaaggaatgctggagcaagatcagtcccaaggacagtgtttcctaagattgaggcagatgcttaccagcttctcatattgtcactggaaaattattctctcgatattctctacatacgtatatatgtgtatgtatataaatacatgcatatatacgcatatgtgtacgtatgtgtctgtaggtgtgtgtatatatatatatttatgcatctatatacatatactagagagctggacatacacacatgctaactgtatatagacgctccttttttttttctttttatgaaacttagatttacctcagacccatgccaccaaacatctcccactcttacttggtgggatttgcagggacttctctgggagaacttagaggccccacagtaactgcgaacgaagcaatataccactaacctgcagagacacaaaaccagaaacagtctccagctgtctccagaagtcgtggccttccagaacagtctgtctgcccctcaaggaagggtggggcaggcagtacccccaagcaggctgcccctaaaggtggggaacccttcatagaaaacccttcacccacccccctagagaccctgccctgtcacccggaggccaaaggtcaactgtacccccagaaggcacaggggaagttggtgtgaagacccttgagtttgtatactgactcaggatggtgagatgctgtggttgggggtgtgggggagaacaggaggaaacaaacaaaacccaaaacagtagtatggagtagttcaaaccttacacgtgctgtagggacaaatctgtgctgactgtacaagttttacttctctcatcttcaaaatatttaatggttttttttttcctcctcgttctactgattatgctttgtcagatttggaactaaatgggcaaggaggcattcagtcacatcatgtctgtttgagagcagtccacactctgttccccgctggagcctccagtgcccagccatcccttggcctccatcctaggaggactgtgctaggaagcaccgtaggctgggatgctatgaaaacggcagtgctcctcaccctcccttcccctcctcttcttccattccttctaaagcagttaatgtagacaaacatggtggtagaaacaaggtacgtgattctgtagtgtcacagcagcctcctgcatggctcttgtttgattccgttttacctgctttttttgttgtctccattttccagatatttccagaattgttggataatgcaccacaggcgaatcaaatcctagtgggaccatttctactctccctctgcatgccaaaccaaccaaggatatctccttctcatcttcctcctcctcctcctcctcctcctcctcctcctcctcctcttctctctctctctctctctctctctctctctctcacacacacacacacacacacacacacacacacacacacacacacacactggctggttctctgcctacctccaagttttacaatccacaatctggaatctgtgtcacagcccccacaggagccctgtgacccatagctacaccactcctgtcacctacagatgctttgaagtgccatccttggcatttcttccctttgggtttacttccaccatttcttgggtcctccattgaaaggaatcttgaccgcttccccagggagggacctagtgagtcattggtccttgagtgtggggagaatcacccattctgccttgcctgtacgatcagcactgagtacactgtggaatcaagaatgggctccaaatgagaatgccaggaagatgcccgaaccatcaagcctccccttccctctcaactcctgctgtgatgggccctctgttttttgagcacataaagatatctccattttatagttgaagacagtaaggcctgggggtgggaggactgggacctgcacaagatatgccagatggcctagtgggctgcattgggctcaggaagccctcatttccaggaatctgctatctctgctatgcatccgggagataagacttcttttttgtatcccagggctatttccagatttttaagtccactcacctcccaggcaaaaatgcaatattctctgcctggataccagatagaagcaaaattgagtttacaaatctattaccggacacacctattgccagttacgctgtgcagatttgtctctgggttgacttatttcattttccttactgcctctcccccaaatgtcccaagagcagagcctcagctgttttccttaagcatctatctttcccccattggcaagtggctgatgaattcacatttagggaagcacacacacagatggcagatgagtccccagctcttccaacccccaatctgagctttgatgcagaacaaatggaaaagcactgtccacccccatccccaacacacttcttcatctggtccccttgcatgtctcagccacccccaggtcccaactcagccccaactcagtcccatcggtgtctatctagtgtgagcatctcccttctgactcctgcctgtttttagtccactatatattgctgtatttgttaaatgctggaaagtaactgttaaaatgtgaaactgtaattttttaaaatgaaggctacaattacattatagccattgccactcaccaaatctttgcacctagtagatagatcgatgtaaaaacaaataccagaaacctaattgtacagtgattggggtggggggtgtagtaacatagttagtagtcctcaatatagccaagcgtacaaggggaagtggtgtctaccaatgttcatcaccattattgagagctgtactgatcagttagtttataacgggcatttaaaaaattttattttggcttcatggaatgatttcttaacctccaacttaccccgaggtcaagccttttgtctttatgtataactagtgttcagtctgttttaggaatgaaccagcaagatgttcatttaattaaaactgaccaaagacaattaattcctggtctagtttcctgggcaccgtgtggcccagttgccactaaagacctttctccgatcaatttgagaacaagccgagcttccaacccgactcaccctccctgccctccttctctttgtcctcgtcgagctgctctgagctgtgggatcctgtgaacaactgtcgtctttccttctcttcagtgctaacttctcaccttgaagcgccttttgagcccccccggacagagcacacaactggagggaattgtgggcgtgggaattaagacgagggagtcttttctctgaagtcactaaaccagggatcaggagggaaacggattcctaaggaacggaaaggtttatatccaatgaagaaatcaaatcggagcggaaagagacacagggaaatggagccatccgttggctactggctggaaccagcagttcagagatctgccttataaacactttagactggtgtgtggtacgcaaggggagctggtgggagagaagcctgtccagatgttcccttccttggcatctcctagagtgccttgttgggtgcatccctttcttattcaggaggcatggatgcagaggacatatcgtgacttggtacttggtcatcattgagtggccagcgcacatacatttggaacgagtgctggaaaactctccaaggactaacacaacagccctccctctcagcctttctgtttctaacttctcctcttccagatggttccacactagagcaaatgcctcattcttccgaaaaacccagaaaggggtggagtggggtgtcatttctagctgcggtagtgggtcctgtcgtactgggaggaaaaggtgtgacaggggaggaaaaggcagaaaggggtgaaccaaggcattgcttagctgattttctgctgtgcagagctaaggctgacagttcgtgttcacttccctgtggttctctggggtctcttctccactgagatgaattccaagtggagaattccacatactccaagctacccatgggaactgccagaagggacttcactgtcagtccgagacctcctgacctcttaaagttgatctgccagcatactgttgtcccatcctttgggactggccaaatggctattgcagtcctttgctgacaactcctttctgtgcaaactgtcccaggcaaatcacaaagctgttccttgaagtggaaccaccagattgcactttccttccctgatggatgtgggtcgaggctagctctgctgcccaggccctcgttccaggcagtgtgactgtttacatggtttggcaataggtttgcttctgattgcttcagagtggctggtctgttttgtttgctttgctttctttcttcccccaaattatgacaggaaaaacaaactgaaaccaccctaggaaattgctggttgcctgtccccatgtgatgctaactgttgccctcttctgggtatcatttctctaccttatgaccaaaatgcccgtcctatagagtgtctgattggatcctctgttgcgtattctgatggtgc

SEQ ID NO: 1837 - DNA, 8063 bp, Mus musculus
aagatgtcatctcaaactaagttcaagaaagacaaagagatcattgctgaatatgaagcccaaataaaagagatccgcacgcagctggtggagcagttcaaatgcctggagcagcagtccgagtcgcggctgcagctgctgcaagacttgcaggagttcttccgcaggaaagctgagattgagctggagtattcccgaagcctggagaagctggctgagcgcttctcctccaagattcgcagctcccgggagcaccagttcaagaaggatcaatacctcctctcgcccgtgaactgttggtatctggtactgcatcagactcggcgggagagccgagaccatgccaccctcaacgacatcttcatgaacaatgtcatcgtccgcctctcccagatcagtgaagatgtcatcagactcttcaaaaagagcaaagagattggcctgcagatgcatgaggagctgctgaaggtcaccaacgagctctacacagtcatgaaaacctaccacatgtaccatgcagagagcatcagtgcagaaagcaagctgaaggaggctgagaagcaggaggagaaacagtttaacaagtcaggagagctaagcatgaacctgctccggcacgaggacagaccccagcgccgcagctccgtgaagaagattgagaagatgaaggagaagaggcaggccaagtattctgagaacaagctcaagtgcacgaaggcccggaatgattacctgctgaatctggcagccaccaacgcagctatcagcaaatactacatccacgatgtctctgatctcatcgattgctgtgatttgggctttcacgccagcctggcccgcacttttcggacctacctctcagcagaatataacctggagacctctcgccatgagggtctggacgtcatagagaatgcagtggacaacctggactcccggagtgacaagcacacagtcatggatatgtgcagccaggtcttttgccctccactcaagtttgagttccagccccacatgggggatgaggtctgccaggtcagtgcacagcagcctgtccagacagagctgctcatgcggtaccaccagctgcagtccaggctggccactctcaagattgagaatgaagaggttcggaaaaccctggatgccaccatgcagaccttacaggacatgctgaccgtggaagacttcgatgtctctgacgccttccaacacagccgatctacagagtccataaagtcagctgcttctgagacctacatgagcaaaatcaacatcgccaaaaggagagccaaccagcaggaaacagaaatgttttattttacaaaatttaaagaatatgtgaatggcagtaacctcatcaccaagctgcaagccaagcatgacttactcaagcagaccctgggtgaaggggagagagcagagtgcggcacgaccaggcccccctgtcttccccctaaaccacagaaaatgaggagacctaggcctctttcagtgtatagccataaactctttaacggcagtatggaagcgttcattaaggattcaggacaagctataccacttgtagttgagagctgtattcgattcatcaatttatatggactccagcagcaggggatcttcagagttccagggtctcaggttgaagtcaatgacatcaagaattcctttgagagaggtgaagaccccctcgtggatgaccaaaatgagcgagatatcaattcagttgctggtgttttaaaactgtatttccgaggactggaaaacccactctttcctaaggaaaggtttcaagatttgatatctactattaaactggagaacccagctgacagggtgcacccaatccagcagatcctcatcaccctgccccgcgtggtcattgtggtcatgagatacctctttgctttcctcaatcacctttcccagtacagtgatgagaacatgatggatccctacaacttggccatctgcttcgggcccaccctcatgcacatccccgatgggcaggaccctgtatcctgccaggcgcatgtcaatgaagtcatcaaaactatcatcatccaccatgaagccattttccccagccctcgggagctagagggacccgtgtacgaaaaatgcatggctggaggggaagagtactgtgacagcccacacagtgagccggggaccattgatgaagttgaccatgacaatggcacggagcctcacaccagtgacgaagaagtggagcagattgaggccatcgccaagtttgactatgtggggcggtcccctcgtgaactatccttcaaaaaaggggcctcactactcctgtatcaccgtgcctcagaggactggtgggagggccgccacaacggtgtagatggactcatccctcatcagtacatagttgtacaggacatggacgatgccttctccgatagcctgagccaaaaggctgacagcgaggccagcagtgggccactgctggatgacaaggcctcttccaagaatgacctccagtcccccacagagcacatctctgattacggctttgggggggtgatgggccgagtgcgactacggtccgacggagcagccatccccaggcgccgaagtgggggcgacacacacagcccaccccggggcttgggtcccagcatagacacgccaccccgagctgctgcctgccccagcagcccccacaaaatccccctcagccggggacggatcgagagccctgagaagagaaggatggcgactttcgggagcgctggcagtatcaactaccctgacaagaaggcgctgacagaagggctctccatgaggtcgacttgcggttccacgcgacacagcagcctaggggaccacaagtccctggaggctgaggccctggcagaagacatcgagaagaccatgagcaccgctctgcatgagttgcgggaacttgagagacagaacactgtcaagcaggcaccagatgtggtgctggacaccctggagcccctgaagaatccaccaggccccatcagctcagagcccgccagccccctgcacaccattgtcatccgagaccctgatgctgctatgcgccgaagcagcagctcatcgacggagatgatgaccaccttcaagccagccctgtcagctcgcctggctggtgcccagctgcgtccgccccccatgcgtccggtcagacctgtggttcagcaccgatccagcagcagcagcagctcaggtgtgggcagcccggcagtgacacccacggagaagatgttccctaatagctcctcggacaagtctggcaccatgtgacctgcaggactggtgacactgccatggcccactgcagcacaccaaggcctagggtggccttagtggcttccactagcttcccagggatctcctggccttggagggcagatcctggaaggtcagcctgggagggtgtatgtctgtggagagcagaggcccaggcgttagctgcaactcccgctcagccatgtgaatgccacagacctcttgtaggcaaacagacatgccaaggaatgctggagcaagatcagtcccaaggacagtgtttcctaagattgaggcagatgcttaccagcttctcatattgtcactggaaaattattctctcgatattctctacatacgtatatatgtgtatgtatataaatacatgcatatatacgcatatgtgtacgtatgtgtctgtaggtgtgtgtatatatatatatttatgcatctatatacatatactagagagctggacatacacacatgctaactgtatatagacgctccttttttttttctttttatgaaacttagatttacctcagacccatgccaccaaacatctcccactcttacttggtgggatttgcagggacttctctgggagaacttagaggccccacagtaactgcgaacgaagcaatataccactaacctgcagagacacaaaaccagaaacagtctccagctgtctccagaagtcgtggccttccagaacagtctgtctgcccctcaaggaagggtggggcaggcagtacccccaagcaggctgcccctaaaggtggggaacccttcatagaaaacccttcacccacccccctagagaccctgccctgtcacccggaggccaaaggtcaactgtacccccagaaggcacaggggaagttggtgtgaagacccttgagtttgtatactgactcaggatggtgagatgctgtggttgggggtgtgggggagaacaggaggaaacaaacaaaacccaaaacagtagtatggagtagttcaaaccttacacgtgctgtagggacaaatctgtgctgactgtacaagttttacttctctcatcttcaaaatatttaatggttttttttttcctcctcgttctactgattatgctttgtcagatttggaactaaatgggcaaggaggcattcagtcacatcatgtctgtttgagagcagtccacactctgttccccgctggagcctccagtgcccagccatcccttggcctccatcctaggaggactgtgctaggaagcaccgtaggctgggatgctatgaaaacggcagtgctcctcaccctcccttcccctcctcttcttccattccttctaaagcagttaatgtagacaaacatggtggtagaaacaaggtacgtgattctgtagtgtcacagcagcctcctgcatggctcttgtttgattccgttttacctgctttttttgttgtctccattttccagatatttccagaattgttggataatgcaccacaggcgaatcaaatcctagtgggaccatttctactctccctctgcatgccaaaccaaccaaggatatctccttctcatcttcctcctcctcctcctcctcctcctcctcctcctcctcctcttctctctctctctctctctctctctctctctctcacacacacacacacacacacacacacacacacacacacacacacacactggctggttctctgcctacctccaagttttacaatccacaatctggaatctgtgtcacagcccccacaggagccctgtgacccatagctacaccactcctgtcacctacagatgctttgaagtgccatccttggcatttcttccctttgggtttacttccaccatttcttgggtcctccattgaaaggaatcttgaccgcttccccagggagggacctagtgagtcattggtccttgagtgtggggagaatcacccattctgccttgcctgtacgatcagcactgagtacactgtggaatcaagaatgggctccaaatgagaatgccaggaagatgcccgaaccatcaagcctccccttccctctcaactcctgctgtgatgggccctctgttttttgagcacataaagatatctccattttatagttgaagacagtaaggcctgggggtgggaggactgggacctgcacaagatatgccagatggcctagtgggctgcattgggctcaggaagccctcatttccaggaatctgctatctctgctatgcatccgggagataagacttcttttttgtatcccagggctatttccagatttttaagtccactcacctcccaggcaaaaatgcaatattctctgcctggataccagatagaagcaaaattgagtttacaaatctattaccggacacacctattgccagttacgctgtgcagatttgtctctgggttgacttatttcattttccttactgcctctcccccaaatgtcccaagagcagagcctcagctgttttccttaagcatctatctttcccccattggcaagtggctgatgaattcacatttagggaagcacacacacagatggcagatgagtccccagctcttccaacccccaatctgagctttgatgcagaacaaatggaaaagcactgtccacccccatccccaacacacttcttcatctggtccccttgcatgtctcagccacccccaggtcccaactcagccccaactcagtcccatcggtgtctatctagtgtgagcatctcccttctgactcctgcctgtttttagtccactatatattgctgtatttgttaaatgctggaaagtaactgttaaaatgtgaaactgtaattttttaaaatgaaggctacaattacattatagccattgccactcaccaaatctttgcacctagtagatagatcgatgtaaaaacaaataccagaaacctaattgtacagtgattggggtggggggtgtagtaacatagttagtagtcctcaatatagccaagcgtacaaggggaagtggtgtctaccaatgttcatcaccattattgagagctgtactgatcagttagtttataacgggcatttaaaaaattttattttggcttcatggaatgatttcttaacctccaacttaccccgaggtcaagccttttgtctttatgtataactagtgttcagtctgttttaggaatgaaccagcaagatgttcatttaattaaaactgaccaaagacaattaattcctggtctagtttcctgggcaccgtgtggcccagttgccactaaagacctttctccgatcaatttgagaacaagccgagcttccaacccgactcaccctccctgccctccttctctttgtcctcgtcgagctgctctgagctgtgggatcctgtgaacaactgtcgtctttccttctcttcagtgctaacttctcaccttgaagcgccttttgagcccccccggacagagcacacaactggagggaattgtgggcgtgggaattaagacgagggagtcttttctctgaagtcactaaaccagggatcaggagggaaacggattcctaaggaacggaaaggtttatatccaatgaagaaatcaaatcggagcggaaagagacacagggaaatggagccatccgttggctactggctggaaccagcagttcagagatctgccttataaacactttagactggtgtgtggtacgcaaggggagctggtgggagagaagcctgtccagatgttcccttccttggcatctcctagagtgccttgttgggtgcatccctttcttattcaggaggcatggatgcagaggacatatcgtgacttggtacttggtcatcattgagtggccagcgcacatacatttggaacgagtgctggaaaactctccaaggactaacacaacagccctccctctcagcctttctgtttctaacttctcctcttccagatggttccacactagagcaaatgcctcattcttccgaaaaacccagaaaggggtggagtggggtgtcatttctagctgcggtagtgggtcctgtcgtactgggaggaaaaggtgtgacaggggaggaaaaggcagaaaggggtgaaccaaggcattgcttagctgattttctgctgtgcagagctaaggctgacagttcgtgttcacttccctgtggttctctggggtctcttctccactgagatgaattccaagtggagaattccacatactccaagctacccatgggaactgccagaagggacttcactgtcagtccgagacctcctgacctcttaaagttgatctgccagcatactgttgtcccatcctttgggactggccaaatggctattgcagtcctttgctgacaactcctttctgtgcaaactgtcccaggcaaatcacaaagctgttccttgaagtggaaccaccagattgcactttccttccctgatggatgtgggtcgaggctagctctgctgcccaggccctcgttccaggcagtgtgactgtttacatggtttggcaataggtttgcttctgattgcttcagagtggctggtctgttttgtttgctttgctttctttcttcccccaaattatgacaggaaaaacaaactgaaaccaccctaggaaattgctggttgcctgtccccatgtgatgctaactgttgccctcttctgggtatcatttctctaccttatgaccaaaatgcccgtcctatagagtgtctgattggatcctctgttgcgtattctgatggtgc

SEQ ID NO: 1838 - protein, 971 aa, Mus musculus
MNNVIVRLSQISEDVIRLFKKSKEIGLQMHEELLKVTNELYTVMKTYHMYHAESISAESKLKEAEKQEEKQFNKSGELSMNLLRHEDRPQRRSSVKKIEKMKEKRQAKYSENKLKCTKARNDYLLNLAATNAAISKYYIHDVSDLIDCCDLGFHASLARTFRTYLSAEYNLETSRHEGLDVIENAVDNLDSRSDKHTVMDMCSQVFCPPLKFEFQPHMGDEVCQVSAQQPVQTELLMRYHQLQSRLATLKIENEEVRKTLDATMQTLQDMLTVEDFDVSDAFQHSRSTESIKSAASETYMSKINIAKRRANQQETEMFYFTKFKEYVNGSNLITKLQAKHDLLKQTLGEGERAECGTWPCLPPKPQKMRRPRPLSVYSHKLFNGSMEAFIKDSGQAIPLVVESCIRFINLYGLQQQGIFRVPGSQVEVNDIKNSFERGEDPLVDDQNERDINSVAGVLKLYFRGLENPLFPKERFQDLISTIKLENPADRVHPIQQILITLPRVVIVVMRYLFAFLNHLSQYSDENMMDPYNLAICFGPTLMHIPDGQDPVSCQAHVNEVIKTIIIHHEAIFPSPRELEGPVYEKCMAGGEEYCDSPHSEPGTIDEVDHDNGTEPHTSDEEVEQIEAIAKFDYVGRSPRELSFKKGASLLLYHRASEDWWEGRHNGVDGLIPHQYIVVQDMDDAFSDSLSQKADSEASSGPLLDDKASSKNDLQSPTEHDYGFGGVMGRVRLRSDGAAIPRRRSGGDTHSPPRGLGPSIDTPPRAAACPSSPHKIPLSRGRIESPEKRRMATFGSAGSINYPDKKALTEGLSMRSTCGSTRHSSLGDHKSLEAEAEDIEKTMSTALHELRELERQNTVKQAPDVVLDTLEPLKNPPGPISSEPDLHTIVIRDPDAAMRRSSSSSTEMMTTFKPALSARLAGAQLRPPPMRPVRPVVQHRSSSSSSSGVGSPAVTPTEKMFPNSSSDKSGTM

SEQ ID NO: 1839 - DNA, 159389 bp, Homo sapiens
caggttgcccacctgagcatgtggcagggccaggatttgaaccaccgggcaggtgaacccagagcccgctacattgtgctatgaagctgagatttctctcctcagaggagggcctgaggtcagggtcaggatgcactgggatgcatataatgacagccagactggtgctctgtgtggatggcacaaagatgaccactgagagtggagacaggaggtacaacaggacatgatccttgaaagaggaggcagcaggactgccacagaaagttccctgacctgggcattgggtgatgttagttcctgtctgccctttactctcggtttcagccctggctttgccactttcttggtggtcttgggcaagccatttcccctccctgaatctcaattgcttcatccgtagaagaggagtggcaatactaccagcctcataggatgtcatgataatcagatgtgattgtgcgtagatgtgatgagatgttgttggctgtaacataccaggtggttcatctttatcggctcctaaaaatttacactgggaaggtaccagctgcccctgtggagcagagggggcaagtgctcccttgatcttggttttcaggatgtatgcagactgtgagtggtgcctctccatcccaggaggtgccagaacagttactgtgttttcaggacagggtccaaagattggaattgggtggggtctgggaagctacatttaaaattgctctttgctgtcatactctggcccctcttactaacccaggaaagccatctgcaggcaaggggcagaggcctccaagggtgcaggcaaggggcagaggcctccaagggcaagttgctggcgttcctaatgggtcagacctgttaaccagaggtgcaggatttgcattggctttatctgctttttctcccttttttatgatgaaaaatttcaaacattccaaaagtagagagaatagtataataagccccttcctgatacctagcgctaaactaaactttaatgattaactcaaggccagtcttattttacttaaaaccctaccactccccgtctccaaacctaaggctattttggagcaaatcccagcatgtctgcttctaaatagttcctgctttgtcctaaagttttcatcgtagtataaactggtaaaatttcaggagagggcagtttagcagtcttgatatccttatgtgatgttgctttaagaacttattatatagatgatattcctgcacatgtgcagaatgaagcctgtgtatgattattcattccagcattgttgatgatagtaaaagattataaacaacctaaatgttcagcaaaagagactggctaaaaaaaacttacagtggaattctagtgtgctgtaaaaggaatgaggaagttctttatataatgatttggactgatctccatgatgtattattattacttttttttagatagagtcttgctctgttgcccaggctggagtgcagtggcacaatctcagctcactgcaacctccacctcccagattcaagcaattctcccgcttcagcctaacagttagctgggattacaggtgtgcgccaccatgcccagataagtttttgtattttctagtagagacagggtatcgctgtgttggccaggctggtctcaaactcctgacctcaagtgatccacctgcttcggcctcccaaagtgttgggattacaggcatgagccactgtgcccggcctccaggatgtattattaaaagaaaaagataaggtacagaacactgtgaatgatatgctctaacatgtataaaaacagaggaaataatatatttaacattctatatatgtaaattctatatatagatattctctcttatatatagatatatataatatatcatataatataaataatatgatctatataacatatatgttttatatatatgccattatttctggaatgatgcacacgatcatggtagtttggttgttttgcgagaggggaactaggtggttgatagacagaggtgggagtaaaactttatataccctttctaccttttcagttgtgtatgtaatattaaaaaaaccctatatttcctatttaaaaatgtaattcctttttttcagtaagcctaaaactgctataaaaataaagtctattgatttcaaaaaggatatttacccaaatgagttgaaaacatgtccacacaaaaacctgcatacagatgttcataacagctttattcataattagcaaccaacatgtctttaaataggggaatgaataaacagtctgtcaacattattccgtagcacagaatattatttggtgataaaaaggagctacaaagccacaaaaagacatggaagaaccctacatgcatattgctaggtgaaagaagccactctaaaaagtctatatactttatgattccagctgtataacatgctgggaaaggcaaaactatagagacagtaagaagattagggtttgccaagggttggggtaagtgagagggaagaataaggggcgaaataggtggagcacgaggatttttagggtggcaacactattctgtatgatactgtaatggtggacacatgacattagacgtttgtcaaaacccagagaatgtacaacacaaagggtgagccgtaatgtaagtgacagactttggtgtgtcagtattggctcttcaattgcaataaatgcacgatggaatgcaagatgttaataatcggagaaactgtgcagtggagaggggatatatgggaactctctgtactttctggtcaattttttggtaaacctaaaatggctctaaaaatagcccattaattaaaaaaaaagactgatctgaagaatcttcctactattgctggtgaggttgtggttgtgaggagcagtggggagtatgaggaatcttgctctccatacggtgggtcacacgggctgtttgccataggtggcagcctgggtgcatgcaaagtgatctttagtaagactgttgcttggagagtgagcaggagtgttatggggatgggtaggcaggctgtgcattcttggactttgaatgtcagaggagtttggctttgatcctataagcaatggggaaccatggagaattttatcaggagggtgacacagggagattggtgctttaggagacctggattgaagaattagttcttacggccgggtgcagtggcttatgcctgtaatcccagcactttgggaggccgaggcgggtggattacttgaggtcaggggttcaagaccatcctggccaacatggtgaaaccccgtttctactaaaaatacaaaaatattagctgggcgtggtggtgtgcacctgtagtccccagctacttgggaagctgaggtgggagaatcacttgaactgggaaggcagaggttgcagtgagctgagatcgcaccactgcactccagcctgggtgacagagtgagactccatctcaaaaaaaaaaaaaaaaaaaaaaaagaattagatcttccccttctctgggcctcatgcccctgtctataaaaccaagagactgcaccatgcagtgaggtcatcttcagctttcaggtgttgagttcaaagcctgtccctctttccaacccctttccctccttgccacatcccccttttaatttttctgccactcagctctgtgttatggctggaactgtcccccgggggggaaacgtctgctgaatgaagtctgtgccttgggaacaattctgttttattttattttatttttctctctttgaaatcttcaaggagaaaacccaaatctgtgccagctcgtaggctcctagcagcaacttggatgggaattagaaataatgagatgggtaatcaaatgccctcagggttccagatcagggcaggctgcagaggatgctctgccagggccatttcctgcaagaaggacttgattttgagcccggcaaactgctggagggttccatgcacagcccagcctgggaggctccagctggttgtgtgaactgggggaggttgctctgctctttccaaatcgtctgctgtcatcacgatgtgatttatgagcttttcctctaaaatatgagaatgtcatctcctgataatgctctgtaatgaggaaggctgtggctgcagcttttctaataaataatatctctttagatcaccatcttgctacaaaaagaatgcaagaggttgaatacagagggattaaaagtgtcttttgtgtttgttttgttttaatatggaaaacaaggataattcatggaatgcagaccaagaagttcctgtaggggcctcggtctagcatcatgtcaagggcattatggtaagcttctgagggacctgggtttgattgctggctctgctctgaaccagctgttaggagcacaggctagcgacttcctcctgagctgctacttccttgtctatggggaaaaagtggagaaacactagtagcactcactgcatagttatatttttatgactgtgtgttgatatgacaaggtttggtcttgtgggagtgaggcacctcaatacagttcagttcaacaggtagaccatctaagaggggacctgtgtagtttgttagagttcagagaacgacgtgtgaccttggatgagtccctgatcttggtttacgtaaagccttggtttcttcattattatacatccacgttgaatgtatgtatgtgtggggggtgagtggtgttgtgtgtggtatgtgttgtgtgttttgtatgtatttgtggcgtgaatgtgtgtgccatatgtttgtttgtgtgtgtgtgagctgaggcttccataatcacaacacttaatgtacttggtaaaaagcgcttgctaaagggaaatagtaggctgggcgtggtggctcatgcttgtaatcccagcactttgggaggccgaggtgggcagatcacctgaggtcgggagttcgacaccagcctggctaacatggtaaaaccctgtctctactaaaaatacaaaaattattcaggtgtggtggccggtgcctataatcccagctacttgggaggctgaagaaggacaatcccttgaacctgggagatggaggttgcagtgagttgagatggcgccactgcactccagcctgggcgacagagcaagactctgtctcaaaaaaaaaaaagggaaatagtaatttgctatacagatattgatatcctgatgacctattatgtgctgggagaatctgccctcagagcttaaatttcatttgaggagatgaggcagagatggcatgcatgaaagaatgaaaactaacaaacaaaaaaacccaaacagcgctaggcaatctgagatttgctgtacgtgccatgggagttcaaaagagggtcaccaggctggcagcccaggccttcctgggaggagcagtgctttatgtgggctctgaagcagtggttttcaactttttttttttttttttttgcttacctaccctctacatgaactttggaaagaaaaatatctcttctgcttcacacattttaagttgacatctaaaatgtctcattctttaatttgcactaaataaaataaaatattttattctaagtttgattagttacaaaggatataattttggccatgttttaaatattcacattttagagtaacattatgtataataccactctcttaaaactgtatcaaaatgttgtggggagggatgggtggggtggcttacctctttagtcccagctacttagaaggccaaggcaggaggattgcttgagcccaagagttgaagaccagcctgggtaacataaagaggcctgtctctacaaaaaatttttaaaaatgtgtcaaatagaaactaacatagcaattttaaattttgtctttttattgaagcctcactttgatgtagtagaatgcacagatcttaagtgagcagctcagttaatttttatcagtgtcccttccaccctcaccaaggtgtggaacatctccagtattcagaagccatgcttgttccctctctccatcaatacccgtcaaacgtgaccacttttccgacctctatcaccataaactagttttgcacaacctcattcgttctggcttctttcaataaacacaagatctgtggatttcaaacatgttgctgttgggagcagtagcattcctttttcattattgtatatcattccactcaatgaatatctcacattcaaaaaatccattctattcttactagacattttgggttatttctaatatttggctataaagatactaaaagtattcttgtatatattttttggtgatcataagcactgatttcttttgtgtatgtatccatcagtgaaattgcccggtcataggataaataccataatacattggtttctacaatcatccatcaaagttacctgaacaagtcaaatgttttacactgctcctttctttaccttcttgaactcctaattccctttcacttgcttcataaaatttaatcttaacatattttatgcttgaaagttttttaagattatcatcttttttaaaactctacttatgtaagctgaaatggacattttaattttttcctttgaactctaaggatcttccttttatattgatttatgtatcattgcagtgatcagtaatacacaatttatcaaaataacattattttacacatttgataaatcattaaagcataactttgtatgggaaatgcttctcataatgagatgggcgggatggttgatggcagtgcttatcaaactttaaggtgtacaagggccaccttgggagatcttgataaaatgcagattctgatttggatggtatgggctggggcctgagactttattctgaattttttttttttagcttttttaaggtataattgaaatgccccaaaaatgagcacatttaatttatgcatcttgatgagtttggatgattctgtatttcttctccttcccctcccctcccctcccctcctctctcctcacctgttcttttcttttcttttcttttcattacaggagttccctctaagcatcatggtatggtcatggctcactgaagctttgaactcctgggctaaagcaatcctcccacctcagcctcccaagtagctgggactagaggcatgtgccaccatgcccagctaattactttttaaaatttttactaggccgggtgcagtggctcacacctgtaatcccagcactttgggaggccaaggcgggtggatcacgaggtcaagagatcaagaccatcctggccaacataatgaaacctcgtctctactaaaaatacaaaaaactagctgggtgtggtggtgcgcacctgtcgtcccagctactctagagaccgaggcaggaggatcgcttgaacccaggaggcggaggttgcagtgagtggagatcgggccgctgcactccagcctggcgacagagcgagactccgtctcaaaacacaaaacaaacaataaaattttactaggcatgaggtcttgttatattgcctaggcctctgtatttctaacaagcccattggtggtgctgatgctgctggtctgtggaccacattttaatgtttttgagacagagtcttgctttgtcatataggctggagtgcagtttcacaatcatagctcactgcagcctggacctcctgggctcaagcaatacttctgcctcagcctcctgagtagctgggaacacaagcccatgccaccacacctggctaatttaaaactttttttttttttaagtttttatggagacgaggtctccctatgtttcccaggctggtcttgagcccctggcctcaagtgattctcctgcctcagcctctcaaagtgctgtgatgacagacgtggtctcatggaccacactttgagtagcaagggtttgtgatcccttgattagaggaagatttccaaatatcaactttttaaaaacactttttattatttgaagagaatataactttgtacatgtatttatttacgtataaatttatggagtacaagtgtaattttgttacatgcatagattgtgtggtggtgaagccagggcttcttgggtacccatgacacaaataatgtacattacacccattaagtaatttctcattatccacctccctcccaccccctcacccttctgagtctctgttctctagcattccacactgtacatccaagtgcacacattatttaggtcccacttataactgagaacatgtgtaacatgaacattttacattatttatttatttagttagttagttagttagttagttagttagttagtttttgagacagggtcttgctctgtcgcccaggctggagtgcaatggcgtgcaacctccaccttctgggttcaagtgattctcctgccccagcctccagagtagctgggactccaggcgcctgccactatgcctggctaatttttgtatttttagtagagacggggtttcactgtgtcagccaggatggtctccacctcctgacctcgtgatccacccgcctcggcctcccaaagtgctgggattaaaggcatgagccaccatgcctggccaacatgaacattttaaatggtctatttttccttttgacacccagatgtctcgacattttgggacactgcatcatagattctggacgagtgagcagttgctctttttcctgtaaagagagaacaggaccattgtgaggaggggaggtaggaaaggagaggggccgtgcatctagactgaggcacgttgtcaggcagtgggaatggatgtggaggatctcaggttgattcccttctacctcagcttgcataccctgtggggtgtctttgtgtaccccagagtagttctgccccagtttgaagtccacttctctgaaggatgctgaaatgacgctggccaccatttcagacggggcacacatttaggcaggtgagatctgatattccaaggactggcttgaatggtttggagagtccattggggtaaagtcctgagaaatgaaatttgggactgcttggtggatggtcttgaatgtcatgctgaggagttggacctaatactcaggcagaggggagccgtggggtatttctgagcacgttgctggtgtgagcagagtgctttggaggctgatctgttgagcagctcttgggatggcctggaaagaatctatgcctgggggcagtggcggtgacaaccctacaggcttgaagacaagaatggatgtggttattggcattcagctgtgatttttaactccagcttccagcttttgaattgttgccctggttgcgtagatctggtttgagcaatcagtattttctgaagtgtgatatctgagaggttcatacatggaattcaaggtgatttaaagcaggacacagatgtggccttaaataacactgaaacccacgagggaaaagcatgcccttctcagccctctctcagtcctgactacacatggagaaagtcacactgccgttttcctttggttgataaagagccagcagcttaggcttagagcctttggtaaacaattgtctctagatagaattttacaatacttttgttttcattgaattatttcctacgtcccaggctgcaaggggtcctagtgtttcactttactgtattgatagaaacctttgcattttaagcaagatcatctccgtaagaaaggtgagtcaatttactagatcatgtggaagaaataagaatgcttggggcctgtgaatatggcaaaaatcgtggtggtgacatgcagtgattcaagttttggaaacttttggttagatcaatggcaaaaacgagcaagagagaaatctttgtgccaatgctctgccaagcaaggtctgagctctggctgggctcagagaggctctggatggtgttaggagggagctgcctgaattgcagggcccaggccagcagcagagcgggccccagtgcccccgtccccaccaccagtctcatgctcctacccttgtgtgcccgcagagatccgcacgcagctggtggagcagttcaaatgtctggagcagcaatcagagtcgcgactgcagctgcttcaagacctccaggagtttttccgccggaaagctgagattgagctcgagtactcccgcagcctggagaagctggctgagcgcttctcctccaaaatccgcagctcccgggagcaccagttcaagtaagaagttgggtatgggtgcacagagatgggaggcagcactggggtgggcggacagttggtggcaaagcagaaaggaggccagccagcttcattggaggcagagggtgtgccttcagggccctggctctgcaggttacttacacctccaagcctcagtcttcctcatgtgtaaagggaagctagaaagagttcctctgcagaagtttcctgaagggaataaatgaacaacccaagaagagtgtttgtcacagacaataggtgctcaatcaattgttgctgttattattatgctaccaagcaccggcactgagctagcctccatttgtgccctggtgagacccctacctcccttcaggacatcctgtcccgatccagttgtcctttatttgggtgtcagccagccttcttctgaattttgttagctcagtgaatttcttctccatggaattgatgctcaaacattcctcttccttgctctcctggaggacctcagtgccccggctctttccctgccttatttacttattttcgatgcacaaactgtcatgtgtcctgatttctcatatcccaagctctgagatcatggaggctccatctgcttgggcattgacttggcaggtcctgaatcctccagctacaaaaccttctgtgcttagaactccctggcttcagctcattaaatacaggcaggcaggaagcagcaaatctcacttggactgtgtcaaccatgcagggctccacttggcaggtcccccggccagcactgtctctccttcagccatgcttcctggactctcccttctccttgggtcatctctccagctggtggccctcaacaccaggagatcagcgacttgctttatctcacctgacctgatcctgatcccccttcccctgggtcctgtcctgtttctctctctctctctctctctctgtgtatacacacacatacatatatacacacatacacacacacacacacacacacatatatacatatatatatatatatattttgagacagagtctcactctgtcacccaggttggagtgcagtggcatgatctcagctcactgcaatctccaactcccgggttcaagagattctcctgcctcagcctcctgagtagctgagattccacgtgcaccaccacgcccaactaatctttgtatttttagtagagatggggtttcaccatgttggccaggctggtcttgaactcctgacatcaagtgatccacctgcttcagcctcccaaagtgctgggattacagatgtgagccaccatacccggcctctccatgtatgtgtattgtgtatgtatatatatatatatattttttaattgtgacaaagcacacataatataaaatttaccattttcatcatttttaaatgaacagttcagtggcactaaacacattcacaatgttatgcaaccatcgccaccatccaactccagtgctttttacatcttcctccactgaaattctatccccattaaacactaactccccattccctgccacgccttccagctgccggcaactaccattctactttatgtctttatgaattcgactgctgtagatatgtcatataagtgcaattatacaatatttgtctctttgtgactggctagtttcacttagcataatgcctcaaagttcatccctgtggtagcatgtgtcagaatgttcttcctttttcaggctgaataatatggtgcagatagaccacattttgtttgtttggtcatctgttggtggacacttgggtcgcgtccaccttcctgtccacattttttgcattccactctggccagggagctctctgcctttaaactcctctaaacacttccttgagtctgtgccacagcatttgaacactcacttatgtgccttctcttggcatttggggataagaaattggtgcattacacatttgcaaataccgtgcttctttttctaccctatcttctcccttttttttttttttttttgagacggagtcttgctctgccacccaggctggaatgcagtggtgcgatctcggctcactgcaagctccgcctcccaggttcaagcaattctcctgcctcagcctcccaagtagctgggactacaggtgcccgccacgatgcccagctaattttttgtatttttagtagagacggggtttcaccatgttagccaggatggtctccatctcctgacctcatgatccgcccgcctcggcctcccaaagtgctgggattaaaggtgtgagccaccgcgcccagccacccagtctcttctcttcaaacttctgctgcaggaggaagcctctattaataacattcactcaggcacagtctagaccctttcacacatataatctcatatttttttggagaaaaattgtgttttttcaaacaacaaaggtaaaatgctcattgtatacaatttagaaagtacagaaaagagaaaaatatcattcatagtcccactgctcacaaccactgctcacattttggaatcatttctcccttgtcttttaagaataaaaacaaagataatgtatcgaaccgagcacttactttggtgccaggtgggtattactaccccatcgtaaagatgaggatggtgaagctctgagaaagcagcttgtccaaacatgtctgtgaacccgcaattggaaagagacagaattgaacctttgtctcttctctgcctccttggcctgggataagaaagggcctaggtgcagcttgagagtagccatgacatctggaccctccctggaaccacaggcacagcagacataggctcagaaccccacaactctggctgaatggccactggagccagcaagtcttgggctctccctagctgcagacagggccatgtggtagggctggagcatctctcctgtccgctccttccccttgattaggaatcagctctcttcccattctcagtgtgcacatagggagaggagaaaggcagggattgtggatatgggggggcaccctattcccttgtatcacctataatgagctcggccagcccctcatgggttcattaactgaggccaccagacggaacgggagccccagctggcagcccggccatgcaggctgcctgacgcactatgaaagtctaattagggtgccggcccaggccagtgcagctggagggggccctctgcacgatgctaatgtgatggcagagccgtctccgcttctggaagtggagtctctaggggcaggctggactcaccctttgaccccagggcactgactggcctcgggctgcctattccttggagcccagcacacaggacctgtgttgctctctgctcccttcatctgggctgttccgagaagccttgtctcaccgtcgtaaagattcttggtttaataatgtccatctacctgccaagtagcccctcagtgccttaagggcagagcccaggacttgtcattttattcccattgcagtgggtcaggtgcttggcagagctggggtgcgtgtgcatgggtgggagggaggaaggagggaagaagacaggaaggaaggaagggagaggattgacttggtctatctagtccactttggctgagagatttgcctcagagatggaactgatttgcccaagattttacagtaaattaggagcagaactgggatggggactcagttcccttggctccgagtctattgctcctccttgtgctccatgggccgtgtctccctaaggccccagccattccctccccacctgggcaattgaagaatgtgctgctgcccaggaatacgcactgtgctgtgttcagggctagactcacctgggctgagttccctgtgacacgtgatccaaagaaaggcccacgtgatggttctgaaggtttccctgggacaggttaacatttagagaaaaatatcatcatatttcttttctacaacacatatccaattctaacaaacctctttcaaagcactctgacatccttgctctcttataaacctgatgacaacccagggaagtggagagggaatcagtggttttatgtcaagcaaactgagcaacagaaaagctgagctgcttactttaacgaggacccaatgagctgtcgagcatgaaaacccagggttcttgacttccaactcaggcttctctctccaagaagccatgtgggacttcatttgtttgaaatgtgtgcattgaagacctcatattttcctggactgtgctcagtgccgaagacacaaagataaatgaggtgcgatttctgctgccagatactgagagacaagaacatggcttggggaggcctggtagttggtatggctgaggaggccccaatcccatggctgtgccctttgagccctgcacctgcgtgccatcagcctgcagcactgagatgtcacttctattgaaaagcttccttgattcccacctggtgcctccctctgtgtgcccgtcgtactctgatgtacttatttgcttattccaccaatatttattgagcacctaccatgtgccagaccctgggtttacagtggtgaacaagatagacttggttcctgctgtggtgaaatttaccatgaagaataaaacattaaaaagcagctaaaagaaagaccagctataatccaatgattgctatgatggaaataaatacactatggagtattctgattatctctcccgtataactgcaatgcccccaaagttagtgtaccttgtgatttaatggatcaaagatttggacagggctcagctgggtgatttttctgctgtatgtggcattgatggctcagtgatattcagctagcagagggcctggtctggacagtcccagagagctttactcgcatgcctggttcctccatggggacggctagtaggccgggccctgctgggctgtctccctctccatgtagtgtcagggcctcctgcttcagccgggcatcagacttctgacagtagctcggggcttctagagagcaggacagcagctgcagtcctcttaactgctaggcctggagctggaatagcatcactccccacccagatgctatttgccaaagctgtctcagccctagctcagcttcaggaaaggggaaataaagccctcctatcattggaggagtgtcaaagggttggcagcccacaccaagctaggaccacgatcaggaaggtgtctggaggaagcgtggtttaagctgaggcctgagaaatgagaaggagcaacgtgcagcagtggagggggatggaagccaagtggctggaactggtgagtgtgggagtgggaagaagggagttgcatgatgtgatttatatgtttaaaagaccacctgggttggagggtggagccgaggagcccactcatgggcatgtgggtatagctctccaggcagggacagtgatggcctgggtgggaacagagcagatgagagaagccatcagatgccaggaaacctctcagagaggaatggaggaaaagagaggcaacaaggatgtctcctgtttctgccttgagatgggaaggacttggggaagagggtgaggtaagagctacagccctgtattgtcatcgtctgtttacttgtctgtcctcctttggacaaccactgggctgcaagctccgagatggcagagagggtgactcttgacccggggtccctagcacctctcacagggctggcacctggttgttactgaatgtcattgattaatgaactaatgaatgaaaggcaagtgataattagatttgcatagggaggacagggaaagggggcatgtttgtcttctggctgccttagctcagtgaggccatctgggtgaagtgtcactcgctcatgtgcctgtcacgggtcctgtattgctgaaaggacagagtgtggactgtgccatggtctccctgtttggggaatgggagcagtggcattggcatcacatgaggacctgctagaaatgcaagatctggggtatttcctgagacctgctggatcagaacttcttggggggggggcctggcaatctgcatttaacaagccccctgggggagtctgttggcagttcactttgaagagccagtctgatgtttttctggggaataaatggttttcaactcacttttgggctgtgctggccttccctcctcttcaccagcgtcaaatccataatccactgccctctccaagctaggcctaacctgagtttggcttttcctttggaaggcctggagctgagcccttcctgagcaggactctggtgtagcaggcagcacatatggggcccccaaacctgcctcttggggtaggtggatggtcttgtccaaatgaatttggcagctccatgaacacagatgtttcctgggaatgagactttttcttcctccaggaaaatgtctctaaaacaccaatactttgagatgtttgaatgggagagagagagaggaagaggaggaggagaaggaggatacgaaagactgatttttgtaataattaagcctgttgacttctttctgaaagctatttgaccacaggattccctctccctatttatttatttacatatttacttatttttgagacagagtctcaccctgtcgcccaagctggaatgtagtggtgtgatcacagctcactgcagtctcaaacttctgggctcaagtgatcctcctgcctcagcctcccaagtaaccgggactacaggtacatgccaccacatctgaaatttaaaaaaaaaaatgaattatttttttgtagaggcaggggtcttgctatgttgtccaggctggacttaaacttctggactcaagcaattctcttaccttagccacccaaaacactgcgattataggcagaaccaccgcacctggctctccccatgatatttactagtatttcacaaactagcacttcttgagacctagtttgaaaatctctgttctagacaaatgctggggttaccctctgtagtagtgacactccatgcaagtagtgccctgtgtttggggtgacagagtccccttctattctagctttctcagtttttgatacccctcaccttccaggagctgtacctgatgaaaatgctccatgcagagggttaagtgctggttgctgctagtttaactgctgtgaaaaaaagcagcagggagttctatttaaatatgatttaaacatttgggaaaagccagaatttgggaagtgctgggaggcacttggctagttagggaataatattctatgcagatatcctgtgcaaaggaggtttggagcatctttcagcttcacagagcagttgggagagaggattcctgtgaacaactaacttcatttccaagaaaacacttcttagcggggataaagcatcacaggatttttttcacagatgtagcaattctctaaagagatgctataatttagacttagccttccaggctattcctaaacagagaatcacttttgtagcatataaattgagcatataaatgtgaaaaggagtcagaattaaaatgtttgcttagaatgagatggagatggagaaagccctccagtagggcttgtgtctccattcacagctattactattactgcgattggtatcaagctagtaatggctttctggggtcctactttccagacctgctgttctctcagcaccgtgtgccagctggatctttcctgattgtttggtgcctgtgctgtgcaggtcgtttactcttccaagcaccccacacatccacatcaccgtggaccaagtgctgtactggatgtctgataggcatcatctcattgcaccttcatgggaaatgtggtctgtgaagaaggggctgtctttatctttctaggtgaagacactgagttttcgagaaattaagtaatttgcccagagggacatagctagcacaggtgagtggcagagctaggattccaatctttgtttacctgactccaaaatgcaaaactgcatctagctgctgactttgttccctcatctttctgggctggctttgagcttcttgagaattacccatccatgtcgaccatatcctccttggatgagcatcaggggtttgctgttatcctcctggtcaactcctacacagaggccagcttagggcttgccttcttggtgaagcccctgctgttggttgatcccaagtctacagtcagctgctcctctcgcctcccatgtgagttgtgtggggcttgcatcagattatcaaggagtgatccagttcctatatctggttctctcacttcagtcggccagctgcctgaaggcaagggaccatttctagtctccctctctctggtatataattgatgctttatcaaagttttttcagtgaatggctgaattaaccaagacactaccaaatgctttctttaaatatatttaacaaatagacttattttgtgtggctgcgaaaggagataaatgatgtccgaggatagcattttcagagaagcaaacttcaattcaaccttaaggacgttccagtagccacagctgtccatcagtgaaagggctgcctggggaggtagtgagttctcaatgcacagaggtatacacacaaaggctgggtattttaagggtgtcatttcggtaatatggatgatcaaaatgaaaggggattcttgataacacaggaaccataaatattgaattatcttctcaattctctttcaaggtttctggtagcctggaggagaaagtctcagtttggtcctagtgtattgttaatgtcctccaatctcctttttagcaaatagagaacagacctcaagattgaatatactgtttggtttttgttgaatttagttttttggttaccttctatttataacaaaccatcctgttttttttaaagctgaaactagggaagttctttgtaaataaatttaagttaaaaaaagacatcaacagggagatattaagtgtggtggtgtgcaggaatggcaaaaatcctgaagccagcatcaaatcactctaagtcccattccagtttctcctgcaaagtgagcatctttcatctttaccttctttatcctccacaattttttttttaaatgaggggaaaggattttaacataggaggctcagcctgaagagtggattttgcaatggctgtagctcctttatctctttccaatgtttccatctggctctttcccaggtcccacaccaaattccctggaatcctcagagactctaatcagcaactaccaaagcattaactaggacgtgatttctttatgcatgcatatactttgatatgcatatatacatttctatcatttaatttttatactagaaatgaaaaatagatgtaaaaattagattttcacaaacagtaatatgtacgggtttagttttgatgctattctattaggcaaataggataataataaccttcaaagactatatagcaccttacactttgcaaactccttcctcagcccttagctgcttaaatcctcccaagaaccctggtgagagttgaaggagtcaaggaaggtgttgtcatccccaactgataggcaagggaccaactgataggcaaggcagggtgaaccctaacttcagacccacagctgacccgtgaaagaactgacccagttttgcattttggagtcaggtaaacccagattggaatgctagtctgccacttacctgtgctagccgtgtccatctgggcaaatgacttaatttcttgaaaactcagtgtcttcacctagaaagataaagacagccccttcttcacagaccacatttcccatgaaggtgcaatgagatgatgcctatcagacatccagtagagcacttggttcacggtgatgtggatgtgtggggtgcttagaagattaaatgacctgcacagcacaggcaccaaacaatcaggaagccatggatcggggtcttttcctctgcctagtgctacacatgccacacggtgccacccattctgtgggcagataaaccaaggcaaaggggcttgcaaggaaagagttgaggttgaccaggcattgcctatgaggcagagttttttgctctgataccaagaatccatccagaaagtcaaaggggagctcagaggtgctgctggacaccagacaccaacgtgtaccctcatgctgcagtgtgaggaatgggatcacagaggaagcagtgagcccgtgaatcattctgccctgggatgaagggggagtcacagggacatttgcactgagcattgaagttcacataacagtctgcagaaggagaaagtagtaatggaggagaaaaaccaatagttttagaacacttatcataggctgtttgtctatgtacatcaggccttagatcttcccaacaacttattgaggtgctagtggtaataatggtaatgacaataaaaagtactattatgtgcagggtttgacaccaagagaatagcatgggttgtgtcatttagtcctccaggcaccactatgaggtagtcgtcacttcgtttcacagataaggaaagagaaggtttaactataataactttccaagttcactttgttggtgagggacagaattggcatttgaaccccagcctcttgactcaatagcaccccaactgataagcaaagcctgctttggccaggggactcaatggatggaattagtccccttcaggatgactctgtctccgggctgccaaatagtgccagagctaggccctgaactgcgctctctggctcccagcatggcagcctcacactcctcgggggactcctggtgggtgggggataataaagtaaatatttataaagtaatttataaagaaaaggggtttaatggactcacaatttcgcatggctggggaggcctcaggaaacttacaatcatgatgggaggcacctcttcacagggcagcaggggagagaaagagtgcccagtgaagggggaacccccttataaaaccatcagatcttgtgagaactcattcactatcatgagaacagcatgggggaaccgtcccccatgattcagttatctccacctggtcccacccatgacacgtggggattatactacaattcaagatgagatttgggtggggacacagccaaaccatatcagggtggaactgtgtcccctcaaaattcctatgctgatgtcctaaactccagtacctcaaaatgtgaccttatttggaaacagggtctttatagaagtaatcagataaaaatgaggtcattgggaagggccctaatccgacatgactggtgtgtatctttacaaaaaaaggaactttgggcacagagaccaacacacagggagaatgccttggaaaggtgaaggcaaagattggggtgctgtgtctacaccaaggacaccaaagatctccagcaacctaccaggagccaggagagaggcctgggacagatcctccttcacagtccttggaaggaaccaaccctgccgacaccttgatctcggacttccagcctccaggactgtgagacaacacatacctgttgtctgagccactctatggtcctgtgtgacagcacctacaaaactagtacgcagccccatgcacgtcttgtccttcagggccctggctgtgctacatgttcagtcttgtctgaccctcatccagtccctgtctgccctctggccacactcactttctgtcagttctagatgatgcccgtgcccatgagggcttcatgcttatttctgggaatgctcttctttatcactgtgctgtgttaaaacctacccatccttctagtctgagctcagggggcacttttcacctactcacaaatattttctgagagtgcctgtgtgcccaggttggcctgggcaccagagaagcactgatgagtaggacagacataagctagagaggggacaaagaccagaagcaaaaaggaaaagaacacaacaagcatcaggtgtggagtgctgtaatgacaatgacatagtgtgacatagggtgtgtgggtggccagggaggcatccaggaggagaaatagctcagctcaggtctcagtgatgagaaggaccccagggtcccctgatgctccctcccctccgccttccccaggagagggcagccccctgttaaagactctccaggctccatgtatttctccttcagagcccttcttcccgctgccattttctattgatttttgtgattatctgattgttatctgagacccccactagactgtaagctccacgaagtgggaagtgtggctcattttgcttaccattgcctggcacagaacaggcacacacttactattggctgaattaatgattcatgctacaagcaagtgcaatgaatgctgaatcctgcttggggcagcttaggtagcaggaggttaaatgcacctttctggccacagaactgattgagttagcatttctcggacgcaagcccagtgtgaggcctgagaaggtcctggaacggggcaggaagcccaagcaggagcttgccttcctcccagagggaccctgatcccagggcagtggctttggattcatctggaacatgggactctgcaagcttggaaatgggttttgtttgctaagcggaattttccggccctcagccgagaagctggagaaactggctcactgctaatttcattttcccaactcactagcttggcaaggcctggctcccctagctgcagtctcctggaacctcatatccagatcccctagccaaagaaagaaagctgtgactcaccagaaatgttcattgctattttctggccataaaaaaagaaaatagatacatacatatgcaaaatttctaacgtgatgtcttagttcagcagcttctgcttgctgggtcgacgcttgcatgaaagattggagaagcggaagggtcactctgagtgccttggccgagggcactggccctcattcattctgatgtcttccaaaaatgaggctgcagaagacaaaagtggctgctggcacagagagctggatgtcaggtcaaaggggttccactttccaaaggggcaaacaaccccaggaacagggaaggcagaggctcaagttttctgcagcctggcgtctggctctgcggtctgcggccctcgtgcttcctccctcctgcagtcccattgtgagccagatgggggcaggatggagtgtgtgagaccctgcaggcccctccagcctcactcttcaccctcttcctcctctgccttgcctcccactccagccaggctgttctttacttagttccttaaatgcaccaggctctccgccctgaggcgcctttgcccattctgttccctctgcctagagccttctcccgccagcccacctgcccagcccctttcactagcgccctccaactcttcctttggagcacagcttaatgacctcttccttggggacactttagtgacccacaaatcaggccagcccccttattacaggcactcatggcacaggctcccctctgttccagcacattctgcacttctaactctacccacattcgtgggctcatggtaggtgtctgtctcttcaccagactgtctgctccatgaaggcaggaactgtgtctgttgggctcaaggttgtgtccctggggtctgatctatacaaaatattcaacaaaaatgtatggaatgcatgaactgctgaagaatgactgcagagctctcttctggcatttaagcccagagtgactccatggtgtgagtggccaggctacagggaataggtggcctgcccggagtccacagctagcatggcagacgccggtgaacacccatgcccacgtccaggtggctttctgttctctactgctgtgctgagtcccacctgtgggccttcttctttcagatgtggtagagcctgcctggtaccattgtggccaaggccacacatgctagctttctacagagcagctcttgaccctggctgtggacagttcaccccagccttttagactacaaatgacctgccccacaggagggagccagggctgggagaaggtgggggtgcagacccagcagtttcccatgctgggatggacctagagaatgggccgctgatcggacggcaggcctgggacagcatctcagaggaggccaggctgcacattgccccatcttgccctcttttagggaagcaggaggggaggcgccaccgcggcttggccctgccccagccctccggccacagccttgccatgcttcccggggattgacctcttctgccatgtggccacagcatttgtaaagccttccttgttgttctgtggttttaaatagcatccaactccttgctgctggcttccatgtttgtctctccagcccagatagctccatctggatgccccacagccttttagactcgtcgtgttcgactcgaactcatcatcctccctccccgccccacccttgacctgctcctcttcatctccacagaggctccttctactcccccaggtgcccaaaccaaaaactggagagtcatcctggacatcttttgctctctctcaacttccagccctaactccatcccgtcaatctccctgtccagtcaatttcctacctaagcctttcttgaatccctcagtttctctcccggcccctggctctgtacagcagccagagtgagagtttgaaagtgcagttttaccctttcactccccttctgtaaacccttcaaggtctgcctgctgacctcaggacggagcttgaactctaatgagagttaaaggccctttcccaagtggcccctgcctcagtctccatgttcacctgctgtcctcactctcctaccccaaaacaccatgcttgggccccctccctacctgctcctccctctcctgctcctccctgggcctttgctcatcacatttctcccctttgaaggctcctccctgtgaaactccagtccggcttttagttctcagtctagaaagcgtttcctccaggaagccatgcatgaccaacctcaccaccagatctggggaaggaggctcctctctgctccatagcctccttcccatgactgcactgatgaggctgcctcatcactttctgttccttgtgaatctccttactcaagtggaagacttgcagggcagggtcttgcagccttggttgctcctgcactcgcagcacctagtcctgcccagcacagacacacaaacgcaaggagtgaacgagggctggaaggaatcttcacagcagctgctcacttcaacttgagtctttggctgctttcgggtaacatcctcctccttgccttggctcgctctgcctcctgcaattctgtcttataccgcactgcctcctggcttgcagcttctgataaggacagcgctgtgctctctgcccttcctctcatctcatctctctggctagatgacctagttaatggtccccaaactgtcccagcaattccccatcagttccagatcagttgtctttttccttccctctgaaactcaccttctggctgtggcttccataattttgcacaatttaattccctggtgctgttcacttcttgcctcccaggttcagctaagcccctgaagtaatttaggtaacagctcaattatctcatctctcctttaatctttccatttccatcaccacctaggaagcagtgaaaatgagataagcaatgcattttctgtccaaacctactgctccccttgcagttcttatctcagttcatgtcatcagcatctacccagtcgcctaagatctgagcctcggaatcactgtctgctccttcctcctctttctgctgttttccaggaagtttccaagaggatctgctctcctgttgagaaatctctcaagtccatccttcgctggctacaagaccacacccaggcctcactatttctcttttgaactaagattacctcctgcctggtcctcttaccaaaagccccatatccctgctcatccacccacccacctacccatccatcccttcatcctccaatctgccttccatgatcatgccaaaacacatgttggttatatcctacctctgctgaaataacttccatgactccccactgcccatagcagacattcttatttattttagaaactgggtcttgcctattactcaggctggagtgcagtggcatgatcatagctcactgcagcttccacctcccgggctccagtgatcctcccacctcagtctcccaagtaactaggactacgggtgtgtgccactatgcccagctaatttttaaattttttgtagagacggagtcttgctatgttgcccaggctggtcttgaactcctggactcaagtgatcctcctacctcagcctcccaaagccctgggactcaggcacgagccactgcacccggcctaaagcaggcattcttaaccctggctgcacattagaatcttctagagagtataaaaatatgagtaccacgcgctacccccagagattctgattttgtcttggatgggtcctgggtcttggtgtttttttaaaagctccccagttgattctagtgtacaggacaggttgagaactatgtggtctagaagataaggggtcccacccccttagtctggcagtctcccccaacattgggcctttaatctgtatccccagcctcatgtcctacagtcctccactaacacactcagaattccagctcttctgagctacttcactatatttgtacccactggtccttctacccacaattccatcctctctctgacttctgaccatttggaaaactcctacccatccttcaagacccagcacaaatgcagtcttttttcatgggtctctcttccatagcatctgctacatggcaggcacattgctgggtgctggacgtgatgacacaatagaagtgatccctgctctcaaagagctcacagtagggtgagggggagggatggaaactccttaaggtagaagttctgtaacttgagtatgcatccaaatcaccttgagagtttgttaaaacacagattctgggcccagccctagggcttctgagtacacgtagtctggggctgccctgagaacttgtattttcaagttcctaagtgatgctgctgctgctggttcaggggccacactgagaaccactgccttagcgtgtggtcaacggggtgttctctagggaggtatcatctaagctgaacctacagtaatagaaacaggcattcatgagaagagcagggactgtggtattccaggcagagggaaaagcgtccaggccccagtgggaatagaagaggccgcgtgcctggtacccagaacacactggaggagaacgatgccttctgcagcttctccagcagaactgatgctctgcgtatgtctctgttatagactggaaccaccttcctctctaattctttttttctgatgcagccactcagcagtgagcccctccaaggcagagtgtgcatcacggccacctttgggtgcccagaacccacccaagacctgacacagtagatgctgagggattctagttggggtctaattgtagtgtcctggcttttactctaggctataagccaaggagaaatctggttgtttcacagcagtgttgtaaatgcttcatcatcctcccttttccttagatagttcccatcctttatctaaatctaattatcttctcacaaatttctgctgcctagatagatttttagcacatttggtgagagaaagaaaaattccttgaagtcaaggtagccctgccccacctaccttcccaagccccaggagatagggagaggtggggtggtgggggtggggtggggacagcagttcaggggtccttctgcttggctttggggaggtggatgtggtcatagtgggagtcagcagaattgctgtattagtccattttcacactgctgataaacacatacccaagagtgggaagaaaaagaagtttaattggactcactgtcccacatggctagggaagcctcagaatcatggtgggaggtgaaaggcacttcttatatggtggtggcaagagaaaatgaggaggaagcaaaagcagaaacccctgataagcccatcagatcttatgaaacgtattcactatcacgagaatagcacgggaaagactggcccccaagaccattcccacaacatgtgggaattctgggagatacaattcaagttgagatttgggtggggacaaaaccaaactatatcaattgccttcctcaaaaaacgctaatagtgggaggctgtgttttctaagaacagaaccttggccagctcctggaggtggtccacactcaggacaggggtgggacaaggcaggcctgggggaaccctggagctgccacctcaggtggtggaagggcctctcccctcacatcctgcctttccaacatctctctccacactggaaaggagtcagggagataccctgggtcagagggcaagagctttagcataggtgccctgcgtggcaggaaagggttattggtttggttttgcttttgaattgacctttctcttccttcctggataacagggtgtatccaccctttcctgaggctcacagaggggtctttggcaaatacagatggtccttaatttaactatgggttgacttataattttgagaatttacagtgttgtgaaagtgatacacattcagtataaaccgtatttcaagtacacataaaaccattctgtttttcactttcaggatagcattcaactaattacatgagatattcaacagtttattagaaaataggctttgtgtgcaatgattttgcccatccgtaggctaatgtgttctgagcacgtttaaggtagggtaggctaaactatgatgttccgtagtttgggcttactaaatgcattttcaacttaggatatcttcaacttgtgaggggtttattgggatgtagccctgtagtaagttgaggagcatctgcagagccaagagacagattttctctggtctcattagcatcctgagctttgggaaacaatagtataaggatctgtggttctcagacttgagtgagtatccgaatcccctggagggcttggtaaagcccagattgcaggcccacccccagagtgtgtgactcagcaggtctggagtgggactggagagtctgcatttctaaccagtccccaggtcatgctcttgctgctggtctgggagcacactttaagaacccctgcttcagcatcacacccagctagagagtgctaataacctatcagtcattgcaggacaaagggttatttgtcttgtaggtacttgcattttccttaacccttcctcctgaacacagaatctgagccctcctagcccctttcccaacagctccgtggaggggcaaaggcatgtgtttccaagaggccaagagacagaagccaatccctggggaagaacaaagaagttaagagcccaagaaaattacaggggttgaggcaggcagaatgggggagtggaagtatctactttttgttctttctattgcatagttccagaaatcatacaagtataatatttaaaaaacaattggtttagtatttcttagccccaggggaggtagcttcttcccagaaggtagaggtacctggagcaagcaccacattcagtgctagagtagaaccgcataggcgtcaaagacctgggttctggccccagtgctggtctgtgaccttggaggatcccttcagctgttgtagcctgtttccccaactgtataaggtgtaacaacaagactgaccttgaaggggcaccgtggaggttaaaagagctgaagtgggtgacagcataaaccactgttggatgacagttccaatgtagccaacctgagctttcttggtttccacaggaaggaccagtacctcctctcgcctgtgaactgttggtatctggttctgcatcagacccggcgggagagccgagaccatgccaccctcaatgacatcttcatgaacaatgtcatcgtccgcctctcccagatcagtgaggatgtcatcagactcttcaaaaaggtaggcaagtgggctgctctacgtgtcccaggtctttgccccaagctggcccatggtaacagtataccagccagggtgggatgtggtttggagacaagggaccaggaggggcaggtgcattgaaggatgcaagtggctgagggctggacttgggaccccagcccatttgaaccctggatgtgccttttaaagagtgtgtagtcttagccactttagcaaccactgccacaaaaatgaaaacctttgcatggctaggtaagtagtacatattcattgtagaaaattttaaagaatgacgatgagcacacacacaaaaattaaaatcacctgaaatggcattgtttggagataatcactttgatatcctaggaatttctcgtgtacaaacgcaaatgcattttctgagagtgcttagatttgtatattttctagtgtacacatgcattttttctaaatcagatcataatgcatatatgattttactacctgcttatgtcacctaacaaattacgtaacactctattacattttcccacatcaatagtatatttctataacattttgaatgattacacagtatttcattatatagatgtactctatttaatctcttattgttgagcacttagtttatttctgttattttactcttataaataacactgccgtgagcttctttgtcacattcgctgttactttcttaggatcagtttctgcagtgggaattttagagtcgaaagtatgctcatttttaatgcttttgacagtgtaccttattgccttcagaaaggttttacccatataaacatccagaagctgagtgtggaaggagcactgaggtctctgtatcccacgttccttgcacagtgcctggcatgtacaaggtgctgtgcaaatgtttgtagaactaaactcacttttgtgaatttcagtttccttgtctgtaaaatgggtaagttatttagcctctgtgaaactcatcctctttgtctatcctgcagggttaagatcagctacttcccaggagggtgagcgttaaacaaatggtgtgcggggagagtggcattattgcaaagtggtttgggatgtggcctctgggtccagaattcttaaattcttgggttcataatcctggttccatgatttattagctgtgtatcttcgggcttgttacttcaatgctctgtgcctcagtttcctcatttgtgaaatggtgatggagataaatacccatgggcagatggaaggattaacaggcttgttgttcctgtgtacagcatggagagcatcacttggcacttagtaggtgctcatgaaagctgactattattatgcgaatttaagagactattattaccaaaagaatctagctcatctcttcttgccaggtgccagtttcaggggtttggtgatctgagattgctagaagcacaaagaaggggacaagttgattgaaaatataatcatctctccatggtctgtgtttggattgtccactttgaggattacttctatagcaaaagtgtaatcgcaggctaattttctcctgccacacaatatgcttctggtctccttctggggttgtgtttatgaaatgtgggctaagtttcatattgcataagcaaacacaattaggaaggtaaatacggtgcaaagaaaaaaaaattacacagtgctttgcaaagccaaactgaagtgatccagacgtctgcaagtttggactgttggtcccattcccagcccccgcctgctgctgctgtcacatcttttttccttggtgggagtgactcacagagaaagggtcatcaaggcctttaggaaatgaagggtcttttttcctgagctgagccctgggacaagtgagataaatcttttcagttctcatttaggctgacagcagcctgacttgtgatggaggttaacagggtggaaaataatgaaaaaaatgtctacagctgagctcctggctgccttgttaccaggcctgtgcctgtggaacaaaggaaacaacccagcccacaggggctttggagagaggcgcggacggagcctggctggctgactttgcacagcacggcccctttgtgttgcatcagttacacctaatttcggaatggaggccggcactctttacataataatagttcccgcagacctcaaagcaactatggaggctgctctctggtcagactggggatcctcactcacctcattttacaggtgaggaagtaaagcgttgggaggctgcaaggagaacccagacttggttgctttgggccccttgtcattaccagcaggaggcggagtggctgggcttttggagtttgtctcagaactgcctatcactgcaccctgggcaagtctctctgagtctcagttttgtcatctgggaaatggagctggtaacaatgccaacttcacagggggccgctttaatatgcagaggtgagccaagtgtccagcccaggcctggtatccagtaggtgcttattaaatggtagcttgccagtgatccctaagaatagaaaccactccccatgtctgagctggggtcctagggctctaccaagccacagtctggcagtgaggctgcgggagatgggagcggcttctaggccaggtgtctgtcctgtgcctatcttctggcttgggcctgggcagctgccctgcctgccagcttctcactgatgcgggaggtggtttgacttaataacttaccttttcatgattctccatttccccttttgcagtggagtctgttcttatgactagaggagcacttcaaattccagaagcccctgcacgtggcccttgctttaagtgtgagatgtggatcagccctagcaaaattaaactgaatgagatccaggaggccatcgttagtgatcaggactcttatggtggcagacagcagaaatgcagcttgcccctctttaagagaaaaagggaccttactagttataagcctggcttcgggcatgcggggcttcagaggaacaaaggatgttactagaactctgtctttctgcaactctttcggcaactctgctccagttttctctgtttcccgttttttgtggggaggcgaggggctcttttacagtcagccccacccgctggccgtgtgataaccagagggcccctggcatctccagacctacatcctctctgcttcaagtcccttttcccagaatgggatattttggtctgtgattggtccagcacgggtcacgtgagcacaccgggtgctgcgtctgtggctggggcgctgcagggctctgcctcgccaggccgggacacatacccatccctgaagccagatgcacactcagttccacctgacccatgggactgagaatgggtgaggggtggttccccaagaaaagtaggggtgcctttacaagaagaagggagaaataaaacaggagatggccactggactctcttttccagcccttttatcatcctctacagcagctgtacgcctctgctagatgtccctcaataaagaacgctccttacctctcaggatagctcattccatgtgggaacatccgtgatcaatagaaaattctcccgaatgccgaaatggaatcttgtagtgttttcactcacaggtcctgatcatccctagagggccaaacagatcaaacctgtcacatggaaacctgtcagttgcttgaaggcagaaatcgtgaccatccactggtccttcctgcctatgggcagatgtcccaggttccttccatcgtcctcctggaatttggctttgtgtttctgtccccatatcagtcgccctgcctgggtcatgcttcaggtcttctctgacctacagaagttactattcagaaccagtcggaatactctaggaaggtctgagcagctcagggcagagcagggctgtccagacactttatttctcataagacccgtgatggtgtttgccgctttgatgattgttttaccacatgattgacacagtgaactctcagtcagcaaaaagtcccttgtatttttgtaccaattgttttttaatgcagcctttgacttctgcttttgtgtttcttcatatttacccttctaaaacttcattttgttagattctggtcaaatgggatcggtgtccttatttgagtgatttttcaagcagcaggagggtaactgccaagaggtcctaattcctcctctgtgggaaaaggctgttttgtaacttctccatgtcttcctcctcggtgtcaccttctgtgtgtcaattctttggcctcctgtttgcttcttctctgtcttcttagtgagaggtggaaagtggggcaaagagttgagaataaattcacagtggaagtgcccctggagttgggtgttgacggatgaataagagcctgctgaatggggaaaggaggttgggagttcagggtctggagaaaggtaagagccagtgggtagagtttatggtgatggaggtcgaaggaaaaaactcagaacagaggctgaaaaatggcagtgcacaactgagtttggctctgacgtataatcttcttggcccttactatgttaagaaagattaagttgacatttaaacatttaaagatttctcccaaaatcacgattttgtgtttctcttgcaaaatcagaagctttgactataccagccccacgtggactcacacgtggcatcagctagcggtagctgagtggctgccagccccgtcagcctaggcacgctgtctctgccactccactgaccctgctggcgtattttaccttacttggctccttgattttgcctctctggccctttgtgcatttgagtatttggccttgtctttaaacattacctcactgcggttcttaaaatctagcatgcatcaggatcacctggaggctttattaaatgcagactgctgggccccagccccacagtttccgattcagtaggtttaaggtggggcctgagaacctgcatttctagcatattcccaggtgatactcatgcttctggtctggggaccatacatggagaatgactcctagtccaacctcctcatttcacagatgaggaaactgaggctcatgtttggcaaatgcagagtctggctccaaactcaggttttcacctccagctccaggactaaagccactatcccatgtgctgcaccaggtgggagggtcagtctgcatcccacttgctctcctgctccccgctaaccgtttctgaaactgggtattgaagcccattccatttccagcctcattctgttttcttcagcttccttaacaatagccatccattattctatgctctgatgcctgtggaatttaattacttgccccggccgtgatgtgaatttgatggttggaagctgtggtgttgggaggaagcactaatgaggaaagactctttgcagagaagcgaggccatgtggggggcttgtgtttgaaagcagccattcactgtgtggcaacaaggacttggtcttgagtgagttttctcgttcccgcctcgaagatgtccatcgcattttataaataaatcagggctttttgtgttcaataattgccttgctttgtaaccgagatcaaaagcacccactggccttggattcaaagccaagtttattttttattttttggttgcatgagagagtggagtgagtgtttgcatgctggagggtccagctatgaggcctgcatggggaaggaggagggagagagcagagtgggcaccctgccaagggatgaggcgccttcagccaatctccaccgtctcccagggagatgaagtcgcgaacggtcactctgccagtagagcctgctaagccggtcatcatcaggcactcccaactcatttaataaacatatattagcactagcatgacagtaggtaaacaataattatagataacaaacagtgagcaaacgcctgcagtgtgccaggctctgggctaagcattctatacacatttaactcttcaaacctaagatgaagatgctgccattatcccattttacagatgaggaaactgatgccaagaaaggtgaggttagggtttgaatccagatgtgtccaatcccagagcccatactcagtggtaaaggcaggtgccaaagaagatagagtcaggtgcagtggctcacacctgtgatcccagcactttgggaggttgagggggaggatcgcttgagctcagatgtttgagaccagcctggaaaacagggacaccttgtctctacaaaaggtaaattatccaggcgtggtggcatttgcctgtggtcccagctactcgggaggttgaggcaggaggatcatttgagtccaggaagttgaagctgctgtgagctgtgatcactgcattgcactgggtgacagagtgagaccttgtctcaaaaaaattaattaaaacaaagtgaagtagttagataaacgactcagacacaatgtcctcctctccctcaaggagcttccagtgcagtctgaaagcagagacaggtgtgaagcggtaactcattcagatacagcagagagggatggttatcaccacagaagtttgttcagagggagaacttctaacctgggagggggaggtttgggtaaggttagaggtgggggaagcagcatttgaagcgagcctcaaataattaggatctatcaccagggttccctgggaagccagctctgagactgtatttcggtgcaggggtgtatcagggaggatacttgggattccctcctgcagaaaaaaagggaggaaagtaggagttagcaaaccgagaagtcggactgtggtgcagtcttaaggatgctggggagctgggatggcccttcagagttgtcctgagctacagcgaggaggctgagcctttaaaccctcctgttgggtagtcattggatgtgggctccctctaaaagaggctgtgggcttgagcagatgatgcctgtgcagccaaggcagttccaaagcagctgacatctgagggagtccattggcagcactttcctgcagctgggggaatacgttccccaggcccgaaggggatctgagtggtgcgtcacagcgtccacaacagatgtgcagagatttggggaaggtgggagacggaatccacaccaaagcagaggccagtgggaggaaagtctgggtcctggatcacgaagaggtgggtagtctagtgcagtggccaaggctggggccggactctgatttcatctctgttttgccactttcctgctgtgtgagctccacctaatcccttaaactctctcagttttgtcattttcaaagtggagctaataatagcctccatcaaaaggttgttgtaaggactaaaaaatgatatgaaatgtctacctggtacacaataaacaatctataaataatattatagcgattaggccaggcatggtggctcacatctgtaaccccagagctttgggaggccaaggtggaaggattgcttgaggccaggagcttgagaccagcttgggcagcatagcaataccgcatctctacagaaaaattaaaaattagccaggtgtggtggttcatgcctgtagtccaagctacttgcaaggctgaggctggaggattgcttaagcctgggattttggggctgcagtgcgccaagattgtaccactgtactccagcctggacaatagagagagaccctgtctctaatatatatatatgtgtgtgtatgtgtatatatatatatatatatatatatatatatatatatatacaaaataatgtaaaaaatatataattagctattatatataatatataataatatattatatattagctattattaggatgattatttggactttgagaagaaatttaatgagaatgagattggagatgggatgaaggaagaattttttcagggcatacaggttaaacaaaggatcagaaataagaaaatatgctcaggaaccactcactgattagttctaaatgatggtggtcttgtctcttcttttataacctctaatttctttttcttgccttattgtcttggctaggaccttcatccagtgccgtgtggagggaagtggcacccttgactcttaaaaggcatgcttctgatttttcatcatttaagacaaaaactcttagcaaattaggaataaataggaactccgcctgataaaaggtattatcaaagccaagagcaagtcacacttgctgctgaagagagttcagcaagatggctgcttaaagattaatatacagaagttaataatgcttctgtgtgccagccacatccaattagaaaatgtcattgaaatgcatacattagaaaacgagaataattgaaaattgatgccattgaggctacaaattagctgcatcccagaagttttgataagtgatgctgtcattgtcattcatatataaatatttcataattttcattatgatttctttgactacaaattattcagaattaggtttgggtttttaaaaaaataatttcaaaggtttttttctaaagccttcttatttttagtttctgaatttattggatcataataagaaaattaagacaataaagatttatttttgttttttgtgttttgttttgtttgtttgtttttttgagatgggtttcactctgttgcccaggctggagtgcagtggtgtgatcatagctcactgcagcctcgaactcctgggctcaagaaatcctcttgccttagcctgctgagtagctgggactgcaggagtatgccaccacaccctgcaattttttttttccagtttttgtacagacagggtctcactttgttgcccaggctggttttgaactcctggcctcaagcaatcctcccatctcagcctcccaaagtgctggaattataggcatgagccactgtacctcgcaaggttatacattttttggtatttgttggaggattggccttatcagatatcaaggcttcctctggagtgatagtcagacattactagagcagggctagacaaactgatcaattggacagaagagagcccagaaagagagccctccataaatggaaacttggtaaacgacagtggtgcattacagatcaaagggaaaaggatgactacttagtaaatggggctgattcaactgattgtccttttcttattatttgtaagagctaattttatatatacataaacatatactttcctcatatggaaaaatataaggcctttaccttagtttacagaaatttattctggaaagcttaaggtgctaaaggtaaaaagcaacacttcaagactttggaaagacaatgtagattacatttaatatttaaaaccttggtgtaggaaaaggctgcttaaagaaaacattagaaagcacaaaccataaaagaaaatattgattaatttcatatataaaaataaaaaatcttccatacaacaataaataaatagaaaatatggccaagacaaggagaagatatttggcatacacagaatcaataaaaggttaacacccagaatataaaatcagctcttacaaattaataagaaaaggaaaaacaacccagtagaaacaggtaagtgataaaaattgataagccacagaaagtgaaatttaggccggatatggtctgggattacaggtgcggctcacacctgtaatctcagcacttcgggaggctgaggtgggaggattgcttgaggccaggagttgaagacaagcctgggcaatatagggagaccccaactctacagataataatgttaaaaaaattagccaggtgtggtggtgtgtgcttgtggtctcagctactcaggaggctgaggtgggaggatctcctgagcccaggaggttgaggctgcagtgagctatgattacactactgcactccagcctgggcaaccgagcaagaccctgcctaagaaaaaaaattaaaaagtgaaacttcaatggtcagtgatataagaaaagatgctcacaattactggtaatcaggaaaaggtaaaataaaacaaaatgagatacaatctgactcccagttggtaggtaaaacaatcctaagtgctggcaagaatgtggagcctcaggaccctcatgcgttcccaggaaacatgtaaataagtccagctccttgagagaacaatcaggcagtatctagtaacagtgctggaaggggtatggaccttttgacccaacaattttacttctaaatataacccaaagatattctagcgtatctgctcacacacaaaactgtatgagaatgtttgctgcagtggtgtttctaatagagaaacagagaaataacctaaatgtccatcgctagggaaatggttaaataggttgtgggtagttgcaccatggaatcttatacaatagtgaagaggagctagatctacaagtatcaatgtgaataaagcttgaaaacttaatgttgggtgaaaaaagtaaggtacagtatgatatttttataaaacttggaacacagatgaatagtttatatggttcatatggttagacacctggctgaaataaagctatgcaaatgtagaatgtgtaagaatacacagcagtgtcagaattataattgaggaaagagggaggaaggaaggagaccaagaacatttctagtgtatctataacattttgcttcctaaaaataattttgaagcaaaaataacaaaattttgttatctaatttgagtgatgtgttcctgggtgtttgttattgttcgctctccttttctgcatgttttagatgttggaaaatggaaattaaaggtaaaaataaggaaagtcaggttggagacaggtcaaggaagcctttgggtgtcagagtgagaagctgggatttattttctagacattagagatccattgaaggttcttgaatggggagtgaaatgagcagagacaagttgaaggatgattaatttgatatggtatgtttaatggctttgaaaagagattttggatggacggtgcatgttattatacatatacacttgtatacatattagtggtgaaagataatggggactggatcagggagattgataaaggaatgggaaggaaggaaaggaaagatggatgaatggatgagtgggttgatggatggatggatggatgaatggatggatgagtggatgagtgggttgatgggtatatggatggatgaatgaacggatggatgagtggatgagtgggttgatgggtagatggatggatgaaagaaaggatggatgaatgcatgggtaggttgatggatagatgggtggatggataaatggatgggtgggtgagtatatgagtggatgggcaaatgggtggagaggtggatagatgggtgaatacataggtagagacatttttgaaatgccaatgcaaacctcatttacatcctgtccacaaataattcaagtgaaacagaagatcaggttataaaatgacaaagaggttaaagtgatgtctcaagtcagtgattcagcagtaataagtgatcaataatgttttgaaaccaacaaataagcctaacaacatccatagtcatcctgaagataatgtagagagggagaaagcctctcaaaactgagcagcttcaggttttcatagatactggcttttcaggaagacagccctgtcacttcccatgacatgcatgcaggctctcatcttaccctcaaccatagttcctgatctgtgagtgactcttagagagagagagagagagagaatatgtatataaaacatcgacatcagggacacaatcaagaaagattactcctgagtatgtgaatatgttctgggcccacagagattcagcccaactttccacaccatccccagctacctcgacttggaagccagggtgggacaggattgagtaacagatgacaggagattctgcaaaatggcacggggcactgtatgttatctgacatttatgatgatctaaagcagagccttgtaaatatcaatatgctttctatactaaggcagaagagttttcatgttttagaattatttttagatgtttagggaaagaagaccttaaaggtgcttagagagctaactttcccagtggaggcagcttggttgagaatatcacattcactagctctatggccttgggcaaattactcacccttcctgagcctctgtgttctaatcttcaaaataggttcaacaatagtgcctcgaataaagggctgatcttaggcttacatgaggtattgtctcataaagcagttagcattgtgcttggcacgtgctaagacatcaagaaacaataactattattgttattatccacaatggtatgtattataagcacatagtattagtagtaattgtactaagacttattattaataagtattaccattattaataatatttagtattatccgtagagatccagaaactcctagcctgaccatgtcaggtcacttttcataaccattccgaggtatccttggacttcctcaggcctgttacgtaaagcagttctgaaagtgaagctttcagcataaacagggtcccaaagtaagcctgggagtaattgcagggaaaggaaatgctggccacggtgctagactcactgcctccgtgcatgcctgggctcccgggtgtgcatgagtgaggctcaccactgccaagaacgtccaggtggttccaaggccttcctgcttctttgcagtccaatataccagccctggcaacagtaggaagacctaaggactcgaatctgcattcttgaaaaatgagtagatgacaacatttggagttcagcaacaggaggcataaattagtgtgggaagggaaagagaacagggatgagttcaggagcagggaaaggaagaaaatgggaggcagaggggaagaataacaaggatcaggatagagggtgggcaggaacccggctaaggaggatgtttgaaagcagaggttggcgccgggatggagagccgatagcccggttattggcaaccaaagtcctggctaggaatgggagtgagccgttaactgttggagctgctgtgttcaggggtacgtggaccttccagcacaggctggagaagcctgatcctctgagacatgccttttaagcctttgttttggaaataaaaacacaatcactttgggagatggcccgtgcttacatacatcatgtatttaaatagggaacatctgtgggtctcaagttttgtgatttgatgagaaaacaagccagagtgtggagaagaagtgggtaggatctgtcggcatttaggactgaaagagacaaaggattttgttgttgttgttgttgttgttgagttgtatttgtttcctgttgttgtttttgaatcccagaattaggaaaatcatgaaatgtccctaagagtaacccaacatgagaacatctactcaagcaaagagtgagaaaagagagacagggggctggctgacgcagggtttgatgagacaggagaagagaggcccagcacggataactgagagttaacaaaggccacctgtcttactcctgcattacaattttctaaaagattgtttaggatggtgtcattgggagaaatgaaagggcgtatgtgtgtgtgtatgtgtgtgtgtgtgagaggtcttgttcttaaaactcaacattttaagatggtattttttttttagacatagagaatgacattagctctggaaatgacccgtctttgagttattttgagggagatagacacacgccctttaaaaacagagcttttcaggctgggcatggtggctcatgcctgtaatcccagctctttgggaggttgaggcgggtggatcacctgaggtcaggagttcaagaccagcctggccaacatggtgaaaacctgtctctactaaaaatacaaaaattagctaggtgtggtggtgcatgccagtaatcccagctacttgggaggctgaggcaggagaatcccttgaacccaagagatggaggttgcagtgagctgagattgcaccactgcactccagcctgggtgacaaagcaagacaccatctcacaaaaacaacaacaaaagaaatagagcttttcaaatgtaactcataaagtcttaggacctactgtgaggtttttgagagttttccctaaaaagcatgatgatccctgcattgaaaacaaaatcaaatcatacagagcaagattttcatggcaaaggaaatgatttaattcagagctgtgtatgtcaagaacttcatcagctgatttcatcttgacatgaattaatgttcacttgattttttttttttgtgcaaagaaataagggttatgggtgaccatcctttactcctctctagtttcctactgctctgcacaatgctgagctcatccacaggcatttacagagctccttttgtatgcaggtcttcgtaatcggcattgtgggaaactctttaaagccagggatctggtctttagggtgcgtgtgctctaattgttgggaaattagtccttttgcaggaactctttgaaagctgatgcttggtggagcgttttcagaaggccgtctcattcagtggtcatttcggtatctacagactgacataagcatggattacgttagtattttttcaaataagcaaaaatgaaaatgtatgggatcctgtaaactgatgaagtccagaggtgaatcttgtttaggcaccactagatctagggacggaaaggctctggctgtctgccgtagtgggcctggtactgcaggcagtgcaagactcctgaagacccttttagcaacccccggggagaaatgatctgagagtgtggttatgagaaacgtcccaaagaagattcttcattggcttagcctggaacacgtgtttgtctctgatctgatcactgaaggcaaggagctggagcctggtcagaccctgcccctgcctgatgatcttgtgtggccaggcaaacaggagcctgttccaccaacatctcatcttctgttagtagaaggaggaagggagaagcaagacatgaccatgtctggtttattcctagcagagcaggtgagctaaagaggatgagatctgcttgtaagttggggcaaggcccagagatgcagatttctgcacaggtgataagaaagtgcattggacaggtaggtggtgtctggagggcagggcctcctttgtactttccttgtggtctggactcatctccattacagcattgtgatgactttttttcactgtgtgtctgcatcttgaactaggtcctaaggaagcagattatagtaagttgctatgagtgccaactttggagtcagaccaatcaaaaagatgaatcttggctctgccactttctagctgtgcaaccttggggaagttgctcagccattctgagcctccagccccccccccccccccgcccaccccacttatctgtcaagtgggaatacttatagcagttcctgtaaatatttaaattagataacacatgggagtgactttggatagtattcaacaaatggggccaggcaccgtgactcatacctgtaatcccagcactttgggaggcttgagagcagggaccgtgtctcattcagctttgtgtcgttagtgcctagtttaggctggtatatactgggtagtcaataaacacccgtgtaaatggaatcaaagctagtgaaacatggaccacagagggataagaggccacccctttcctgagagacctcaccagtgtctggtcataaactaaaatacatctgtgggctgtacggaggacatggctgggtggagggagaagctgggcactgtggtcacctggaccagcagtagcacaagcccgtaccgaaggggccaccgtacttgaaacaggggctcggcattgctggatcttctagaattaccagagacgctgaaaatcaggacttgtgcaggaaatttcctgagttttcaacactgggaaagcatccagatgctctgaaagcactgaatggccaaacaaaacatgtctgcaggccagagaagctgccacttggaagccttgttccaaggtactatttctcaattgggcaggagagggggagttttatcccccagggaacacctggcaatgtctggaggtaattttggttgtcacactgggggttgggggtagggaatgctactggcctctcacgggtggaggccagtgatgctcctaaacatcctatacacaggacagagaatgcctggccctaagggagctgaactggctttagctacaggcaaagaggcaaaggaaccaggcagggctggggttccctgcattcatgatggctggctcttgagattggtcagcctcattttactggcttatttgagcgtgaaagacagggctgtgctccgtcaatctggaggagccatagctgccatggctgagccctccttggccccatgtcaccgttttccactgtccacacactccctgtgcatgaaggaagcagcctgccaccctgacccctgcaggcatgaaagtagtgtggaaaatgtgggcagtgagagcgaatacattatcacttaggttcctaagggctgggtatggtgtcgctggagatcacagggtttgggtttcctgttcctggtgaaaagtttggtttgagttcctcattcagtagtttctggaaccatagttgagaatatttcccttcccaatcaaccccagccaaaaatagaaagaacgcctttgagtcttgtgcaattgagtatttgctgagcatttactctgtggccagtccagggcttgatactggggagttggtgagcagagaggcctgggctggttccctctggcggcttacagtcctggggaagagatacaagaacccgatctccagctcctcccattcatcccaccctccattcactggtgtcttcaccttcctgaagcgtagccctggtcatcttaaacttctgctcaacaaccctcagtagttcccagtcctgctctgaaggaagcctgtactctatccgcctctgtgatctgacccaacctctgtctcaggcttatctcctgctcacctgtggccgagcttctctcttcatgaaccagtcttttcaccatccccagtctccgtgcctcctgcctagaaggctgtctccagccattcatgcaagctaagaaggccttggaagtatccccttaatcctcttcatcacttcatctcacatcacaccatcctttactcttgtatggccctttccgcctcctgccttagaattgtgttcttgactctaccccagcaaactgggagattcttaagggaaaagttactaaaaaatttgattttatattcccttctctgggcaacttcctagccttgtccttggcatctcgtgggtgttgattcagcctgtactgctatttccccgggacttcatctgtgcctcatatggtgctaggtgctgccatgtgtgttatctcttttcatgctcacagggactccatgagacccatgacatcatctcacttttacagataaggaaactaagtcttagaggaactgtcacttcattcgttcatagattcattcagcaaacacatatatatacacacacacatataaatatatatacacacatatatacacatatacatataatgtgtattttatatgtatatgtatgttacatatgcatacataatatacgtatatgtatatttactcttgtatggccctttccgcctcctgccttagaattgtgttcttgactctaccccagcaaactgggagattcttaagggaagagttactaaaaaattcaattttatattcccttctctgggcaacttcctagccttgtccataatatacatatgtgtatagtatgtatacatatgtactatacctatatgtatatgtatattatatgtatatgtaatacatatatacatataaaatacatattatatgtatatgtaatacatatatacatataaaatacatattatatgtatatgtgtagatgtgtgtgtatatatgtatacatatataatatacagatacatataatatgtatttcatatatgtatatgtgggtgtatatatgtgtatatttatgtagatatgtgtgtacctatatatatacacacacacatatacacacccacatatatacacacatacgtatatatggtttttttttttttttttttttgaaacagtctcattctgtcacccaggctggaatgcagtggcacaatctcagctccctgcaacccctacctaccaggcttaaatgatcttcccaactcagcctcccttgggactacaggtgtgtgccaccacacttggctaattttttgtatgtttgatagagacagggtttcaccatgttgcccaggctggtctcgaatcctgggctcaggtcatctgcctgcctcagtctctcaaagtgctgggattacaggtgcgagccaccatgcctggccaagcaaacatatttaatgagcacgtactctgtggcagactctgttgcattgcagaaatgcaggaatagggaaataagatattgcagattgggtcccccaggaagcagaccctgggacatctgaatttagcttctaggggaacgatgaaggagtgttctctggatcagccacttgggaaggcaggtgaggcagcagggtaaggtcgagctgtgatgcaggctgccttactagaagtcctagccagcctggtggggagcttttttaaaatttttattttcagttcagaggtacatgtacaggatgtacaggtttgttacataggtaaacgtgtgtcatgggagtttgttataccaattattttatcatctaggtttttagccttgtatccattagttatatttcctgatcctctccctcctcccaccatccatcctccgataggccccagtgtgtgtttttccctgtatgtatcaatgtgttttcattatttagctcccacttataagtaagaatatgtggtatttggttttctgttactgtgttagtttgctaagtataatggcttccagcttcattcatatctgtaaaggacatgatttcattcttttttatggctgcatagtattccatggtatatatgtaccatattttctttttctaatctatcattgatcggtatttgggttgattccaagtctttgctattgtgaatagtgatgcaatgaacatacacatgcatgtgtctttatagtagaacaatttatattcctttgggtatatacccagtaatgggattgctgggtcaaatggtatttttcactttagatctttgaggaattgccacactgtcttccacaatggttgaactaatttacactcccaccaacagtgtagaagcagggagttctgaagatggaatgactcctcagagctgtctgagttgagacaggaagaggctgacctctctgccccacaatgatcagtctttgggcaaggactacactgagaaggaggtgtatacttggtgtcattgtgtcctctgaggccatccctgtagggtgctctcagctgagggctgtctgcctgagcattcattgccagagagaaagtctctttgccctcatggggctgacattgaagcaagggaagcaaatgataaatgaatgaacaaataaacaaacaagatcatttacaagtgcagagaagacataacaaggtgctcattttacagtcaggaaagctaagatgccaataggttgaatgactgaaagccctgcctccaaaccaggtctctgtggcccccaaagtcatcccctctgctgcccaacaggcctgtgctagtcgtgtagagttagcttgactcaaaattcaagctaaggaactggggcttgattctgtagacaatgaggaggctttggaggaataggataagtccatttccaggaaatttcactggcacaggcctgcagaatggactgtaaactcaaagacacaagagctaaggattttggtaagaggtgcctcttaacaaagtgaatctgggtctgtggtgatgatatgcttgctacgggaactggtagtggaaaataggactgaatcccttaggatgcttttggctgcaagtaacagaaaaccccagctgaaagtgacttgatcaataaagctacagaagtggaagttcactgggaggcaggctgtgggtcttcagtccaatcaattgtccagaaggtcattaatcctaagtctgcttcctcttttggttctaagatgcctgctggtagcaactgggctacatgcatttctttcttttttctttttttgccagcactcagtagaaaagctaaaactttccatttgaccacagaagtctttctcttccatccagttaagtcacatactcacctctggactaataacacacaccagaatccaccgtcttgagttgggatggcctccagcttcccttgaagaactctcctggaggaatgaattcctgggcaaattcatggctctcttaggaaataggaagggcaagaatggatattgggaggtgggggaggccagcttgcctgctactcacaacaaataattggaaagtttgcaggcaggacccagtaacagattggattgagaaagacagattaaacaaagtatcaaatagaactcctaggtatccagttgacaagcccaggaagatactatcgcattgaccaaaattgaagggatgggggaacagttcacctttggataatttgagtttgcggggatgaggggacatctagaccatactgttttgcagcagctaaggatacaggtctttgagcttgggctgaaggtctcctgggcaggacagaacccaggagagaggcctgggagatgatgacatggcttctggtcaccaagaagtgggaactggagtcaggagcgtgtgagggagccagctgcagcagggaccaagaagggaaggctggagggaattctgaagacaggactcttcccagcagaactgcctctaggatggggtccctgcccatatgcacagtgacagcacacaaggatgttcacagcatcaatgtttgagataataagatgctggaggcaatgtaaatatccatccctaaggagctggctaaattaattatgatgcctctggtatatggaatcccaagcagctgtgcaaaaaaggggatataaaagttacatgatggaaaaatttctcagagatatcgttaagtgaaaagatgcaaaggtgtgtatgatatgctcccatttgtgttaagagagaacatatgatatgcaaatatatgtttgtttattcatagattatttctggaaagtatcagaagaaattttttgtagcagttgcctctggacaaggaggagccttgggagacttattctttccattttacctgctggctgttagaatttctttaaccatgtgcctttattacctatgtaaaaagatcataaaaataaacacataagaaatagggtcttgggtgtcaaaggtgttggggagtttgaggaccaagaggaggccactggagagtgtcagagaatctggagtcagcagtgatggggaaacatcagggggaggggccacaggggaaactgaggcactgattgttcacttgagagagtcatggagaataggaaatggggatagctaattgggttcatagagcaccagtacagaaatcacaggacactgttgaaggtccccagtgagctctgcacagaaggttctccacaccctctcgaagctggagggaggtgtaaataggtctctggaattgcctccgaggtttctgctgtctgttaaggggtctggcacaagcagagaccaccttcagaggggtgattcttggcaagccaggcccggaagctgagagaaagggctgtggggggtgaggagaaggagcctgagaaggcatcattctgatattaagccttcatgagctaccactggattcagaggcttctcacctctgcaagggtgggaggaaggctgttctttgcccattagcagctggtccagctatgaggctgaaggaactgggaggaagagcaggaggctgcagctgctcagggagccaagatcacggctcccattttcgatacagaaactcaacacgatggtcttggcaaacagggagaatgtcttggtccttttaggtgtctataacaaaataccgtagactgggtgacttataaacaacagaaatgtatttctcacagttctagaggctgggaagtctaagagcaagacactgacagatttgatgtctggtgagagcttgcttcctggttcatagagggcaatctcttgctgtgtcttcacatggtggaaggggcaaggtagctgtcttgggtctctttaagggcattgtattagtctgttcttacattgctgtaaaggaatacctgaggccgggtaatttgtaaagaaaagaggtttaattggctcacagttctgcaggctgtacaggaagcatagcacaggcatctgctcctggtgagatctcaggaagcttccaatcatggtagaaggtgagggtggagcaggcatttcacaaggcaggagtgggagcaacagagagagagtgagaggcgcaggtgccacacacttcagaatacaccaaggggatgtcactgagccgttcacccccatgatgcaaacatctcctgccaggctctgcctccaatgctgagaattacatttcagcatgagatttggcaggaacagaggttcaaaccatatcaggcactaatcccattcctgagggctccacccttatgacctaatcacctcccaaagacgtcacctcctaataccatcacattgggggttaggatttcaaaataggaattttgagggagacacaaacattcagattatagcagagaatatttaccaaaatcataatcacaatcataaataaaataacaaagaattctagactcttcaagctgcatggaacctagagataattttctcattgttttctgaattgtgtccttaaatatcatgaaagccacttcatggaaataggactgtggtcaatgaaactacagactatacctccttcttagaaagtctccatgcaaggaaggacatgaaaggcactgagaagtcctgcattaagaaaacttgtctacctttgttcaattagctttttctcaaatgcatgtagtcttagaagcccctgctccccctttttagcatagcatctagcagtgatcttcagaccatgctttggaaagtattgttttagtttaagctttttatttgataggtgaggtagctgaggctcaaagggggaagtgattctccaaggccacacagccaacagtggaaatgagaagctagatcttttgccttgtgccccagaggcctttctgccaacctgtacttctcctgttcctcattggaagagacatcttgagagtgtggacttgcgactgtgtcaggatccaggcaatggtaagatgagattaggcagaccaggggaccagcactggggagggctgagctgaaatttggagtcaaactaaggttagggcatctgttgtaaccagtccttgaaagctaggaaggcgatgtccaagtgggtgccagctgctgattctcagtcaaggaagacaagccttcaggaaacatcttctggagcagtggtccccaaccttttttgcaccagggaccagttttgtggaagacaatttttccatggaccagggtggggcgatggtttcgggatgattgaagcacattatatttattgtgtatttcatttctgtattattgcattgtaatatataatgaaataattatgcaactcactgtaatgtagaatcagtttgagccctgagccctgagcttgttttcctgcaactacatggtttcatctgggggtgatgggagacagtgacagatcatcctgcattagattttcataaggagcgtgcaacctagatcccccacatgcgcagttcacaccagggttcgaggacgtatgagaatctaatgccaccactgatctgacaggagctcagatggtaatgcccgctcacccaccgctcacctcctgctgtgtggcctggttcttagtgggccatggactgatctgtggcctggaggctggggactcatattctggaggacctgagatttttcctggaggacttgagaattatcatttactctcaagaggaattgggatgccaaatcattgtttctcaaagtgtgttctatggaaccccactctgtagccattcatgaggattgtgcaaggagctcagaccctggtcataccagcttagtacacgtagaattaaagaaaaattctgtggggcttccccacatctttaatatgctactgtcactgtgagtcactgtggtagggaaatgatgtgtagggttctccaactcatatgatcagggaatcccatctgcaaggaacctctctctgtgggtttgtttcatggacatagttgaggaatttatgttgttgtagatcaatgaaatttatgctgatttctgtaccccttctgaccccacccgaaacattcctgacctttcgcttttgaaaagagattggtaaatgtagccagcaaacttctcccccgctgacatttgttcttccacattccagagcaaggagattggcctgcagatgcacgaggagctcctgaaggtgaccaatgagctctacacagtaagttctgcccaggctcactgctgttttgggattgggtctctgtcttcatcaccagagctggagggaagcaaaacagaggtctggaatgaccccaggccttttttgctgcgttttatgctgagtgacagtgggtcatcgtgtcaggatgtaatgactcacagccccagcttctgattctgtacatctggggcagggcctgggcttgtctagtttgtcaaaattcacgagagattcaaacgacctgccgctgtggggcgtgttacctgcaagaacagagggcacaaagtcaaggccgggggagtgtgagtgtgaaggctcctgaaggcagggatgtgagttttggagtgaggcagcacaggctccagcagaggcccctccttaccaactgtaggaccataggcaggtgggcagtttgtctgggtctcagtctgtgcatctgcaaaatggagcacggttccgaggatcacgggaggtcatggggtgagcctgcattgccatctccaaggcatagtttcataacatcacagtgtggtccacggctgactttgttacctgcttggagtcaacatctaactgtgcttgagatgagttttagaatccaagaaggtgagcaaatggggacacaaacacatgaggtgatgatgcaggaactttcagactgtgctttgaggagcctacggcttcctcaagaggaatgtggggaccccatggagagatatggggagtggggtgggtagacccagcaggtagagctccaggcccctcaatcctacccaatcagaacagagaagaatggttatgttttaaatagataggtgccctatatagcatttcatgaaaagtgtgtttgtttgtgtgttggggagaatctgctggtaaaattgtatttgaaaatccctggtatgaggggaaagaacagcagtctgtgagaagccccttctgtttggttttattatctttctgtgtttatatcctgtgtggccagcaggtggtaaattcctcagaggcactgagagcctttgcgggagggcctggacctcaggtcagaaagcctgcctcagatcccaacaagctacggaactctaggcaaggcattttttttcctgggcctcagtctcccaatcagtaaaacggggctgagagttcttagataaaagttgaaacttttaattctgtgattccaaattaagaagcaaaacttgagttgtgggtagtttttagttgagtcattcttagggtaaaggaagaattgctgcttgagaatgcatattgctttgcgtcagctggtcactggggggcagaacagcctgctgggttaaggcacagattttgaagccagagatctgggttcaaatccaggtgttaagtagaaatactagtacctgcttagtgcacgtccctgtgagaattcgaggagatcctgtatgcaatggatgcttagaacatagagaaaaaaagagcattctgtaccagaagttctgagtgtcactatcatcatcatcactatcattggctcctccttgatgggtgtgaggtaggctgttgtacatactcacggtggggggaagggtggtgataaataatgcaagcctggtaaaccgaatgggattgtcgtgctcagaattctgcagcgagtttggctagaccaggtgctccccagtctaggtcctttttatgttcctcaggctccactttgaatgggtcactttcctccacagtgtcaaaacaacttagccccagtgtcctgggacccccccattcattcccacctaggtctcttacttttgctgtgacctccagcggggctcctcttcttggtgccctctatttacaccaaataccttccccctctgctgctttttccctgcaatccctgctgtctatacctacctgttagtgtcatgctcatttttcaaactcagaccaaacctcgccaccttcagaatgttattacctctcggcttcaagttcctatggcagatgtaccaaaatctcttgtatctttattgtctatatcccgtctcccaacatgttggagtataaactccctgggagtcaggtcttggctgagaaacactgcatgaaaggcccaaaggctccatttgaacccagctgtgtggccttgggcaagtcccttcacttgtcagtttcacctgtgacaaacagggatggtcacctttctgtggtttgtagactggacaaggccaggtgatggtcagagatcaggaggacagtggcatctctctgtgtccttcaaggtcccagtgcccagcacagtggcctgaatccagcaggtgctccatgcacacctccctgtgctggctgcagggcaggatggctggacagaaatgccgctggtattggagacacaggccaggcagggtggctgaggccccaacaggacaagccatgccttgccatttccacagcagcctggtgagggtcaccagaagctagtggaggaagaagggtcctagctctctcctttggaagagtgggatcctcatggtgccagcacaccccttgtgaagatcatttgttgactgcacactgagtcttcagtagttactcagaaactcagttaaattcgatcatttgttgcctgcacactgagtctttagtagttactcagaaactcagttaaattcaagcatttggggccacatgctgtgggcccagagctgcagtagggcacagtgggggatcatgaatattcagagtctgtctctgtcagagtcttgtacatccttggtgcttccagggtgctcactgaagcaaaggagggaggagggagggatgaatacatgaaagaaactggtcttactcctaaggagtttggaatctgggcagagagataagagtagtgtgtgaaccactggggcttgtcggagggggagggcgtgggggactgggggagcgatagcattacgagatatacctaatgtaaatgacgagttgatgggtgcagcaaaccaacatggcacatgtatacctacgtaacaaacctgcacgttgtgcatatgtaccctagaatttaaagtataataataataataatataaaaagagtagtgtgtgaactgttgctacaacacaagtcagagcctagtatgtgctggacatgtgggctcacagaggaggtacctctgggcttggctgtgtaactcgcctgtgagctctgtggggctggactttgttccccacagtgtgcccagagcccctggccaaccatgcacacacataggaggagatgggtgtgtattagttgagggagatgcacatgtgtgagagatgggttgagaggaggagggagggagggagggagaacaagaaggaaaaagattcagaaaagtgggctactgtgttccagggtgagctttgagcttggtgcctttggatgggtaggaattaaagaagcagagggaatgagaggaagagagaaggagttctcaacagggaaggcaatgcaggatcacagcagtgcacactgatcacagacagatctggatttgaattcctgctgcaccacttacgagcttggccaaatcaattaacctcgttggctctccttctctttgttgccaaacagggatgatcctaacatctgtagccacttcatgagtgcttatgatgcatctcactctgtattaggtattttatatatattatttaattaacactcttacatttttacagataaagaaatggaggcacagagaagtgacttatttaaagcctttgtttcagctatcagttgctgtgtaacaaactacctcgaaactctgtgacttagaacaaccacaattttctgtgctcgtgattctgtgggtcagcaatttgggcagggttcaactggggccactcctgtggctgcagttttctggtcaattaaaaaaagaaaaagagcccaaagtgagcaaatcccaatgtgcaagcacttttcaagcttctgcttgtgtcatatttgctattatcccattggccaaagcaagttacacagccaagcccagagtcctgggttagaaaagcaaggccccctccccttacagagtcacaatgcaaagggccatgcctgcagccatgccagtaatgatcacaatcctctttgcaaacagttcactccagccacccagctgctggcggcactatgtgccccaaattcatgcttcattgctagggatttcttttgagcactttctagttaccatgcctggttatacaagtctacagtccccctcctccctcagccctagggtcattaccacagtcactgaggaacaaataatgcagagaaaggattttccagtaaactccactttttttcttcttaaagttctgtaagggaggtggtggtggtctgttccgggggtcctacagggtataatgatggtggagataaatgctaaaggccacccatcacttgctttagagaaaaggcttgtctctatctggggctaggaaggatgcagaggagactgcaaggccaggcattttgttcattcatttattcattcactcactcaataagcctagtccttatcacccagtccttatctgctcagcccttagcaccttgaggcaccctcctctttaaagcatgctagcatgggtgtttatgcacatgtgtgcgcgcgcacacacacacacacacttgcatacatgcatgtgcagtttgacatgcacctcacactagcacatatgcacattcacgtgcttgtatgtacatacacatatatgcaagcgtgcgcacacatatatcccactccacttcttttccctcgaactcccatcagcccaacacaatatagttcttgttcatgtattggcctgggagaaaaaaagggcagaggtaaagaacgtggaccagtatggcaatccttctagaagaggcaaatcaaaacaaaacaactcacaaactgtaagccccactgtgttttcactgttcggctaaaaatgtgttcagattttcaatatatttctatattatgaaatgcatgtgtgtcagtaactagtgaacgtccagtgtccccccacctgtctcttcctctgtgttcagcagctctgctccaaactgtgggctggccttccaagcccagggctgcaggagaggcccagtgactttgttctttgccatgtggggagggcctgaggagtgtccattcatacccagtagcagctggtcacaggtagaccctaactggagccatgaatcactctacctttgacttgttcaagccttgattgattgtgtatgggctcagggatgtgacatcaactctgggccaacaggcaaatcttggcaaaggtgtctccctcctcatgacttccctcagagatggggatggtggagagagctgagactgggagcccaggagcctgagttctggtcccagctccaccctgggctcactgcgtgtctttctaggatgacattcaggtacagccccacagcttcatcctatctttgggccctctgtcatttactgaatatttttctttaagttgacctcccctccctttttaagttcccccagtgttagttaattagtggaaagcagccctgcgtgctggaagagcacaggttttagagtcagctggacctaacttgaaggccctgccacacaaactccctgagcccagtccctccctggaacatggggctgctgccagttcatttgtctggattattctggggagagtgattgtcatagagtatagcccagtgcctagcaaacctgagtcctgagtcattgtgtcttttatgaaagaatgaggcataaatatttttcctacatagtttggaatctttcttctccattccccatctccactgggccagccagagccctaagaatgtttcgctggaaaacgtgcagccacctcctccttcgtttcccattctccgggcctgctctctgtgatgctggctccatacttgagctggatgactttcctttaaaaaaattgtttaatatttaaatttagaaatagaagatacatacacttggttaaaaaaataagacagtaattaaacaataaaagaaggtacccaggaagaagcatgtctcctgactctttctccatccccgtataatctcagttactaggttattagtgtccagttagccatgtctccttccagagaccttttagccatcaatcagcacacacgtttgggcatatcccacacattcctgttttatgcaagtggtgacaactgtacttactattctgcatcttgctttgcgttcataggtatattttggagattgtttcatctcaagaataactagagcctccaatcatgtacagtgcttgttgaaggccaggggctggtctaaatgctttacatgtaccgatccatttcatcctcatcgtaaccctttgaggtaggtggcattatgaccacgcccgtcttagggatgagaaatctgaggcacagagagcccaggtggccagctcagggttgcccagaggggaaacagcagaacctgctccagactccgagtgcttaagcgctcccctacactagtgatataaatacattaaactatttatatgactatatagaaactacttatctgggctgggcttggctcacgcctgtaatcccggcactttgggaggccaagtcaggcagatcgcttgagcctaggagttcaagaccagcctgggcaacgtggcaaaaccctctctctacaaaaaatacaaaaaattagcaaggcatgttagcgggtacctatagtcgcagctacccgggaggttgaggtgggaggattacctgagcttgggaggtgaagactgcagtgagctgtgattgcaccactgcactccagcctgggggacagagtaagaccccgtcttaaaaagaattaaaatttaaagttaaaaaataaactacgaacctgcatttattgtggaaggaaatgatacttcacattagcagatgaaacacagtttggtataaatagaagcgttctgttagttaagtgaaaatcaagcagtgttgtatattcaagcttgtgcctgccagagcagcaggcgagaagctttgaagatgtgtgggcacgactgttttttcctcctgatgtaatcaaaggatcctcagagagctgaaaggggtgaagaacagtacagtaaacaatgcaagaagatacacagagagaagcatatctcctgactcttcctccagccctatgtcacctcggttgctgtgttactagtgtccagtttggcagtgtttccttcccatgacaccgaaagtcaccttgctaacacaagtggcaacactgacccagtgccagatagtggggctctgacactcggtttcccccgtctgtgggatgaaggtgtggagtttgaggaatactgaggctcctgccgggcattgatcttcatgccactgtgccctggaagggagaccagggtcctggctcagacttagggcagggcagctctgcggggctgtcacagcctgccagccagggtgtgtgcacagtgtcatccagggacggaactggtcctaagcagaatggaagaggtttccctctaggtaaccttcccttctctttctgctgtcctgcccagacacccattcactaagaatacatgtattgatcatcagcatatccagaccacgagatgtggctgcacactatgacaggtgccttagtggggatatgacagtgtgtgggaacatggaagagggggtgatgaaatctactgagtatcaggaaggtgccagagaagagatggtatctgatcgacagtggacagttcctgggtgcagagaggggcagaaggagcagcacttagcgcggtgggaagcagcacccgggatgctggagggagcctccgcccagtcagcactgctcctgagtcactgcactgagcctggccggttgggatcaggactgatatgggtagttggggaggctgaaagggaaggaagtctgccttttgcaatttgtttagtggcaagggactggaatctggtgcaaactggcttagataaaaatgacactctgttgaatcacatgaacatgtagctcaggtctaactggatccaggggctcacacactgatttgtctgtctcaccagtacggcgtgtactctgtgaggccagagaccccaactgtcttctatactgtattttgactgtagtgcatttggtatagtacctgacacataaataaatatttgataattgaaggtgtagctgttctccccgccaatatactcactagatcagaggcagtagaactatgcctcccccattttacccttttccctccttccttctcttcctaccttccttccccactctttccaatccatccatccatccatccatccatccatccatccatccatccatccatccacctttgagaatcagtctctctcccacttctggtttgttttcctctgtgtggacttcatgatctggcaggcttctcccatgtggtgacaaaaatggtccctagcactgcaaattctcctcccattagcctctccccaccctccagtggaaagaaaacactcccttcccagtgtttccagtgaagccctagggtagcatctaattggcctagctgagcttcctatggccagatgaacataagtttacggattggccaggccagggtctcgtgcccaccccaggattgtggggtgatgtcaaactcccatgaaccacgtgtactgagaatagtggaggggaatttgggggatttcctcaaaataaaattagggggctattcccaaagaaagaagactggatgagtctgggcagagaaaaacaacaggtgtccactgaggaggagtcccttggggagaatgaggaagtggttccattggctggtgctcctgatgttcatacctgacatacctgatgttcttccacctttcagctgctccccagtcctgtttgcctcctgctcccctgggctaatgctcactctgctccctttgtctgggacactccacccccatcccaagccctgctcacccagctaacagctactcttcctgcagtgttcagtttagatgtcacttcctccgggaagccttcctatggtgcctagtacgtccttcatcattgtacttatcccaccatgtgatcatcacttgtgtaattgcctgtatctctactacagtttggatcctatgagggcggcgacctgcatgtcttccacactgtagtattgcctagcatagtacctggcacataatgaactgctcaataaatatttaatgattgatggtacagcaatctccctacttccaagtatgctcagcagaacacaggcaatagaactgtacctccctcattttaccctctctccctgccttcttctcttcctttctcccatctatctacccatccctgcatttatccacccacccacccatctgttcatctgtccatccatccatctacccatccattcagccatattcactgatccactgatcttttgatctgttgatccagccagcccagccagtcattcattcatgcaaatatgtgttgatacttgctgggtaccaggctctgctctggtacagagaatactatcacgaacaagaccctggcctcaggactttgcttctcttttccttcaaggaggtctcagtcatgcactggcctagggtttcacccatacacagctgagagccactgtgcccagggacagccctgtctgcagggtggaggaagcacacagggactgcatcattgagaagctgttttctaacaactgatccttatcctgcttcaggtgtccctttatggatgctgtcaacttccagattctgtttgccttcttttgcatttaaatgaggggctgaaagatggtacagataacactttgctgttttcagaatctgaggatcagggaagaggcaaaaggcaatgtgtgcaaagcaaaaggcagtgtgatgaccagaagaggcaatgcttagcggtaaacagacctggcctgcagtcccagctctgcctggctttttgtgtgacattggacagcactcttgctatttcttttctttctttctttctttttttttgagatggagtctcgctctgtcgcccaggctggagtgcagtggcacaatctcggctcactgcaacctctgcctcctgggttcaagctattctcctgcctcagcctcctgagtagctaggagtacaggggcccaccaccacgcctggctgatttttgtatttttagtagagacagggtttcactatgttggccaggctggtctcaaactcctgatcttgtgatctgcccgccttggcctcccaaagggctgggattacaggcatgagccaccgcgcccagcccgctcttgctacttttgagcctccatctcctcaagtgaggggctaggacaccaagatttatggaggaccttttattctgagaacacatgcaactgaacttggtccaagaacagtggtcttaactgacacatccctacgaagtccttccctagactccctgaatagagtctggagggctggaaagtgaatcccttccctggcatcaagtggatgggtacctctgaggggcccttcagacatccccagttcaggaacttggcctcagctgagctcctgcatccacctctgccccttcccagccctgggcacactgctgctggcagttggtcacttgataatttgcagttgacagcactttccccatctacccccttctgatcttcaccaggcggacacggagaggacacacctctccacagctacccagcaagtagtgggagggctgagtctcaaaaccaagtctcccgaattccagtgggctggaggagcctttcacccctgttttacagttgagaaaggggtacaaggaaagcaaaacaaccatgtgttcagtaggcccaggctctggggtcagccaccttggctttgaaccctgactccacttaccagcttttcacctagagaaacttactgacctattctgggccatggttttctcatctgtaaagcagggatcataggatgcctatctcatagggtttttttgagaaataaatgagttaatataggtaaagtgcataaagcaaggcctggcaagtagtaagtgctcaatagatgctagctgctatcattgttgttactgtcatcacactacctcccaggattagggaaaggactcattgaaatgctcctttactagaagggctcctggaaggaggtttgcaaactttgaagcaatagataaggttaaatattatttaatgcatcctggactagcaatattgagctaactgttctagtctattgagctaaggaccattcatgctgaagcccatgtatcaggtaattaaataaaagaaacatctagaggattctgggtacaaatagagtcattttggagaaacttccaggtgaactctttggtggcagctgtctgtcataagtcaccctcggcagtggagttcactgttattcttggaatcaggaatcgagtagatcacagggagtttggccccagggtacttgggttgtcttctccaagcatgggatttttggaatgaagtttagaggctgtctgggaagtttggcctgtcggagggcaggaagagtactctgtggctcaagaagagtagaaaatgatgtaaagggagagaaaataaaaaaagaaaactaggcaaaggatatgtgggaattgagaacacccagctgggctgttgaccttgagagagtggatggatgcatggtgattggacaggaagatctagctgtaaatagaaaggctctcttttcccctgaactacccagcacagatgacagattcgtggcgaggcaagcagactcagaagccaaaatagaaaaaggagatgtagcaggaatcattgaacgcagacggggatgggatccagacatgaaaaacaccagcaatatggtggtgaggcaaagaacccagggttgtctgtggatgtggagggacatgtcgagaagggggaaggtggggtcctggagacagccgcagcaggcgttctcacactttagccacacctattttattttatttcttctttacattccatccatttttgctcatttgtaatctccctaaaactcctagaaacccccttcttgctgatttcatcctctctgtatgccagttccaccaagaccatatccaaataactcaatggactcatttattttatttttattttaagttccaggatacatgtgcaggacacgcaggtttgttacataggtaaacgtgtgccatcgtggtttgctgcacctataggcccatcacctaggcattaagccccacatgcgttagctatttatcctgatgctctccctcccgccgcctcccctgacaggccccagtgtccttttaaccaaggcatgaagatcatcaaaataggcgcctgctttgattatctgcaagtctgcagtcaccccttttggccactagatgtcgagaacgcatcaatatggcacatattctggtccattgagttatttggatgtgatcttggtggaactggcatacacagaggatgaaatcagcaagaagggggttttttggagtcttagggagatcgcaaatgagcaaaaatggacggaacgcagagaagccgtctttccaccaagacccatgaagaaaagttgactgcattttaaatccatgtattgttttccaagtttgggggatttttaggatgaaggaagaagggagaaacatggcataaaaatatattttttttcacattagttaatgttctccagagcttgtaagcatttccaagtgagcatgtttcaggttcttaaaccctgagcccaaatcagggataataatgatgatgatggtggtggtggtggtggtagcatctgatagatacctccatggctcttactatgtggaaggtattgttctcagcactttacagaaattaactcatttagtgctcataacaagcataggaagtaaatttttatcccatttttacagacgaggaagcagaggtcagagaggttgtgtgacttgtccaaggtcacacagctaaggagtgggaccatcaggattcagcccagacacttgtccatattcttaccttccatgatctacaatatatgttgccacattgactcctggccagtggcaaaggcaactttctgaacaatgaatcaatgctgtgatttaatgataaaagtcacagagcctgggcgtggtggctcacgcctgtaatcttaacactttgggaggtcaaggcgggaggatcacctgaggtcaggagatcaagaccagattgaccaacacggtgaaaccccatctctactaaaatataaacattagccgggcattgtggcgggtgcctgtaatctcagctactcaggaggctgaggcaggagaatcacttgaacccaggaggtggaggttgcagtgagccaagatcatgctactgcactccagcctgggcaacaagagtgaaactctgtctcaaaaagaaaaaataaagtcacagaattcctcattctaataaacgcacttcacagcacttcaaatgacaaggaataagattttagggttggccaggaattcattctgagttctctgacttacagggcttggttagataggagcacgtttcattcctgggggaagccttggctctgttagctgttacagtaatccaagccacagaagagaatgaacaaggcccaggagccatggattccagaagtttctttgtttcttagcatagaaagatgatcatacacttggcattgcagaagaaaagtacatttctggttggggaccagtaaaaatgctgttggtatggagcagcccagccagtgttcaggctactaaaagtatgcctgctcagaaaatggtaatgaattaaaaaaattcattaagggctgggtgtggtggttcacacctataataccagcactttgggaggctgaggcaggaggatcacttgagcccaggagtttgagacgagcttggacaacatggcaaaaccccgtctctatttatgaaaaaatgatacagacaatctaggatgatctggtagaaaaagtggtggattaaaagtgagaggccagatttccaatatgattaaatatatatttaccatatgaccctccatcccacgcctgggtatttacctaagaaaaatcaaaatacatgtccacacaaagaaatgtacataagtattcatagcagccttattcaaaaatagctaaaaactataaacatctcaagtagctgtggacatatgactaagtaaacagattgtggcatagccatacaatggaatacttagccataaaaaagaagttctgatatgtacggcaccatcagtgaatctcagaaaagttatgctgaatgaaaagagggctgatccaaaggagtttatattgtatgattccatggaactggattctagaacacacaaaaccaatctacagtgacagaaggcaaatctatgattggggctggggtggggtcagggattggctgcaaagggccatgagggatctttctggtgcagtggaagttctatattttgcttgtggtcctggatacatggatgtaaagtctggcatctctgcactgatactttgcacctccgagcctcagtttccctgtttgtcaaactagaaggttgttggattagatgatgtctagaatttcttctggctcagaaatttcccctgtaataacaatatccattttttttattatggaagtagagtagcaaagtgcaatttgctttataggaattgtttttataggcaaggatgaatttattccagagagcatagaatatctattgggttacttaatattactcattttgggtacagagccatttgcagcccattgtacttcaggaaacagctgagaaaatgatttgtgtgtaagaaggatgtttcccattcaattcccatgggtgtgggaggaggggctttccccgcggcactgggaggagacggagggatgccacagtcactactggcagggctagagaggacagctgagcaagggccaggcttgccttgtcacgtctgacagtccccagatgcttggagctacggttacccttttaaatttcctccttatttatttatttatttatttatttattattattttttaatttcctctttactagcccatgcctggctcttagttagggcttaatgatgttgttgttgatgatgatggtgatggtaatgaccatcatcatcatatccagtcctcagagagtctgtgcaaaagtaaaggaaggcaggtgcccagagtgtgttttgggaccagggcagtggccagctagagtgtagaacttggtatggagccaggagtaacagggagggccgtgctgggccatagctggctgctgatttcccctacttgtgcacccccaggtcatgaaaacctaccacatgtaccatgcagagagcatcagtgcggaaagcaagctgaaggaggctgagaagcaggaggagaagcagttcaataagtcaggagacctcagcatgaacctgctccggcacgaggaccggccccagcgccgcagctctgtgaagaagattgagaagatgaaggagaaggtgagtgggggccctgggctgggagcgattggggacagggcacaaaggggagggccatggtcttggcggacagccttagccttcccccttattcccctgcatcccagtggggtggtggtgggtaggggggatgggacaatgtagccagcatctcctcttttggagatcggtgtcctagtggaagcggagccaggcatgcccgtgctaacactggttaggcctggcttagtgctaaggtcagcaggcagacgaggtgctcaactcacaagaaagctgaactgtgacgagattcacacccagcaagcaccttctcagatgagctggaatcacaaggcattagcgggagcaggggcttgttccagaggccaatttgatggccaagggtaggggcggggggtgaggtgggaactgattgctgaatgtgtctcaacaagagggaccagcacctggaaagctggtgaagggctcattccaaaattgccattgccaattcaaagatgagagagttagaatccctgtgtattgattctggaaaagtcctttagtagggtgtggtgggaggaattctagctttggagtcaaatgagctgggttttgaaaatgccacgtttacaacacctctctgagctgcagttttcaaatctgataggagtggcaaattcgtctcatctctcatgtcaactctgatcaattgcccagagcactgggctgagaattgtgaaactcgaaacagatttagttaaaaacagtgctgtagggctggccacagtggctcatgcctgtaatatcagcactttgggaggccaaggcgggaggatcgtttgagcccaggagttcgagaccagcctgggtaaaatggcaaaattccatctctatttatgaaaaaaaaaaggcaaagaatttgaatagatgttgctcttaaaaaaacatgtatgagtggccaataagtacatgaaaagattgtctgggccaggcatggtggttcacacctgtaatcctaacactttgggaggccaaggtggtcagatagtttgagcccaggagttcgagaccaggttgggcaacatggcagaaccctatctctacaaaaaatagaaaaattaggcaggtgtggtggcatgtgcctgtagtcccagccacttgggaggctgaggtaggaggattacctgagggaggtcaaggctgcagtgagccatgatcacatcactgcactccagcctgggcaacagagtaagaccctgtctcaaaaaaaaaaaaaaaaaaaaaaaaaagattgtctctattattagtgattaaagaaatgcaaatcaaactcagtgaactatcacttcatacccacagggatagctagaattaaaaaggcagactataggaagtattggtgagaatgtggataaattggaatcttcacacactactaaagggaatgtacagtgattctatcactttggaaagcagtctaaatgttaaacatagactaagttaccatgtgactcaacaattttattcctaggtatccacccaagaaaaataaaaacatatgtccattcaaagacttgtacatgaatagcagcattattcttaatagccaaaagatggaaatgactcagatgttcatctgctgatggatggttgaataaaatgtggtatatccatgtgatggaatattattcagccatgaaaaggaatgaagtactgacaaatgctgcaacatggatgaaccttgaaaacagtatgctaaatgaaagaagtcagtcatggaagaccacatattgtgcaactacatttatgaaatgtccagcatagacaaatctatggaaatagaaaatagatgattggtttccaggggctaaagaagaggaaaatggggagtgactgtgaatgggtgcagcatttctttctggggtgatgaaaatattctaaagttagataatgatgatggttgtgtgactctgtgaatacagtaaaaataaataaaaataaaataaaataaccaagcagggaatgataggactacaacatagggagaaggagagaggtagagtgagtgctgactggaagtccagaggccgatttttagttcagagttgtatttttggttcgattagctacttggctcttgggcaagccacttctctccagttctcatttcctcatctataaaatagatgagtttaatgaaaatacctttaacatcctttctaggtataacattttatgagtctatgaagggctaaaaaatggtctcagggtcatggtcatagttgtccactggaaataggccaagaatatcaaaactctctgtgggggtcaggtgcatggctggcgtaggatgtaactgccaggaccctggggaaaagttagagatctctgaagagaattaaaaggatgagaactcactgtggaataggaaggtgtaagaatgtctaggcaaaggagaaaaaccatttatttacagagacctgactttttacacagcaatgggactcatcagtctgaaaggagcaggggacagctctccagcccacttcctctttcctgctccattcccaggctggcttagccaggagcagctccctggggggcaattgggtccctgctgagatgggcggctctggctgccccaccccacctctcccatccagtcatcctccctccctcctgtcctccagtcactgaaaatgactgaaaatgaccttgtgcagggacagttctgggcgctccagacctagcaatgaacaaagcagatcaagtccctaaccccacttattttctaatgggagatcactgacaatcaacaagtaaataaaagggtagaaaaaaatacagtttcaggtggtggaagtgcttattaagaaaagagccgggcaggggtgggcagagggagtgggagaggtagatgagcttgtcatcgaaagccaatctggccttgagaccttgggccaaggctgagggaaccatgagtttgagggccttgagacaggaatgaattttgcctcttaaaggatggaccaaggaggctgagcaaatgagggggagcctgggggaaggtggagcttgagaagtggatgggacaaggccatggagggcttctcaggtgcgagcagcagtttgagacatcactggagggtgctgggtaggggtcttattgattgattgattgagacggagtctccctctgtcacctagacctggagtgcagtggtgcaatctctgcttactgcaacctctgcctcctgggttcaaatgattctcccatctcagccttccaagtagctgggactataggtgcatgccaccacacccagctaatttttgtatttttagtagagatggggttttgccctgttggccaggctggtcttgctctcctaacctcaggtgatatgcctgcctcagcctcccaaagtgttgggattacaggccaacgctcctggccagggatcttatttacaccccaccctagcaaggaccgtcagaggctgctgctcatctagtgtcctcatcggctgtgcaggtgcaaggtgcaggtgtaaggggagctgcctgagtccaggtccagcccttactcatctagcagatggaggtcttccataggtgtggctgtgcagggcttgggtggcaggcagctactataaagaaaaaaaaaaccactgggccgggcatggtggctcacgcctataatcccaacacttgggaggctaaggtgggaggatggcttgaggccaggagttccagatcagcctgggcaacatagtgagaccccaccatctctaaaaaacttgaaaaacaaaaacaaaaactagccaggtgtgatggcatgcatctatagtcccagctactcgggaggctgaggtgggaggattgcttgagtccaggagttaaggctgaagtgagctatgatcacaccactgcactctcacctgggtgacagagcaacaccctgtctcaaaaaaaaaaaaaaaaggaatagaaaatcacaaaccccgtcctcttaaatggcttgctcttacatctactcttttcttcttccagaggcaggccaagtactctgagaacaagctgaaatgcacaaaggcccggaatgactacttgctcaatctggcagccaccaacgcagctataagcaaatactacatccatgatgtctctgatctgatcgatgtgagctccctggggagtctgggactgagcagggcccacaccagggctggcacatgtcactggctgaaggaggggctggtctttgtctttacctgacattctcgggtagccacagctcttttgagccctgctggaggggaagggcagtgatttggggaggtggaaaatgaatgttacctcgtggtgtctattttcacgagtgggacatgggcctctggtggccccagtgcagttggcttgggcagttgtatatccaatggcaacttcccaagtaccctcctggacaccaggtcctttgctgggtttgaggggttcaggggggaaccatacacagttcatgccttgggggatttcccagtgtggtaaaggagatgttattagtaaaatgtttggcgcccctagggccactcagccagacacgtgtacatgcgaaagaaagtagcgaatgagacagacttaattatacagatcagctttgtgtggggaagttatctcgggagaaatcgggcagcttaagcaaatggagaacggaacactgactcccgagtacccgctgtgcaggacacgccacagggacaagcagactgggagaaagaacactgtgagcggtggtgctggggagggcttctgtgtcatctaagtaggagccaggactgtttctctcatgtcctccttcctgcaccgatgggggagctggccctgtccatgtttagtaaaggcttggtatggtcgatggactcttttcctggtgtatcctgtcgggaagtcagggggctcctgcttttcccgtggctccagagggggccccattgtcagcatcgcaaggagagggagctcccaaatggcccaaggccagaccttcctctttcctgcttttcgctttctttttttgccctttcagcccctttattcattcatttaccatatattaattgagcacctgctgttgtctggaacttgaggagcaggagcagtgggttggccctcggggagcttacctcgccaaggacatgttgataggtgattttaatactaagtggcaggggtcacagtgagagaggtagagggaaatgtggacccctggaggaggatcacctgaccagctctgagtggggagaacatcaaggaagctttcctggaggaagtgacctctaaactgaattccgaaagaagggtattccaggcagaggggatgcatgcacaccaccctaaagaagagaaagatgggctcacgcttgtaatctgagcactttgggaggccgaggcgggtagatcacaaggtcaggagttcgagaccagtctggccaacacagtaaaaccctgtctctgttaaaaatacaaaaattagctgggcttggtggtgggcacctgtaatctcagctactcgggaggctgaggcaggagaatcgattgaacccgggaggcggaggtagcagtgagccgagatcgtgccactgcactccagcctaagtgacagagctagactccgtctcaaaaaaaaaaaaaaaaaaaaaagagagagagaaagatggtgaatatagggaacctagttctgctattgcccaaatctcaaccgcaactccccttgaggggcgccgtgaggtttgtgcagtaggattccaaagtgccttggggcctccgggatggaagattcggctgtggaaagggaggtaattgtaagtcactgtggtggccagtgaccgcccctccacatcctggctgtcacccataaccttccgttgttgcctctccccaagtgctgtgatttgggcttccatgccagcctggcccgcaccttccggacctatctctcagctgaatacaacctggagacctctcgccacgaagggctggatgtcattgagaatgcagtggacaacctggattcccgaagtgacaagcacacagtcatggacatgtgcaatcaagtcttctgccctccactcaagttcgagttccagccccacatgggggatgaggtaggcttcctcctggagcccgggcttggggctgcttccctctgttcccccatgtgctccagtacatcatccctggttgcacgtacagaaagtttctatccgacgcctggggtcaagctcctggttcatgggcttccccagctgaggagtttaccactaataccctcatcttgctgtctcaggtgccccccgtgcagaattacaggaccttggcttcccttataacccctcccagctatgtctagaagactccaagggagccccagtctgcacacaggctcgtgttctaaccccacatgtgcgggtgaggtccacgggaagcctgggcctcactgtagcctcaacacagccattcaggctggtgcattccaccagggcgctcccttcctccaacactgcaagcctttgatacaccagacgatcgagtttccttcagtgcttgtgctgctcagatccttgttatattctgaataaaacaaacgaaaaacaaatggaaagaaggcccttgtcactggccccaacacagccctactcgttacccaaggcttacaaaatcccttatgcaaatagttccctgagcttgtctgtgtcactgctccctcggggcattgggggaacccactccaacagtgtcccagacccagccagcctctgggtcccagtgaggctcagctgggccacccgtggcacctgctgggaggggaggggcaaggaggcatccgagaagatggcatttgctagaccctctgcatggctctgcccacttacttctgcagggctgcactgctgtgtctgccccatccctctcagtcctcccgatccatcacctggacctgaaaatgctggcctcatggtgaccactggtgaccataaactttgggttgtgcaattagtagcaaataactagtacagtccacagagcgctactgtcccttgtgatcctagctgtgttcctggaaggggtgaggtgcacatgcctgccagcagcccagcccacaggtaatactggagtcccacatgaaaggtggaaggcggtggctcacgtctgtaatcccagcacttgggaggccgagatgggtggatcacttgaggtcaggagttcaagaccagcctggccaacatggtgaaaccctgtctctgttaaaaaacaacgacaacaacaacaacaaaaaacaaacaaacaaacagcaaataaacaaaaaatagccgggcatggtggcaggtgcctgtagtcccagctactcgggagactgaggcaggaaaattgcttgaacctgggaggtggaggttgcagtgagccgtgatggcaccactgcattccagcctgggtgacagagtgagaccctgtctcaaaaaaagaaggcagagggagaacagcatttctctgggtgcttcccctcctccagccctcggcccagtcaattgctgggggacgaagagctatgagctgtgagagcgcattgtctcacagctgccctgctgcagtgtcattctgcggcacaatgggagtgtgcccctgattgtttcccattcaggttttttcccattggcttctcttaggtggttgctttcttgccacaatttcttgccttgaaattaaccagttagttttgcttaataagattaaattaaggctctttgtaaaccttcacatgcttcccaaatgtagatcatgactgaaaggccacacctggcagtggcaagagtgcggactttgagtaggaagaccccggttctcatctggcattggttgccacggccacttatgagctctgtgaccttgagcaggtcactcaacctttccgagcccctgtttcctggactgtgattgggatgttaatggtagcccctgccctagctccacacaggtgaggagggcacagggcaaccacagatggtggctgttattcctgcaggtctgccaggtcagcgctcagcagcccgtccagacagaactgctcatgcgttatcaccagctgcagtccagactggccaccctcaagatagagaatgaggaggtgagtgagcccctctgccctataagggattttctttggaaggcctggcttgtcccagggagtccacttgtgccacgaagtgcataagaaatgatagttccacttataagatggaatagtacacgatcattaaaaccacacacaccaagaatcattaatagcctggaggaacatttataagatgttaaattgaagaaaaacaaaaggtgggaggctgaggtaagagaattgcttgaacctgggaggcagacgtttcagtgagctgagatcacgccactgcactctagcctggatgacagagtgaggttccatctcaaaacaaacaaacaaacaaacaaacaaacaaaacacaaaaggaaataggactctatgttcagtattgccataactggagtaaactaaagcatatgtatattcctaggcatagaaaaaagactggagggaaatgcttaaatgttattagttgctatgtttgggttgtggggtgataggtgctttctgtttacttctttgtgctttcttctattttctgcaatgaatttctgttttatcattagaaataacagtaggtattttaaattacacaatgaaataaacaacctagggcacactaaatttgtcatggattctgagctccaaggaacaggtcagccttaccaggcccagcctccctcccctgcagctgtggggcataggattctcagcaagtgggtacagatggaaataccagtgcagtggctctattctgatgtggactgaagaggccagatgggaaacatcctattccaacctggactcttcctgcaaggaggatgccaaccaactggaggcccctggagaaaggacaccaggatggagggagtgacactcgaggtcatgggcaggtttattctttaaagtgcagtcatgggggaggtgggaagacacagtcttgatcttcaaatctcaagagttctatcctgggcagagacagcaactttgcttttcatctccacaaaggacagacctaggacaaatgtgagacagattggagctcaggatgatagcaaatcagtgcagtccccagggggaggttgtatggagacaaattatatatttgtttttcaaacctggaaagagacaggagatgaacagagtgttttctttatttatttatgccctacatcttcccccaaaggattttaaattgtttacacggaatagtatgtggatcataatgttaatggaatttaaattggaaatcagggccaaagaaaggagaatgaagccaatgttcttctgtatgagctgctaacgggcttgaatgtgcttaattttgaacctgagcttcctgtcatgctgcgttagaaagaagaattgatttgtgtattcattcaacaatatttattcaagtatttatagagcacatactatgtgccaaacattgttctagatatagagtaaagtgaccaaacacaacgcaccatagcacctcctctccgggagggaatattctagtgagaaaagacaaataatacttgaaactgttgacaaagagagtcaaactctgtaaaatacttgaagagatttattctgagccaaatatgagtgaacaatggcctgtaatacagccctcaggagatcctgaaaacatgtacccaaggtggttgggccacaacttggttttatacattttagggagatgtaaggcatcagtcaatacatgtaagttgtatttggtttggtctggaaaggtgggacaactggaagcaggggctttcaggtcataggcagattcaaagattttctgattgacagttggttgaaagagttaagttattgtctaaagaaaggaatgtctgggttaagataaggggttgtgcagactaaggttttatcatagagatgaagcctcccggttgtaggcttcagaggataggctgtaaatgtttctatcagacttaaagagtctgttctaacagtaattccaaaaaggaggagggtataatgaagtaggtttgccgcccccttcccatcatggcctgaactagtttttcaggttaactttggaatgcccctgactgagaggagaggtccattcagatggctgggggcttagaattttatttttcatttatgaaacacaaaaagaagccaagaaatgaatgagcttggaaaatattagacagtaataggcactgagtgaagatatcggggggaccaatgtcaccaggaggtgacatttaagctgaggtctgagtgaaaagaaacagactttgagtgacaataattttataacaaacactggaggcagtttttccagggactgtttttggaaccagcctccagagcaaagaatctgccttttaggcacagttcagcaaaggggtgttgtaaggtcagggcccgtgggccctgcttgtgcaggcttctggtggtcccacgaaattccagaagaaaaaactggagtcctagctgaacaatgtgtgcctcagcaactgtcttcctggagttttccttttctcagctgggcttttgataggagtccagtagcagatacctggagagtttgttgcacgaagaatggctgcccaccattgtcaactttgtctctatccttctctgaatgaagagaactagagcacatctaatgttgtccctactcaactgaccaccttgcattggaggaacttgttttgagttacataattaggctaagagaaacaaacctagaaacctgggttcctcatttgttgcaacattcctcaaggttctctctggcagaagccatacgataaaatatctttaaattgggcaacctggcttttcatcccagccagctgtgtgattttgggttggtgactaatttgtgttttccacattaatacagtgagaaggattatttttgttctgcctatatcctagggacttcatatggaagaagtaaagtgacagctgggaaagggactttaggtgtcaacggcagtatgagaatacaggatttttgtcaatctgctgtgtttccccaggttaggaaaaccctggatgccaccatgcagacattacaggacatgctgactgtggaggactttgatgtctccgatgccttccaacacagtcgatcgacagagtccgtcaagtcggctgcctctgagacctacatgagcaagatcaacattgccaagaggagagccaaccagcaggaaacagaaatgttttattttacagtaagtggcatcctgggcccagaaccacactgtcggccaagccactggcagtgacttttcaggagcaacccaagctactgagaaccagagaaaccacatgggtcaattggatctaagactccatcaccatgcttttaaaattaagttgcctggcttggttttctgaaatgcagaaagtgaattcccaatgggtagcattggcattgatcttgggtgatgattattgaaattttcttgctctagaaaaaaaccagagacagttttattcagtggggtgataagaaaatggctgacagagtcaggtacaagtcccaaggaacaaccttgaaattatgtatatagattatcatgttgaattgtcttaaatttaggtgtgagctttggaaaaaatgccctcaaaaatccaagcaaatggctcttgagttgctagcccttcatgtaaaatcccatgttaattatctttcgtttggacagggactgggaggagaaaggagacggggactggggctttagttcaacatgtgtttactgaacatagaatattaggtttgtaagggaccttaaatcttccatgggatgcttgagtcagttcagccacatccctgaccaggggccatcctgactctgcctgattgctcccaagattaaaatctccctttttccccagacagcccttttgtttgcattgtgcctggcttttggtattaccatgttttcctttatctttgctatcttcaaaaacctacctcactaggatttcttggttctgttctctggggccacccagagtggaggctaattctacatggcagtgtttcacatggttgcagggagctgggatttcatttctctaggctaaatgtatttgattctttcagtcttgccttataagcttttgttttgagtagcctcagtatcctagtgactctctcctgaacatgttccatgtgctgatgcctcttctaaggtgagactccgagcagtggtatgcccaacacagaactgagcaaaattggccgggcaccgtggcttacgcctgtaatccgagcactttgggaggccaaggcaggcagattgcctgagctcaggagttctagaccagcctgggcaacacggtgaaaacccgtctctactaaaatacaaaaaattagctgggtgtggtggcgtgcacctgtagtcccagctacttgggaggctgaggcaggagaattgcttgaacctgggaagtggaggttgcagtgagccaagatcgtgccactgcctccagcctgggtgacagagcgagacttcatctcaaaaaaaaaaaaaaaaaaaaaagaattgagcaaaattttcaccccttctataccgggtactatgctcctattcatatgttctaagatcatattcttttattattattttaaggctaagttattatcagttatagctgtcttccctacatgctgccattaaccaggcctcactcttcctaaggctttgtaggggatatcttgggcaggtcttctgtttatcaccagttagttttcctcttgatgaattcaattcatggttttagtcaacatcctgatccagttactcagcatacgtgctgtctcctcaaacctgtgtcacctgcagattcagtaagcatggcttccaaactttaatcaatttaaagactaatgggtataccaaggccaaggccaaagacagagttgttaaaaatatgcagctagggccaggtgccatggctcatgcctaaaatcctagcactttgggaggccgagtaggaggatccctttagcccaggagtttgagaccagcttcggcaacataggacgactccatttctacaaagaaaaatacaagtgcatatctatggtcccagctattcaggagggtgaggtggaaggattacttgagcctgggaggttgagactgcagtgaactgtgattgtaccactgcactccaggctgggtgacagagtgagactgtctcaaaaaaaaaaaaaaaaaaaaaaaaaagcaatgaggctaatattgattggattgtagtcatttaacccatcacaaacccacccaattctaacttccacctccatcttataactgcctttgtcaaatcccttgtcaaaaaccagtagtcgatacacactacattttctccaacactctttgaccctgtcaaggaagaaaacaaagcggagcttagcaaagcagcccacgctgattgctggtattcaccacttccatggagcctacggtgttcacaaagagaatttgtggttacaacatgcacatgaagattaattcactttggcagtagaagcaaagaattctggggaacagaattcaagaagggagtttggcctactcgaagttaggagaattctccagtatctatgactaatggtcatcagatgttatagtttattcttaatacttagtttgctaacctggtttcctagtataccttctcatgactcattattttaggtctttttaaggacatcgtaatcctttcaatgcaaacatcaatgcaatttgatggcattctttattttgcggacattcgttgttcttcaggtggttgaagcttaaatgaggcggacagagatgagctacagagccccaggctgtaatttgcgctaaccagtggatgacctgccaaggcatgagttaggcatttgggattacatcttcaacttcttggagcagtgagacacggtggacagaatatcagcttacccctcagctctgcttttttggggaattcttggacaggagataaaatgagaggacattattgctggaagcatctatagagagcctctaggacagtagttaccaaactgaagtgtgcatttgaaccatctgggaagcttgttaaaaatgcaggttctcagccaggcgcagtggctcatgcctgtaatcccaacactttgggaaccgaggtgtgcagattgcttgagctcgtgagttcatgaccagcgtgggcaacatggcaaaaccccatctctacaagaaatacaaaaattagctggccatggtggtgtgtggctgtagtcccagctacttgggaggctgaggtcccagctacttgggaggctgaggtcccagctacttggctggcgtgtgcctgtagtcccagctacttgggagcatggcttgagcctgggaggcagagattgcagtgagccaacatcgtactactgcactccagcctgggcaatagagccagaccttacctaaaaaaaaaaaaaaaagtaggttctcagaccaccactctcccaagatgggcaactggaattgtgaacacttctgggcctcactggttcctcctccagtgtcaaatgaagggttagactcgagttattctagaacaggaatttgcgtgttgacagtctccccagctggttacaagcccctggccctctgccccacacttggagaaacactgagtctactctcagtttacactggggaggacagggaggctcagaaatgctcggtaatctgcccgaggtacccagtgagtgaccacagttctgagcttctgtttccttctgggtagaaggggcctgatgatgttttccccatttgccatccaagactctgatgaggcttaaacgtacgtgtgtgaaaactgtcaagtgctctgtggatacaagtcgagtgactcttaatggccaataggccaggtcctgggagcctaggaccatggaaaaggagagaggacaccacaacctcccaccagcccagtcgttccagaaacccatcaaggtgggccagtgtgaggtgaccccagtcttatttgtgtatgtgtcagcccctaccccagtgggtctttcccccatagctgtcaatgggaaggtggtgatgttagaggccctcctctatagttgacttgggggtgtctgagcctctgcagctcacttttctctgccccctttttagtgtgctggctgggacaatagagtgggtttctctttgagaaactagcaggtggatttggggcaggcacatctacctccttcactttattctcagggctgttgcaattactgtaccccttgcttgtaaacctccttcccgcaggtccccatgtggccccctttctacctccttcaggccttggctcaaatgtccactttgcagtgaggtcttctagacttccagtccactgttcccactttatttgatttatttatttttttgtggagatagggtctcactctgttgcttaggatggagtgcagtggcatgaacatagctcactacagcctcaacctcctgggctcaagtgattctctcaccttggcctcctgagtagctggcaccacagcacacacccccaggcctagctagttttttaaacttatttttttagagacttggtcttgctatgttgcccaggcttgtcttgaacttcaggccttcagcaatcctctcacctcagcctcctgagcagctggaattacaggtgtgagtcaccgtgctcagctctgctttctttttatccgtagcattcaccaccgcctgactgagtggtattttatttaccttttttgttcgtttattgtctccctccccagcccaccacgtaagcttcaagagggagggatccagtgaaatttctcagcacctactctaagccagtcacagctttaggcactggggagctggagatgagctgggcttggagcccaccctctagcagctggccatgcagcagaggcatgcccagtggggctctgtgacagtgcaggtgggggaagctggcacctgtgtagaggtggctaaggcccactgagttccaggcaggtaggtgtgtttctgtcctggcctattctctgtccctcagtactgctctgaggtgcactgctctgggccagagccctgaactaggaagcaggctggggttaggcctggcccatggctgactttccgtgggaccttggacaaatcacttcctggtgcaagcttcatttttctcatctgtacaaagaagaaaatcttatcaccccctgcagtttgggttattttaatgggaaagcctctcaggggcctgcaagcccctcctccttcaaagtggggccagatgaaaggaagactcgttccgaggctcctctctgacagatccgataaagctccctagcttcggctgcgtggcccctgggacggctcccatttttattgctcttggcgcagaagcacagtggagctttgatgactaaagaggccctttgctttgtctccccgtggcccttacctgacaaaggcagctttcactgctgccattctcccctggtttgctttgtgttcctaacccccgacctgaaaggcctggagccctccaagggcctggcctccgcctgtcagcgctggggttctagatggaggaaagcaaagacgcagatgcagaggcctctctgttccctgcgccggggtccctgcgggtgacgtgatctctcttcggcttccgtgtcccagaggtcagttgcagaggcagagatcccattactcggccttgcaatctataacttccttgtgccttgtgtcttacagaaatttaaagagtatgtgaatggcagtaacctcatcaccaagctgcaggccaagcacgatttactcaagcagaccctgggcgaaggtgagtgggctggtggaggccctctgggaggtgctgcgttccccactggctctcactgtggccccctgacgtgttgagctgttcaggcttgagacagcaggcacctggcagaatgaacctggacttaccaggactgggcaggctgggaaaatcaccttggtacagatgccttgtggggtccaatctggctatagaaaatagagggtgtgagttgctttttgattaatagaaagaaaaaaaataaaataaagaaaatagaggctgggcacggtggctcacgcctgtaatcccagcactttgggatgctgaggtgggcggatcacgaggtcaggagatcgagaccatcctggctaatacggtgaaaccccgtctctactgaaaaaatacaaaaaattagccgggcgtggtggcgggcgcctgtagtcccagctactcgggaggctgaggcaggagaatggcgtgaacccaggaggcagagcttgcagtgagccgagatcatgccactgcactccagcctgggcgacagagcgagactccatctccaaaaaaaaaaaagaaaagaaaagaaaatagaggccaaccacaagtcttagtttaggttggcagggacagtccaaggcaaagtgatagaggggcatccatcaggtagggagtgggaatccagggcctcagaggctggcactgacatttttcagcagacactatttgcaaggaatactactggagtgtctggctagggttctaggtccagagaaggaaaatccatacatgtaagtcagggtttggccctcgagggacctgacaactaggcttaaagccactcaatgcattccagtggcagttggaataaaatcccagctgctgtcacggcacatgaggccttataccacttagcttctgcctgcttccctgacctcatcagtcattctccctttccttactgtgccgcagccatgctgagcaaatttctgcccttcaggactcaccaagcttattcctgccccagggcctttgcatctgcatgggcaaccaccacccaaatcagggggtagagcatttcagtcaccctcaaaaattccctcgtgctcctttgcagtcagcaccccacactctactctgatctgatttctgtcactgcagattagttttgtgtgttctaggtagtaagggctggggaactttgggggctgacggaaataaaagctccatatcctgctttgagtggtggttatacttgggggtagacatttgttaaaactcattgactagggggtaggaggggggaagactcagttgcagtgagctttttcttcattctttccctctaaattttacccatcccgacatttcagtattgggccagcgggtaaagggggtgtggaggagtttgggtagcaaagagggaagaaaaacagtgagaatggaggagaaagggagagagtccaagagtggagctcagggtgtgggtgccatgggggcagcttctaagactagcattaaagaggagggttggtatttataggcacagggcagggggctattcctcatgagccagttaaccaaaaggtaggaccatatgagttggtggctacttgcatttttgaaattagatgctgaatttggaaaactagatcttcttttaaaaaatacgatcctgggcctggtgcagtggcctgcccacgccttcttggtgcagaagcatagtggagctttgatgaataaagaggccctttgctttgtcttcctgcggcccttatctgacaaaggcagctttcattgccgccattctccgggggggcttgctttgtgttcccaactcaaatgatgatgattgatgatgacggtcatcatcaatcatcatcatcatcatcatcatcatcattatcaccatacttagttttggcataactcctggtccatttggtcctccaagtttatttagccttcaactacgccttgctctaagattgctctaccagtctctcttctgagttttgagctgattagcaataaaaaaaaacctcccggaaaatgcattttcagaagtagaggggcagctaagaaaaagccaactggaagagtctccgtaatcctgtgtttcagtaagctggccgtggagaggctcactgcgcttcctttgacaaatggatggttcttgatagactggtcagttctacagaagttttttttttttttttttaaagtaaactttctcttttaaaacagttttagagctacagaaaagttgggaagatagtataaagttttcatatactccacatctagtttgtcctgttattaacattttacattagtatgctatatttgtcagcattaatgaatatggtacattattattaactgaagttaacaaattactgaataactgaaaaagatggaccctgaataaattgagaccaaatctccagtcatttttatatagccactacacgataaagatacaggtagattcttagggcactgggtgaaaagggagaatttccactgacctaattgataaattgatcaattggaaattgcccattgggtgaaggaagaagggaaaaaattcagcaggccaaagagagctcagaatcttagcaaattcatccttcttagtgtcaactggtgattcaccttttcctgagcgttttggttcttctattcagtaggattctcttctaagagtagggtagcgttacagctgcgtcagtggcctttttatgccgtatgagggctattttgtagtatcatgtctagtgcctcagtttctgtaaagtacagtagcccttctttatttgtggtttcgctttccatggtttcagtttcttgtggttatctgtggcctgaaaatatgaaatggaaaattcccgaaataaacaattcatacgttttaaatttctcgctgttctgagtagcatgatgagcacgctgagcaaatttctttgctgagcaaaaatcttacgccatcgcggctccatctctgccaggatgtgattcctccctttgtcctgcatatccactctggatatggtacccgcccactggccacttagtagctgccttggttatcagattgaaaaaacagaggacatgtaggatttggtactatccacagtttcaggcatccactgggggtcttggaacatattccccacagataagcgtggactgctgtactcttttgacaggatggctcaaggaaactacaagttagatgaaacccaaggtcttttgggtcagctttacttaaaagtggatttgagaacatgattgaccccagacatgcaagtcaaaaagcttccaggtgcttggcaaatggcattccctgttacaaaggatgtcactggcgcttctcgggagcaagagcacataccttggctgttgctatgccattttattggccagagaattctcagtttatcatcatctctgagtcttagacttataacctttttattgctctggggtgtgggtattctgtaagctccagggtttacactcaagatgcggttggtttttgaatttttgaaagtccctcaagcatgaatgaacagtgtgccacctataaaagggaaggagcatgaccttttcatgccaactttaattgcccatcacagagcaaaatggccaccaggaccaggccatctgactttctagaaaattactgaaccaccaactataaaatatatttttaaaatcccaacaggtctcagaaggtaaaggataggcaagttttgatttcccatatttgtgagacagtcaccctgtttctaaagatgctggttgtgggattcttgagagctggaatgtgagtctgaagctgaaagacagcatattagattccacgtcagagaaaagttttccttcagtgtgttctgacattccactccacatcctaaaacctttgatttctacctgcccccttctgttcacccatctatccaagagcgcaggcattttgtttggccaggcctggggagatagtggtacacgagaaaggtaaggtccctgccctcatggaaaagagagacctcaaacggtaaacaaactactaagtaaacaatgataattgagcccggtgtggtggtggccctgtaatcccagctactcaggaggctgaggcaggagaatcacttgaggccaggcagtggaggctgcagtgagccaagatcacgccactgctttccagcctgggcgacagagcaagtctctgtctcttaaaaaacagctgggggtgggaattataattgtgttaagtgccatgaatgaaaactttgggctgagatagagaacaatggtgtgtgtgtttgggagagatgggggggacctgctttagatagggtgatcagagaggcttcctaggggagttgctgtttcagctgaaactaaaggatgagaagacatcagccaagtgaaaaaccagggaaagagtttttggggaagaggggacaacatttgcaaatgcgggaaaggatgtggtgagtcagaagaattgagagaagggtattgtaacttgttgagtacacagaagagtggacagtttgggaacccagaggagggggaacaggaaatcaacactccttgttcactacaatcccaggccatcgcctgaccactttcatgggctgccatcagctctaacaggagggcttgtgtctacctgaaaattttatccaaactggtgtctggtaggaatttgcccttgactccagacacacagtcaaatcaaacaggacaaatttgcctgttttaccgaacttttctcctttcctgctttggtctttggttccaattccaccaactgcagccacccatgtaactgcttgtggctttgctcaggaattaaggagttgcctgttgatttgccccaagttctattttcagacccagattactctcttcctctccttatttccctccctggccctattctgcctttttttttttttctgtaaataaaatgctcgattctttcttctaaaagtcttttaatgttagtgctaggtgggattccagagttgagagctgtgctgtccagtatggtggccactagccatgtgtgcctgatgaacacttgaaacatggctagtctgaattgggatgtgcaaaatgaacaccagattttgaagagttagtacacacatacacacaaaatagaaaatatcttattgattttctatattgacacatatcaaaattataatctttttgatattaggtcaaatgtaatatgtcatgaaaattaatctcacttatttctctctctctcttttttttttttttttgagatggagtctagctctgggggtcccaggctggagtgcagtggcacaatctcagcttactgtaacctccaactcctgggttcaagcgattcttgtgtcttagcctcccgagtagccgggattacaggtgtccgccaccacgcccagctgatttttctgtttttagtagagatggggtttcaccatgttggccaggctggtctcaaactcctgacctcaagtgattcacccacgtcggcctccgaaagtgctgggattacaggcacgagtcaccactcccagcctcatctgtttctcttaacgttttgtaatgtggctaccagaaattgtggcttgtataaatttctactagacggcactggtttcagagattctgaactggaagcagttcttgagaatattaggaaacggagagcatttttggagccatgactggggacagtactgctggtagttggtgagtgagatctagggatgtcagcatctgcaaagtactagacaggcaatgaagaatttaaactgaggatatggaggcccaaagaaaggaagtggcttgtccaagctcacgcagtgagttgataaaagagttaaacagtaggactcagacctctttgttttcagtacagttttggtaggagaaggaaaagatattatttaatctcttcattttgagtgccatacccttgccaaggcagctgtcctctaatgtgtggcatccctgaagaggggatattataagaagccaaatgctgccttcagggagtccctgggtcggaggcatatactgctggggacatctgttctccctcaccttgtgtttgtggaggtggaaccagcttccctgggtaaacttagacttgaagttaggcaacctggattggaatccagactctacacttagcagggacttgggaaagtcactccatatctccaagtccatttgctcatctgttgtgacaggaatgacaccctgtgtacaattgtgctgcagcacttattacactatcgtgtaatctgcttattgactcatttggtactaagcttcttgcagatagagcacttgttcattcattcactcattctacaaatatttgttgagcatatactttgtgccaaacactgcccaagaccttggtgtcagcgcagttttaagaactgacaagattccttctctcacagaacacagtattttccaatggagatagactggcagtggacaagtaaacaaataataagtaagaaaaatattaatgataagctacatgtattgataatttaaatagagaaacgtgatataaagagacaagtgtgtgctttagatagaggaagaagcctgggcaacatagtaagacctcatctctactagaaaaaaatagctgggtgtggtggtatgtgcctgtggtcccagctactcaagaggctgaggcaggaggattgcttgagcccaggagactgaggttgcagtgagctgtgattgcaccactgcactccagcctgagcggacaacagagtctaaaataaataaaataatataaaatagaatagaatagaataaaaataaaataaataataaagatagaggaagcttgtctctggacacagcttttaagttgagacccaaaagacaaggtgaaatgagccatgcaagtgttgggagcaagagaattccaggcagcaaatgcaaacgcctacttgaggaccacacagaggcctctgcatctgtagcagagcacacaaaggagaaagcagcctgaggagatggagtagcattttgaagggtctactctgacctcaaagggtttataaaacagagtaagaggtctggattttgtcccttgtgcgatgagaggttattggagggttctaagcaagggaaggacatgatctgatttacagtttaaagagattgcttggctgctgaggcaagaatggatggtagtggaataggagacccagttaaaaagaaagtcgtccaggtaagagacaagcatggcatggactaagaagatagtgttaagtggagagaagtggacaaatttaatttatgaaggaaagacagttttcaaggagagcacctgttagacttctggcttaaagaagaggggaggtggatatccacttattgagatattgaagacttgggtgaaagtaggtttggggcatagaaagaaagagtgctatgggaaacatttaaggtttgagataaaagaaggcaatttgtgttgagtggataaagaaaatgtggtctgtgcatatgatggaatattaccaagtcatatgaagaaatgaattactaaaccgtactatatggatagacctcaaaagctttatgctaagtgaaagaagccagatgcagaagaccacatcttgtataattccatctatataaaatgtctcgactacgcaaatctgtagagacagagagtagattagggttgccaggggcctgaggcaggaacagggagtgactattagtgggcatgaaagatctttttctggggatggaaatattttcaaactgaattctggtgagggttgcataactttgaatagtcactaaaaatcactgaattatacactccaaatgggtaaattttatgatatataaattatacctcagttatgctatttttataaaagattgcagtgcatctgagtttggaattctagggaagcgtaagatctggacatagagtagggagtccttggtaagcacttgcggtcacttagagaggatgtgtagaaaaggaaagcagccctgggtctgtgtcctgatggcactccaacattttgaggtttgaggttgggcagaatgaggaggagacaggagaaactgaggaacttgtagggcaggaagaacacctggaaagtgtggagtcatgaaagtgaagaggagagagctttgtaagaagggagtcgtgaactgagcagcatggtgcggagaggtcaggtacgataaggacagagaagaccattggattcagcctcaaggagatccttgttgcccttaagtgttgaccttgacaagagcagtgtcagcccagggatgaggacagaagcctagctgcaaaggggtgaggagggaatagcaggggaggaagcagtagtgcctccagacatctccttcagggaattgtgctgtaaagaagagcagagaaatgaggatgtagctggaaggagaaatggggtcaacagaagggttaaaagctaggtcatgcatatccagaacatgttgatatgctgttggaaatggtccagaagagaggagattggtgatgctagcgagaggggagatacctgcagaaactaaggcccccagaaggacagaggggatggaaccagggcataaggagaaggtctgggctttgtctggcaggtaggtgggagggcctcgtggaggcatgcacatggagaacccatagtacttgattttcttttccagtaaagaaaatgagaagatcttcagctgggaatgaaggcagaggcagggcagcagggtggaggagcaccagccttacggctggtatccttcagtgccaggcatacaacaggggctcggtcaatctttgttgccattaaacattgcaggagtttttgaactttgggaggcatagaagtgatcaccaggggtggtagttaaaatgcagatttctgggtttttatctcagagattctgattcagaagacccatgagacagccaagaaatctgcatctttaacaagacccccagatgtttctgatgcaagtggtcagcgggctgtagtttgagaatcactgaaaatatgtctgtgaacaataatgtgtgtgtgaacacagccctacaaacaggaggcttttaatgaagaattaataagacgcagttcttttcaacagaccgcaccttaggcataattagatttcatatttcataaataattaagactcattgtattttgtttttagaaaaagatgaatgttctttggattaaaaagaaaaggcaattaaacattcatgtatacttttctttgcaggggaaagagcagaatgcggcaccaccaggtgagagtgggagagttgtgttttctttcatctgctgcccgaggtgggagtgggatggggctggggaggcactgccaggagctggagaagcagggatggcttcttcaccaatgtccccaagggccggtgtgggtgtgcccaggtgaggcacagttgctgctttgcttgttctagcattagactgacaaagccacgcccctccaggctggcgatggaaggggcgcttttggggctgctgtgtggcagtggggcaccctccctttgcgctggccatcgggtgagacagtattgtctactcagagtggctgagggcagcctgtaggggccagaggctgtggggtggctgttgacctctcttcccacctgctacaccatgctgagcaaactgcccagccatgctgcgaggcccagcctgaggtccccatgtaccaaggctttgggccaggctcagattgcgcgcagctgggcacacgcatgtgcataggcgtgcacagactctcctgccgtccacaccctagcttggacctcacgggcacttggatgagctgacggaaagtaacacacgggcaacttctgctttctcttcagcttgttcaacattcccttttgcgctttttcctgagcagaccagagccagtgaacactttccactcagcagctgatagcccaggggctgactttacttccctttcagagagcttagatccataagtggctctgtcactggccaggttgtttgcttagagcctatttcatttctatgttcctattaagagatattgcactgcctagctggaattcagccagtggcccagaggcctgcacttttccatcacacggcagtagagcgctactttttgcctcactttctgggcccagggacctgagggcattctttcttttcccacaaatgctttccagtggccccaaatcctgggaagccctcatgtttggcaagagcaaagatgaactcccaactctctcctgctccttgggaagggagttgggcaaagtcttggcaacctctggggttttcagtttcctgggctcaggatggggagacggagggcttggcagaagttcagcccgtacagctgttcctctgggctctggcaatttggaaacatcaggatgattcacaccaggcaaggcccttccagcacacggggcggcagatgtgcagggtcactttcgaagaaccttttagaaacgaacccattataatttttttttcttttctggcgagagaatgttgtcatagtctcaaaacaacagaagctgtattttacaccaaattctgcaaatagtgaaacagatgggggatgaattgagctgtccctcacttcctcctaattcctagaactcacgcagagaagtttgttccagcagagtgtgggagaggagatctgtaatcaaacacttggccaggtctcagggtcttccctcaggggaaagttgagggtttgtgttttgttttgttttgttttgttttgttttgtgttttaaataaagccctctgaagtgttgtcttccacaccctcctggacctagggcctgggaaatccaagctgagtttatcagacctcccacttagacaccctgcattcaactgcagctaccctgcgttcaattgcagacatagccctgtgtactctggttcctggtcaaggtcaaagacaactttgttagtaaactaaaagtctccccttacctccaaaatcatgatttaacttgtggaaattgttgctaacaatgtctctgtcctatggctctctctgtatcttccatggactcccacacgaggtggatatcatttctggatggttatttgagcaggatcccctcagctaagttgctgttgaccttgtatagaggaactggtgttgcatatgggctgcagcatgttatatttttctcacacttcagaaccttatcttagaatagaccaaattcataataaccctgtaattcaggatggccagatgtgataatgcacttaagtttaaaagcgtattgcaaatgtcaaagcaagatgcaaatataaggtttgattattgtgattcaaatgaatgtctggctccccttacccaggttgacatgccctcgtggtctggattagaggtgaaatcacttgagatcttgttcaggcagatgcaacacagtacacagcccatgaatagcctccaagggcccgactggcattgccctacagcattgccaccatttgggatgttgacctccaagtctattaggttatctaggggaatttttcatcacatccctttagttgcaggataattttgaggctatttcctgtgttgccaacgtgtgttaattttcatcttgattaaaaggcagaaaggggacattggtctctggtttctctttcttcctctctgtggctttctctgttcctgttttccctgcctctctttctttctttctttcctttttgctctgcatctgagcagcagaagagatggaaggcttaggctgccccactttccttggccgagctgcccccctgctccccactttgtgccccacccagcacttcagtaagtcgatatagatttgatattgtgcaaagttgggatagctacgtttccttgtcagagattccagacagtgcacagagcaccacacaaagaaagaaatcctcgtgtgattcacacagtcctttgctttctggattgggcaggaaaaatgggaaaacatatgctatttccccttttttccactttgtagaatttaagaaaaaacaaaaaacacttaggactttcttttaaggaaaccctccagttgggcaccgtaggttttttgatattgagtgtccaacacctgcttttagagtctccgctcttcctggccatgagaatttaacagataatttaatgttacttctggatgttctatgataaaatcactttcatactcacactagatccttgagagtaggaagagctgaattttaccaccagcctcaatcacattttatttgtgtgaccttaggcaagtttcttcatcttttgtgggctcactggccttgtatgtaaagtgaattgaatattctttcccagcctcacagggttgttgtgaggttgtcatgcaatgtgataaggaaatgatctgggaatgttcaaaaacaagccaaacactatgaaaacagggtgacaatgttgctatcatcaagttatttctaatccccaaacttaaaacctttggccttgtgtcacatttttgacactctcttttgcctttggtatttgaaaatttaagagcagctcttgtaagaaatcccaccccacatacatacatcctcaaaaaaaaataagtaatttttgaaaaataaatgacatggacttagctaaccaaattgacatagatccaagatgggcttgaaagaatcttgcctgttgtttcttttcaaaattttgatctgtgctgttattttgtttccattgtttgggtggcatgatatttggattcacctggtttttgcccatgcatgtactggagctagcagcatttgctcaatactcaaacacctaggagaagttggttagaggtccctggggatggctggcttaccgaaggagacaggtaccacaagcccagtcagcagaggcagcatgaatctcattaatcctgattggctgcatagtctggaagatttcttgcccgctcacagaaatcaatcaagacttgggggaccaggtctttgcttgtcatgtgtggacattatctgtgcctggctgagtccccacttgttgctacccaaattttgaaccaagccatttgaaaatgaactgcctctcttggttaggggccctcttcttaaccttcaaaaggcctttgccccagaaggctggcaccattgagtcaggccaacttgtgtggtgaaatgagcaaataagccaacacaggtatatgcatggtgagcaattctggaaacgggtccagtgtttgtggctgtttctctggtgaactgtggtgtggttacccctccctgtggccaagagtggagcacactttaggaatggaaatcctaaagtaaagcaagacactttcaacctgatcccatggcaaaggttactggggtagatgagtccttggctggaaataaaaaagtgccctaaggctccatgatggtggcctggtaggaaaagccctgaacttggagccaaagagtcctgggtttgggctccagctctgtcagttctccttcacaggaggcttcagtctctgcctctgtaaaatggggccacatgcacagggttgagatggtattaagtataataatggatttgaaagtgctttaattgaaaatgtacttgaggctgggtaaggaggctcatgcctgtaatctcagcactttgggaggccaaggcgggcagatcacgacgtcaggagttcaagaccagcctggccaacatggtgaaaccctgtctctactaaagatacaaaaaattagctgggtgtcgtggtacatgcctgtaatcccagctactcgggaggctgaggcaggagaatcgcttgaacctgggaggcagaggttgcggtcagctgagatcatgccattgcaccccagcctgggcgacagggcaagactccgtctcaaagaaaaaggaaaaaaaaaaaaaagaaagaaaagaaagtgtacttgactaaagagcaggatattaccattatcctggggtcacccagggaccccaaagaagttgcagcctccctcatggcatcagtttcttcatctctgaaatgagaatagtaattgcctggctcttagatcaatgaagtaaagatcagtcaagtgcatttgaaatgccaagaggcattaggaagatcagtgccctggtacattgggagttgagacttggtgataaatttaaaccaaaataatgaaaattaaccctcacaatcatttttgaaagtctcttgctttctcgggctacagattacatctctctcccctgattccccctccatctggtcagctttgcaggatgacagcctctgattggagtttcagtggtttcttgcacatgtactatattccccctaagatttagaatgcatttgagttatgtaagagttgctcctgcttggcattgtgggtaaattaaggtcccctaaaacatccaaaggccttcagatggaacattggaaaccaatgtcttggcggggggtcaggggcttccatttacattttgtgttcccctttagtcgtgggttttaagagcatctttcccagttgtatgtttatgttggttgctttcttgatttcttttgttccgttttcccctaggcccccctgtcttccccctaaaccacagaaaatgaggagacctaggcctctctcagtgtatagccataaactctttaacggcagtatggaagcattcattaaggtacttgctggggagccgtggagtccgcgaatgcacccaatgtaatggcagcctctgtccgcccgcctccctgccagcagacagccctgtccttggccaggccctgtggagctagttcctcactgcagcctgctcttagcttcagcaaggacttttcacgggagctgccgtggcttctaaccatttgctcctaagtgccctgcgcaattctcagccctgggggtagggattcagatcatgaaagaactcagggaagtccaagtatggctgaaatgccacacttcattcacgcttcattgcttcagcaactgcagtcctaacacctgagggacagtcagagaaaccccattccctcacttcacacctacatctcccaagaggagctagattgaaagcaacacagaggaaatccctgtgggtatcagtgtgtttttatacacgtgaattttttttttagttgcatatataccagcaaaggaaacacatacattttttataagagaaaatcctcccacctagttttgcttcctgttaggtggtctgggagaagggagaaaagttgaggttgtcccttttgaattctaggttaatcctttgtaccttaaactaaaaattgaagtagtttagctaggcgagtttctcttttcttttctctttggtgtaaagggtatgagattaagccatatcagatataatggctcaagggaaattaagaagatggagaagcgaagagcagcagctggggagatacttgaggaaggggagaagcactcttaacattacttagaggaagcagggaagtccctgcaactgatttgagagcccactaccttctaatgaagacactttcttcagagaagatgatagatatcaatcaggagaaaaaacaaaggctcctgggctttgccaatgatttgggggttttggaggctgctcgtgctccagctgtctacttgtgatcctcagacagggtccagcacaagacttgcaggacagcaaaagactggatatatgagtttggccttaggcaggggagggggtaagcaggaccagcctgggtcccaggactgtctctgcctgtgggctgagttctggggaagggagagtggggaaaagggcaagtggaagaccagggcccaagttgggactgcccagggtcgaaggatgtcaggggctgctgtaggatgcctaagaagaccaaagcgtagaggattcccaaaaggaagggcccatggatgcatcaggaaggaagatcaggaggtgacccagagggagtggtttactgggtcatgggagggcagggctgtaccaaaggaatcctctgtctccatcctccctcctctctcctccaagactttcttctttcatccttgcccataaaagagccatggtccatggccaagaaggggctagttactctcccttccctcaaggagtcagtagtggagcttgggcaattttaaacacaaaaggcagaaagtggaaggtgatttaggatgagcacctggtgagttatccccacagaaacaagtttaggataggcgcagtggctcacacttgtaatcctagaactttgggaggctgaggtgggaggatggcttgagcctggtagatcaaggctgcagtgatctacagtcatgccactccagcctcggtgacagagcaagatcctgtctcaaaaataaacaacaaaaaaaaagaagttcagagcaagaagagctatgagctcaagcacagtaggcttctggaggggctttgagagaaagatgggaatacagaggagaatgaaaggacagaaggaattattgaaaggaagaacagaaggaatgaaggctcagagacagggacatcctcagtttgcttaggtctttggaaatgggtgatcagtcaggatacttggaaggaatcaactcttatctgacagtacttgacaagtagatattctgttgagttaagtattttcataatagagggtcctatatataagatgtgactataaagttatctgactttattccttctgaccaacacatcataacctagtcaaccacatgagtgtttgcccctttgagacagtcaccttgggaagccaccttcttacctgaatgtgttggcattgctgcagctgctttggtcaatcttctttagagcctggagcatggcctttaccagtggggccaagactatgtattcaaatggacaccttgtctttggaatagaaagctccgtttgaagctgagctttgcgatgccattggaggtgcaaaatggcaagaggaatatgctacagtggggctgttccactggctctgaaaagagcaccccagcagcgacagcccagagcacttgagcagtggcagcgctgttggaataagtgcatcacctcctaaggggaaaagttggaggaataatactcatttgactgggaaaaaaggtgtgtttgttaaatactatttcattcattcattcattcattcattcattcattcattcatttattgaggcagtcttgctgtgtcgcccaggctggagtacagtggcacaatcacggctcactgcagccttgacctcttgggctcaagtgatcctcccacctcagcctcccgagtagctggggctatacgcatgcaccaccatgcttggctgattaaaaaataattttttttttttttgtagagacaggatcttaccatgttgttcaggctggtcttgaactcctgggcccaagggatccttcccaagggcctcccaaagtcctgggattacaggcatgcgccactgcacttggccttactattgcgttgctttatagtcacactgtactcatcacataccatcagcacagttcaataaactcatactgtgcacctactatgagctaagtggtcaatgttttacagcacagttttactgtgaaagattattaactttcagagaatgaaaaggcagtataatgtattcaatccttcaactattgagaatggaatttaattttctattataattcacatgccttctgaaagaacattgaactaagagtccccagctttgaaaaaccacacctgtgaaaagtttttttaataaaataacatcactgggacttcacaattatgatggtctagagggacaaggaagcatcccctgggttcataatcataagtaaatgttgctggagtttgttttatacatttcttggaccctacctgaataaacaaacccctttcaaaatccttgatgttttttcctcctcctctcaggcaaaaggagaactcatttttataagagccaattttgaagcccaggaggttcacctctgggacaaggggagaatcctcttcttgtttctgtaaaataagcatgacaattacctacttcatgagtttgtgaggaagattaaatgagccactatatgttatgtttctagagcactggatggcacatagtaagcactatgtattacctatgattattagcattaatgttagcatattgctcatacagcctgttcgaccaggctgtttgctcagttctgggattctggtagatttagtcagcatgtcaggtagcagacaattccagctgtcgagatgctgagaactggacagatgactctagctagaaggcacacatcctccaggagcctggatgggacaagtgctcaccccagagatggacctgctgcacaggtggaaagagccgatggcgctcccctgaaaatgggcatcatcagtggcttttagtgaaagtaaaggccccagttctgcccccaagctcatgaaggcattctgactcaacttccctttctcctccaggccttcctcagcttttgtattccttagtgccagtgtaagggtcaagaggggaggaaggagagcaaagccaagtggatacccaagaaaagcaacttagggtgtacggcagggaaacatgggaagctgtttggaatttggcatcaggtggaaacctatgggcatctatccagagggtaccttgtagacatgatcttgttagaactgaacttttcaccaagaatgtttcttgagctgaattccagagacattgttccagtggacataaaggtgtatttctctcctttttgtgggcagctgggcataacttatggggtcgtaggtagcttttgtccatgggtgcataaacagtcccttttgttgaagagaagctaggtacagggatgggaatgggtccagtccacacagttgctgctctttcacaaggactgaaagaggcccccatgtcagctggtgtctgggagggcagctaaggcagccacatgggaaggctggctgggtggcttccagaagtcccatgaagcttccaggcttgagggtggctctccccacaggccggctgtttggcaggctccccaggaccttggctggctgccattgcatttcggcgttcacggactctgaaggatctgcttactctaactgatcttattcctgcataatcttttctttttctcctgctctgctgcctgtttattttttgttatcagaggaagaagaaatgctcgaaccaggaaccaggtatttactagaaaggcccattagccccattcaccgcgatggaaactgtctttagtgctgacttccagaacagagcccaccttgcctgttgctgatgggtccatattcttgtcctgtccctgggcacagtcaatcaaggaaagaattcacaggtggggtgtggaggagccaagaacatatccaaatccatgctgtcttcacaagagcatattacatgtgcctcatggtttactcacgttgtgaggaggctaggcctttgatttggccccttttaaagaaagtttaaaagaatttgatgctctttaagtgacctggaataacagagaggtcaacaaataatggaatccaaaagaaaatgtttcccctccgccataatcatttgtggctgtagaccagtctaggaagatgtcattgaaaatacattcacatcccaggtgcctgtgttgagaattgcatctttttcagccttttagagtaaggttggcccctggatggccaatggctgacatcggctgcctctagagcttttccctgtgacatgtttactgttaaatgcagtatgcatctgggtgtttacttgtgacttcatgagtagaactggtcttcttttcttagagctcaaaatttccaccaggggccagccttgcttcccccctggtgtgcccttaattctgacatcaggtactgcagtaataggatgaggacttgatccttgagcactgagaaaatagtgttgagttgggacaaaatggagggggaggcagagaactcttcaaggccagactccagcacccccccgaggtggttccctctccactgcccaagtgggcctgccaggcctcctgagcccaggttcctttccagttgggtaagaagaagagcatttctttaaaataatcatagctatgcctttttgtgcatacagttgaagactctctattgtaactgtccgtggagactttaggattagcagttccttgcttgttttcctactaatctgatggtactaatattctggcttgagtctgtaatcggtgtttgcaatgtctttttcctgtggtggttgtcaagccccataaaactcacaatttttcttttctcaaggattcaggacaagctataccgcttgtagtcgagagctgcatccgttacatcaatttatatggtaagctggatcttgggccagtgttttcagcaatctgcagaacaggtgctaggctgttctgataggaaatgagattctaatttgtcctggaagacttcccgtcacagctctgctttggagggggaaagtactgcacacagcagctgctcttctgagtgctgcttttgagcctgtgtgttgagggatggagatcatggtgagaggatccaagacctaggaaaactggagagtagaaagggcatggacaagagaactcaaccctatagctctgtgctttgagcactgaatggagtttgccagtaaatcagctaatacggctagattataagctccatgaaggtattaggttgatgccaaagtaattgtggcttttgctattacttttgaatggcaaaaaccgcaattacttttgcaccaacctaataatgatgtctgggatttgttaaccatggtgtcaccagaacataactggtgcttatccactcgttcattcctccaaaactatatttattgagtgcataataggcactgctttggagagtgggaatacaggcatgaacaagacaggtgcaatgcctgccctgcatagcttacacttccaatgaaaagggcaaggaaattatcaagtggaaaaataaataatatcatttgagatagtgcaaatgccatgaaactaatttaaagaggatagagaatggctggaaaggagaggaggtgctttggctaaggcggtgaggagagatttctccgagggggtgatgtttgaactaagtaataccgagtagaagcagccagctatgcagtccaggtggagagaatggaggatggcgagtggaaaggcctagcatggggaggaaggtcagtgtggctgggtggtaaggagccaggaagatgggatcagagacttgggtggcagaagttcaatattgtttaattaaagagatgaagaagcatttattgaggatatactatatacaaaccaaactttgaccaaagcctgccttttgagagtaaatacttcttaaattataatgtggaaaattgttttatatagaaaaacagagatagggaaaggatcacaggctcccccattaattctcattaagatgaaacagaccttttaattccttcagttgtacaggctgctgttatgtcattactgtcatgtcatgtataagggtctcctctttgttaaggtcttgtagaaacatgtaaaaaaaagggatagttttactttaatgatttaacttctctcaagtcccagccagaatatactctggagtctagctcttcttgaaggcagaacatgtctgtgtacagggaaggaaaggtattgatacaaacttcttgaggccttttcctttaagctcaaacagaagatcacaagtgtttgaagcagatgtgtccaaggattttggccagctgtactttaccgtgaaggccatttctggagacattcatagggaacgactctgttataaaggatcgggggagaaagagacaagcaatggggagagtcactgatattcccggtagtctaatgaactcaaggtctcgtggatttactatttctttttctgtatgtttcttttttaggactccagcagcaggggatcttcagagtgccaggatctcaggtggaagtcaatgacatcaaaaattcctttgagagaggtgggtgcagagcgaccatcttaggcttgtggccaggggaagccagggtgaatattcacgtgtgtctcagagccagtggtgtgcagaagccggcctgcagtggtttgcaggagctgattgtgcacatctcttcccaacttcacatgcagtgcctttgtcctggtacttggaataagccatggctggcgtgtttacaccagagaaattggctaacactaagttctaattgttacctgccaaagagttaactgttcaacatttacctaccaccagcaccagcaccagcaccagcaccaccaccactgttactactactatgactactactgctattactactattactgcttttgggtgctttctccaggggactgcacagtggttgctgggaaagggcaccttgtaaagagctctggaatattcatgtgaatctgtaaatgatgctacattttagaattggaagaacatagaaaatactgagtggcttttaggatatcctaatttttaattttttatgcagtgtttttggcaagccacacattgcggggaagagattatacactccctccaaccctggagaggtgacctagttcccattttgatttaaacaaggatatgaaagcttattagaaatgaggtggaccactagaccaggacacatatgatacatttggtgtagcctctctgggcctcagaatccctgataggaacagatggccagtgacagtgtccaagccaagtaaggactcactgggtcaggaaacactcaatttttcttacacctctgcttttgaatattcagtgcttatctcactgctgcactgaaatggaaaatccatgcagtttcattcgaggaaatattttcaatcctgctccctgattctagaacaaaacctagcattaacaagaccataacctcatcccaggggaggaaagaagagttggaatatcagtatcccaaataatatctctgcctgcagttttccaatatttgaaaaggtcatgtctccatagtccatgccttctcaactctgatttactgccttcttctctgagtggttctggtgctgaagaccccaaccccatacccctttacttgcagtacataacatcccaaaaggtatggtttacccctgttggctgtactctgagcagacctctctgtgtgtttccacccatagaattcttcctacttattacctagctcccctaccaccccaaaggagctgcctcttgagcaaattctctgcctctcggtcatctccattccatcctgcggtggaggaagcattctgcagccccaagcagtactgccacggcccccaggcacagaccctctgtggatgtaggtgctctggcttggaaccatctgtagacaatgagatttggctgcatgtcatgctcagtggccttctggggtctaggggagcttcgtttctggagcctcctcaaggatctcgggtgcttagaaccagggagccccaggacctccttgctccaagctcctacttagtcatgtattcattcactaaacaagcatgcactgagccctataccatacaaggtaatggacaagggcctggaaatgcaatatgaacaaaacacagtcactactagtgggggagccagtttagtcaacagccagtataatcagtgcaatgatagagtaggcattggggagcataggaggccctagcccagcctggatggagtggggaggaacagcaaagccagggaaggtttccttgggaaaaaatgcctaagctgaggcttgaagagtaagagccaggggaaacaggggcaaagaaagggcattccaagccaagagaacagcatgtgcaaaggtcagaaagcaagaggtctctcccatctgcgtccatgatgcaagtatcatttgtcattgctctgagcctctcttggcagcactggacagtccaacccataatgttgtttcttcattttccccagctccttacatccctgctgccttgtcttcatttacaatgaacagaaccatagtctggaacctttgctggttgcctcctcctgggctcatcccattatacagaatgccttgtcaccctgccttgaatctcgtgggcaaactcactgcatggtgcctccagcctggcaaccactttgcctggcatttccctgcctctccatattctgtatgtaaccttgttgccacgggcaaccccaccctttccctactctggtagcactgctttttaccttcttgaatgtgattttctaaggtcagcacctcctgtcacttgctttggtgctttgcaggggtgatgtgcaatttaaaagaattctctgctcctaacaagccttgggttgcctcaggcagagcccagctgggcagagaatgtctgaactaaatctcagctgcaaaaaatattttttcctttttcttttcctcacggatgcagttggcctcactccctcttcccatcgttccaaaacgaatctcattctctcgccagcctggtccttctgctccacctgagttgacaatggagcatgctttcttctgaaagaatcgttctagtatgtctcttttataaaaatcctttcctggattttctgggttggccgctgccagatttctcacttactcttttctgttccttgatattcaccaagcatatgccctgggtttggctcctaacctggctgacactcagggccgcttcctcccacccctccccagactaaggtcttccctcttcctggccgtcagcctgcttatctctgtgtttccctggcgacggggtggcccaaatctgggcccagctcaatatttctcttctcgcccactcttcacatcccacatggtttaactcgtgactaaatttcctctccaaaccagtatgccatgtttttcctttcttcctgtattttatttatttatttagttagttagttgggatggagtctcgctctgtcaccaggctggagtgcggtggcggaatctcggctcactgcaacctccgcctcccaggttcaagtgattctcctgcctcagcctcctgagtagctgggactacaggcgtgtgccaccttgcccggctaattttttacatttttggtagagacagggtttcaccatgttggccaggatggtctccatctcctgacctcatgatccacccacctcagcctccgaaagtgctgggattataggcgtgagccactgcgcctggccagtttatttagtttttgagacagggtctctgcctcctccggttcaggtgatcctcccacttcagcacccttccatccaccaagtagctgggattacaggtgtgtgccatcatgcctggataatttttgtgttttctgtagagatgggctttcgccattgaactcctgggctcaaagcgacgcacccgcctcaacctccagaattgctgggattccaggcgtgagccactgcccccagccttttccttttatttttaaaatttaaatcctctaattcctgcagggtgcccattcttcaccagttgttaaaagggatttgggtcttgttcttccttggctctgtttttcccttctcctgagtagaggtcttcccagagttccttgcttaaggctgttgaaaggagcatggttttcttttccttgagctcctgaaaagtgataacatgttggaaatccactcctggcttattattcctaaatctacttttttttttccttctcatatgagtcaaccagagttttagttggaattctttttgttgttgtcgtcagtaaatcttaaactcactgctcaagttttgagctctccctataaatcttctggcaaaatgaaggagagagagaaaaaaaaacacatcatgaaaaggcaagaattagctactgagctgtggtttgctcttgtctcccagagggtcccccacaaacctctctaggtgccctctttgtatgcacagatgggagtgctgaggtctctccttatgtggagggggtgccttgccaaggaggcaatggctctctcccgctgtgcatatctacgcagggtttggatgtggggctaaagccatgccacgtaggctctagcacactcttgactctggatctgccccttctgagacctgtgtcctgcctcaagaagagggatggaacctggagatgctgggcggggttgtcatgtcgaggggctcgaggacctgtggccagagagaactgccctcatgagagagactgactccaagcttccagcagcaggtctgacagagcctttaagcacacactgtgtgctcagtctctgccctgggcacagccctgtcttaaagcctttggcaacgcccaggtgatctgggtaaaagtaagctccaggcagggcaattcagtaacaatgccacctccccaggacattagctagctaagtgtgaacatgtctttccttcagatttgcctggaattttagctctaattctcctcctggagaaagccgtcattcacaggaaccatccagctcgtctccagctctgggattccattctcagagccaaaactgactagcttgcagagagccaaaggcctgggctaattgaaaagaatgtttgggcagttcaatttatggactgagagccttgcaggaggaatggcaagaactaatggcgtgtgtatgtgtatgtgtgcgtatgtaaagtcaatatgcgaatcatgcttaacaacgggaactagtactaggcaacatggaggaaaatatccatgtgtttttgaattatgagaccacaggaatgatgtgtggagctaatagggaaacagcttaatatggtacagtttttgaattccttaggctgctacagggatagagagggaggctgaggaggtaaggcttggacatcccccaccccagttcaactaagacagccttgttctataagttgggatttcacaggaattttttactgagaaaaaaaaaaggttgagattctactgtaaaggatgaaaggaaggaaggaaggaaagtaggtaaatatatacctacctacataagcaggcatagatgcagacagacagatcaaaaaatcacaggtagaagaaagtgtatctctcagggattatgagaccttggagctgccagtatctgttgttgactttgtgattatgggcacactgcttcatctgccagggcctcagctctctcacaggagagaatggtggtattggaaccatgtctcccttagtgacatgcaatgctgttgtaagggttaggagagttcgtatgtacaaatgtgcttctcacttgagaagtgctgtgtgaatacaggtgatttttttggtgtgtttattttctctcttccttccctacaaagaagtcttatggaggcagcattctcacgtcctccagtgggaacatttgagagattgacctatttgatacctgtgtctgggccaccatgcatgattgttcactctgggcactgcacaaggctgcccagccaagagaacagatgggaactgaactctggctcatgctctgtacactgcaagccttggtgcaggaaggcagggggaccgttctctaattcatactgaagcatgttggggctagggaggctctggcagtgacatgtattcactttccacagaagcagagtaaaaagatccaaggatgagtttccagttctgcttttcattgcttgccagctctagaggtgctcttcgctgttcaggaggaggagcagcccattgtgtggatgtctctgaacatcaaaacagcagaaggctcgctgctgcctttcacctcccccatggaaattcacagtggtgaacctgcccagcagctctgattaaattgaaaagtgctactcccctgagataacattttcccttgtccaactggcaaaaattcaaaacactgatgatatgccaggggcagggctgtggaaaacaacattcttgagatggtgttgctggtaggaatataaaatggcatagccccagtgaagaattcgactatgtctgaaaaaactgcatatatgtctaccctatgacccagccatccctcttctgggaactgatcacagaaatctgcctctgtgcatacaaaaacacaagactattcactgtggcaatatttataataacaaaatagtggaaagaagtcaaatgttgacccctaagagattgattgtataaattacggtctgtccatgaagtagagtactttgcagcctttaaaaaaataataaatagaggaagatctctgtgaactaatgtggagggatttccaggatttcttgttaagtgaagaaagaagtttatttagaagtatactacattctgtgtaagaaataagaagatattaaaaataggcctatgtatttgctcacacagcaagacaaaccagaaacgaatgaaaatggttaaaaggtgtggaggagagaaggataagagtagggcttttctgagtgcaacttttgacttttggaccctataaatgctttgtgcattcaaaactgtaaatttaaaaaaagtatttctaaaaaaaattactacctaaaatacgaagaaaaccaagtgtgccacttaccaaattgataactacagagagtaacttttgaacatgtactccgatcatacatttttagcagctttattgagttgcacaccataaggttcacccattttttgaagtatacatttcatgcaaatcaaaaccacaaatatcatgtcaccccagttagaatggctattattaaaaaggcagacaataacagatgctgacgaggatgcagggaaaagggaactcttatatactgtgggtgggaatgtaaattaatacagccactatggaaaacagcatggagatttctcaaaaaactaaaaatagaactaccataccattcagcaatcccactactgggtatttatctagaggagaataaattaatgtatcaaaaggatacctgcactcccacgtttactgcagcactattcacaatagcaaagatacggaagcaacctacgtggccaccaatgcatgaatggaaaaagaaaatgtagtgtataatatatagtagaatactatccagccataaagaagaatgaaatcatgtcatttgcagcaacatgtatggaactggaggacattatgttaagtgaaataagccagcctcagaaagaagatttctgaatgttctcactcctgtgtgggaactagaacactttatctcatggacacagaggatagagtgataggtgccagaaggaagggtgagtgggagtggagaatgaaaagaggttggttagtgggtacagacatagaattagatagaagaaataagttctagggtttggtagtagaatagggtgacgatacttagcaacactatttcgtatatttcaaagtaactagaagagaggacttgaaatgataccaacacatagaaatgacagatattcaaggtgatggatacctcaaataccctgacttgatcattatacattctatgcatctaacagttacatgtacaccataaatatttaaaatgttatatatcagtaaaagaaaaaatgcatttcaatggtttctattatatttacagagttaggcaatcatcatcataacgttacttcagaactttttcatcctccccaaaaggaatcttgtacccatttgcaagtccctcccaatatcctccataccctggccaccagccctaggcaaccactgatctactttctgtcttctgaccatatatctcttgagtgggatacattttgaagataaaaatactaaacaataacataaacaaaagccctggaaagaaatctcaagttgtgtgtagcaggtttattgttagtggtaatattgctattaaaactgttacaccattgattgtgtattataggataaagcagatgaatgtaattattactaatattattcagaaccaatatttttatggtaagaaaaaaatgtacaaatacaaaataagtgaaggtaatgaaaaccttattgtatgaataagaaacatcagtatgaactcatgaaaaaaaattctagttctatccactgaaaggatctggaaggtctttatgactcttctgtagcaatgagcacacctaatacctagatcttggtgtctcgatatgagacaccatatttgtttcctacaaaaagcaaacagagcccgctggagaaatgtttgattcaagatctggatcaaggaaagtaaaaagtaattggggattttttttggtccagaaaacaaggaagtgctcaatggaggtcacattaaaaggacacaagaaagtatgctccctggccaaatttgggacaatttaagtattctaaaaaatagtgatggtaatgggtaatcacaattcagttaaaaattacaaaaacaagttcgtataaatgttaataaagggtgagagtgggggacaggaagacagctcttctttacaaaagaatgcctgctgatacacagagaagaaatgacataattagaaagtcaccgttttgcaaccccagtggaacaattaatttgggcaaaaatcatcactggatgctaaaaccattgggtgaaacatgttgggcactacatgcacacggtcgtctcagagtatcatcttgacacttcgagtatcatttcacagatcatacttattacaaagtagggggaaaatacctttataatgtagagatctggaggccaacaccttgacccagtgatcaaggttggcatcaccagcagcaggacagcctgacgtacgtgccttctaatgggatgcattaaggtgtccataacatcacccatgtagtgttcttgccaaaaatatttaattggagtctaatcatgagaaaacagacaaatccagagtgtgaggcattctacaagacaactggccagggctcttcagaaagagccgagattgtaaaaaacaaactagcaaacaaaaatatcggggcatattttacatttaaaggactcaagaaaaataaccaccaaatgaattgtgtgaatgttgattagatcttggcttttgaaaaaaagtctataaaagacaccatgggacaactggggatgtctgaatgtgggctgtatatgagatgttctttttgaatggttaattttcttaggtgtaataatgttgtggttacatacaagaatatccttattcttaggagaagtgtgttgaagtagttagcggtggtgtgttttgatgtctacaaaataatctcaaatagtggagcaacaataaatataaatacagaaagagcgagaaatcaaatgtggcaagatgagttgtaagcgaagggtgatgggcgttcattattttatttttacaacttttctatagatttaaacattttcaaataagttgcagggagaactttaaacttgctgaagtggggggcctcatatgtgggggagacttttcccatctgcctttcctgtggttcaggctggaccaggtcatctcttcggccatctgcacgttctctgactccttcccaagctgaaatatcatctcgtctcttgtttccactcaggtgaagacccccttgtggacgatcaaaatgaacgagatatcaattcagtcgctggtgttttaaaactgtatttccgaggactggaaaacccactctttcctaaggaaaggtttcaagatttgatatctactattagtaagtatttcccaggtgaaatgatcagttttttgacaaatcattgttggagttgagctacaggcttactgctgtgctaggcatagaggagggacattatgaaaggcgaagtgtgacgtgcatcctcgtagaactgaaagcggaaataacaagatggtttataatgaaagggctaatgggcatgtcacaccccctgggtagagaaggagctcagaggagaaccagaggaagacttggtttcgcagatcagagccaagagagagtgctgggagcagagtgttccaggaggaatgagcacgggggatcctgggaagcgcaagggacatagacccagtgggaccagccaagagggtgtcccagcctgtgcatggtgcaagaggttggaaggggaaaatggagcaaaagggggaagaccttgaatgccttgcagacattccagagcttttccccttgggtgatggggagacgtggaaggtctagaggtcaggtcagcagcatgaccagcaagggaaatgctgaaagtaagttgtctggggatttttctctgacattgctagttagttgtgagaaactattatgtttctgtggataaaatcaggaggaacccagtctagggagctgatgtcatggcaccctgactctgaggtacccaaatccaaggtaaccttttggaaatttttttaaaaaataagctttcaactttagaatattagaattttagtcatttagaataaacttttaaatttgattcacagaaaagttgccccatacccagtttcatttggggtgtttctcacagtactctgagagatatttgcagccaggaaagtgtcccaggagatggcaagagaagagggaggtttgagctcttttttattgtgtgtgtaaaagacccttctgttcctctcttccctccacactattccctgctcatctttccagacctccatactacaagctgtattctagactgcagaggtctgaccctgtctgagccctgtatcacttgctcagccagtgtttccagaaccccaaaaatcctgttcctgtacagggccctgagccaatttcaggtctaggatgacctggaaacaggggtcagagatgagatcccaagcatctgccagactttggctgataggtagcttgagaagtggtgatttattcgatgttcatttcctgagcaaccactatgtgtcaggcctgtgctgcagctggtgtttgtaaagagtttaataaaacatcgtccctgcctgtgtctgtcaggactcataagtaacagaaacccagcttaaacctgcttacttcataaaagggaatgcactgttcgggaacctggaaaacttaggtccagctggactcagaccttcacacggcatcagcagatatatgccccgtccggctctatgccagcttcactcttaggtgggatcctcctctcaggggcccccactgtgctccaggcttccctctacccaggtccaagagggcatctccctgtgggtttctcacaaccaagtccggagagtcgactctgattggttcttgattaggccacacctccagcccctccctgtagctagggagatggatgctctgattggccaggccaggatcacctgtgatccctggaatcaagagtagagctggctcccccatccacgtgggttgatataggagatgtggcgagcgaatgtttgttgctttgctctctgaggatgaaaggcacgctgaaaggcccctttatgttacagaactggagaacccagccgagagggtgcaccagatccaacaaatcctcgtcacccttccccgcgtggtcattgtggtcatgagatacctcttcgctttcctcaaccagtgagtgtctggccaaggggcccctttttgactcaggcctggcctcttttgggagggggtatcttgaggcttttgcagatgctgtttttaaaggagaacatggaaccctcctggatttgaatagggtcccccaaaagaaaaaaaacacagggggaggacttgcctttcccagatgacttgtgggtaactcctctctcctagcctctcccagtatagcgacgagaacatgatggatccctacaacctggccatctgcttcgggcctaccctcatgcacatccctgatgggcaggaccctgtgtcctgccaggcacacatcaatgaagtcatcaaaaccatcatcatccatcatgaagccatcttccccagcccccgggagctagagggacctgtgtatgaaaaatgcatggctggaggggaagaatattggtaagatgccattcctcttaatattattatcatcgtcattgttattgccattgaataggaacaataagaaacccttcagttttcttactgcttgatagtcggtgcttccatatacattttctcatctgagcttcacagcagcttcacatgagagataggtacatcagttaggattctcttggttacaagggacagacatacaactcaaatggcctttaaccaaatgggactttattgatttacttaagtaaaaagtctggggatatatcttcaggtatagcttgatccaggggctcaactattaccacaaggacttggtcctgcagtctccattccttggccctgcttgattctgtgttggcttcattcttggatagccatttccttggtggtcgcaagcaggcaaccagcaactcaagatctgtaactcactctcttagcatcttcaatagaaaaagaccctttccttcccaaatgttccaacacaagctcaagaattgtgtttcattgctgaggtttgggcctggtgaagtaatcaccttggtaaggagatgcaatgctttaactggccatgtgagtcacaagcccatctcaggaagcaggggagtgactagtccccacctcaacttcatgaactgactgtgacacttcctacccttgtctcctctcacctaggagttctcttttccagacaaagtgagctcagtttctttgcgtgtccaacaccatgtcaacaatcactagtttgggacctctgtgtgcctggtatacctggtactacactaggtcttaggagaaagattttagaaccttttcaaagtcagggctttaaaagcttccccaggctaagaccttaaaatgtgaagacaggaaaaaaatctttaaatgtggtgaagacaggaaattcaggacactcaatgacagagaccaaagcatttctactatttctttatttccaattcaggagagcacacagctatatatttaggtattacccacactgccttcagccaggtgcctacaggggagtttgttttttgattgtcaaagcattcctggacttttgaattgccttagtactgtgagcatatttgggcagctgcttcaaagaaggaaggtgttccagcctttgtgtttccttcccacatgcctccctgcatagaaatactgggtcatagtggtgtctgatcacagctctctaatctcgtttgaggcactagggagcaagtccatccctgttctgtaacagaaacattaaacagctggcaagcataatttctggacaaagagaattttcacacagtttttgcaaccattaccagttctcttttcttgctgcaatatatgtaattagtgttctgggaagggacccacagatcttcgtgtacttatcaaagaacaatatacaataaccacacttttcttaatcctatttgtttcccacgagactgtaaaactattaattacatggtaattttggagtcttcaaaaccaaaaaaggagacttggctgagggtctcagcacagtagacaacattcattcattcaacaaatggttaccaatcatctgttgtgggctggattctgtgctgggagtcagagatgtaaccaaacaaggttgacccctggtgcaggagctctgatggaacaggaaacaaatggctccagaagtggggctccctgagccgatctagggaaatcaggaagggcttcctgggggaagtgcagactgagctgagactgcagaatgaacaggagccaacccagtgaggagtgggaagacctggagcattcagtagaatgaaaagcagttcagtgtggtcagagcatagcatgtgtgacaggggaatggtgaaggatgaggctccacaggttgggtagagccaggctgtgaaaaatcttggaagccattgagtttggtcctgattcaggtgacagtggagaatttttcgtaataaaatgcatattcctttaaatggcattgcaaatgtcaactcctttgagaagccttctctgtccactctttataggtcccctctgctcttcttgtctctgcccatttatttcctgcataacactacataacataacttgcaactgtcttatttaatggcctatttacttcggttttttttcttgtccctctccctacaatgtaagcaacatgaagccaggaaccttgtccgccttatctatcattgcatccctcctaccagcacactgcctggcatattagaactcactcaatggctctataaaaaaaaactggctgattatgtgaattaacccttgcctcaagaagcttataatctagtgagggggtagtagctggtgaaattataccagcacattaacaattaaatctgatggactggattactcagccactatgcccatcatggttgccagtctactctcagtgcctgcatcagtcggggcttttgcatgcagaaagacagggcagcccttgttagcttcatcttaactcctgggatacgtcacctcagctataagacaagagagtcaggccagatgaaataactcatggtacttcaaagggttctttttgttctggcctgtggtccttctgattataaatgctggggttttaccactgccctctggatcttacagaacacgtaagcattgacagacttcaccaagaagacagctcagcaaattccagggctaggagggcactgggggagatatttgggaagcttcgcaaggaggaggctgggagtagttttctgattaggaaggtccccggagtggtcacatggaaaagataggatggtataggcctgcatctgagctgcgggagggcccagaggccaactggactggcatgagaggctgaaggtgctgtgagggtagataaccccccgcagtgagtcccattcccgtgtttccttgcagtgacagcccacacagcgagccaggggccatcgatgaagttgaccatgacaatggcactgagcctcataccagcgatgaaggtgagtgagggggatcctggggacaagggattcttcctggggcctctcacactgacttttgtcagcccaaccacagggctggcccacatagacctcttcagctttccaagtcagccatctgtccttcagaatagacgaagaccccgaaaaaccttcatggcatgccccaagtcctggcatgggcctgacacagagcagatcgtcataggctcacgctgtgttcacgacaccccacacctagcccacttcattccttaatgtgtcctgcctggcccaggtacaaatcctaagagacatgagttccctaagtagaaagcaagctctgttcctccatccttcccctttgagggtctgctctgtgccaagcctgtgctgggacttgggcacagggatgaacaagacgtcggtccttgaggaactcccagtctgtcaccagatcttgacaggttggaagtagcttctcatggtgcaaagcgataatgccagattacaggtgtgtctggtgcattgggcaccctggagatgaaatcaaagggtgatgatcctgggaaatgtgtggtgagagagagagagagaaaggccagtcaagacctttctccagattcctccaccccttccagacaaggagaagagagtcggactagtctctagggaaactggactgtgtagacaagcaatctgaaccatatgccaacttatccgtcaggcagagtaggcatagtgccaagggcccatggtacttgtagaggtccactaaaatgttttaatttcttttaaaatcagaaaaaaaatgaacacaatatccagtctggattatatttgtctttatactaatgcagttgtaaaatataatttttaactttttttttgaatggaggaagggacccatgcaggcaaaagggcctaggacccttgaaagttagaatacggcccaggatgcaccaagcacctgggatagttttcctttttaaacatcatggcttagcagttctcttacttgtcctttgtgtttcttttgtgggaccaggacacgttggccaccacatttgtcaggagagcagggcaggcattcaggtgacagttctgggaactggtaaaagagacaagactgacagatgggttttcacattctagtaggactatttcagttgctaatgacagaacccccaactcaaatcaacttaagcttaagagagagtaagttcctatacctgaaaagtcccagggttgggatggcttcaggcacagctggatccaggagcaagggtgatttttgtcagcactttgtctctgtcttcttgttctgcttccctctgtgctggtttcattctcatgtaggatcttccggtgcagtggtctctggcaattccaggctttcaccatcatcttacccaaactctcagtggaaaagggcttcctttctataatggttccaagagaggtcctggggtggagtctcattggactgccttgagtcatgcacccagtcatgatccagtccccatggcctgagagggagctaatgggtcagacccgggtcacaggaacagaaaagcaaatccagatgtcacgttcagcttgatcagactcctgagaggctaaagtcatcctgaactgaggaatgtgtcctgcagaggctttgtttggagatgtgaaggccgccaccttctgcttattcctggtgatttgcttttctctttcctcctttttttcttctgccgaccacctccagttctcccctccctctatcccttttaacagccctcaccctgtcctctccatctgttgctctttttatttctggatctccttctgtccatctctttatctctccctctagcttgctctctctctctctctctctcctactcctgtcatttcctctcctttgtcttgaccgaagcacctgccttcctgggggctgaggtccctgtcagtccctttgctggtttttccacagctcctcgggctgatgggcagaaggcttctctggacaccaggactgaagatgaggagggacagagagaatagggcttgctgggtcagcgaagaagcagccatgggactcacccagtggggcttcctccccataagaaccaccccccagaaagtgctgcctcccacttctcagggtaaaggttcacagtggcccccagaatgcatgagtcagagctttgggtccccctccgagatgatccttcttctttttgttctttgtaaggctgctggtttctgggaatgacaaaggcaggaaaaatcattctgggaaggaagaagccacagtctgggagagccagtttcatgttccctgaaggctctcaaagtatcctgtgtgtattagtggggggtattgaatcaggggcactctttggtggaaaatcaattgcattttctaaatgttacattcttgccatccctggccaaacagtggcagaatagtgagctgcagagacagtcaaggggtcactgtgctcagaaaaaagagacctggagttgaagcacagagggagtccttatggtcatgtaatctgaggcaagccacatcacctctggcctctatttccttatctataaaatgggaatgacagcaccaagcaaattatggcatgggttaaaatgaggtgacatatgtgaaggagcctagcacagtgcctgggacagggaggtggataagaaacatcaatggactctgtatcaaacagacatccttcctaatcctgatagaaaaactgagtcctggagaattttcttgacctaactggcattggcagttactggtcattggcaaccagaacctcctgatttgtttacctgtttcctcttagacatttcatttaggggatcatcaatatctgtcttctttgctcttgacagcacccggtatgaatggaatccagcaggcctcaaaggtcaaatcaggcagagaaccatgagtccaggtctttgccatgcatgaatcagccaatgaatgccaaattgcaggaacaatttagttgtttgtgtatctgttgcctttcttgtctcaaagattctgtaccaactgggcgtggtggctcacacctgtaaccccaacactttgggaagttgaggtgggcagatcacttgagcccaggaattcgagaccagcctgggcaacatggtgaaactccgtctctacaaaaaaaaccaaaatacaaaaattagccaggcatggtggcatatgcctgtggtcccagcaactcaggaggctgaagtgggagaattacttaagcccagggaggttgaggctgcagtgagccatgattgtgccactgtactccagcctgagtgacagaacaaggtcctgtctcaaaaaaaaaaaaaaaaaaaaaaaagattctatacccaactgatgcctagtctcctgtcttgagtctgataagtctggaaattccatagtgcttgctctttggtctccaagagttatataaagaaaccatggttaggccaaggatccttgactaaatgaaaaaatgaaggcagcctgtcactaacaactttattaattggaagctaaatgagaaacaagattattagattataaaaccactaaaatcagtgacagaggcatgttcatatgggtgatatgtccattttcaattataattgtgccaccattctcttactgatattttcctgaaatttttgaggttacctttgactcctccccctgttggtctgtttacaatttcatataaatggtattgtacagaatacagttgtttggctctgtcctctttcactctgcataatattctgagattcatccatgtcgttgtgtattaaggtgaggtttttgatggtattaaaatgacattagtcgatttatgcacaaacaccccagttgtggagtcatagccactccttttcttttctttttttttttttttttgagacagagtctcgctctgttgccaggctgtagtaaagtggtgtgatctcagctcactgcagcctccgactccctggttcaagcgattctcctgcctcagcctcccgagtagctgggattagaggcatgtgccaccatgcccagctaatttttgtattttttagtagagacggggtttcaccatgttggccaggcaggtctcaatctcctgacctcgtgatctgcttgcctcagcctcccaaagtgctgggattacaggtgtgagccaccacgcccagcccactccttttcaaagaaattaagaacaatagaaaaaaagaacagtggccaatttcttatacttggtgtatgctcctaatccctagtaataaacatggtaaactggcttgcggcatttggctcaggccttatacctacgaaggaccctgccttcttcttaaaaccactttattgagttatagatcacacaccacacaatttacccttttaaagtgttcagctgagtgatttttttgtgtattcacagatatgtgcaaccatcaccatggtcaatttgagaacattttcatcatcttgaaaagaagccctgtaccctttagctatcactccttacgccctcccatccctaccccccacatttctcccagccctagtcaatgcaactgtaagtctacccactgtctctatggatttgtctattctggacattttatataaatggaattatataacatgtggcctttctcttagcacagttttctaggttcagccatgctgtagcatgaattagtacttaatttttgatggctgaataatattccatcacatgaaaatgccagactttgtttatccatttgtcaattgatggacatttgggttgtttctacttttcagctatgatataatactgctgcaaacatgtgtgtgcaagtttttgtatagacagaagttttcatttctcttgagtatatacccaggagtggaattgctgggtcatatgctaactctatgtcagtcatttaaggaactgccagactgttttccaaaatgaccgcaccattttgcaatatcatcatcagtgtatgaggattccaatttatccatatccttgctagcacttgttactatctgactttttgattcttgccatcctagtggatgtgaagttgcatctttttgaggtttggatttgaatttctctgatgactgataatgttcatcatcttttcatgtgctttttggtcacttgtatatttttcttcagatcctttgcccatttttaaatttggttatttgtgtttttattattgagttgtaacagctctttatgtattctagatcataacagctctttatatattctagatctaagtcccttatcagatatacaatttccaaatattttctcccattctgtggcttgcctttttattggtgataccctttgaagcacaaaagtatttcattttgactgagttccattcatctattttttcttttgttgcgcatgcttttggtgttatatctaagaggcctttgccgaatccaagttcatgaggatgtattcctgtattttcttttaagagttttagagttttaggtcttacatttagatctttgatctattttgagttaattttggcataaggtaatggtcaaactttattcctttgtatgtggctctccagttgtcccagcacgattagttgaacaaaattattcttttccacattgaatggtcttagcacccttgttaaaaaaagtcctttgactacaggtgtatgggtttatttttgaacttgcaatgctattccactgacctatatgtctatctctgtgttggtactatactgtcttcattactgttgctttgtagtaagcttcgaaattgggatgtttaagtcctccaactttgtccttcgttttcaagattgttttggctattctgggtttcttgtgattacatatgaattttagaatcagcttgtcaatttctacaaagaagttaggcaggattctgatagggattgcattaaatctataggtcagttggaaatatcaccctcttagtagtgttaagtcttctgatccataaacacaggatgttttgccaattatttagatctttaatttttttcaacaatgatttgtagttgccagagtggcaactacagagtgccttttatccttttgtcttgaaaggatattagattttgtcagtgctttattcctctgtattttattctttttatgctaatgtaagtgaaattgtttccttaatttcacttttgaattgttcattatgagtgtatggaaatataattgattttactatactgctcttgtatcctgcaaccttgctgaacttattcatgcagtcaaatagtttttagtgatttccttatttttttaatatataagattatattgtctatgaatagatatatttttacttcttttccagtttggataccttttatttctttttcttgcccaattggcccagctagaatctccagtacaacactgaagtgatgagagtgaacatccttgtctaagtcctgatcttatggggaaagcatccagtatttcactgttacgtatgatgttagctgtgggtttttcatagatgccatttgtcaggttgaggaagttcccttctattcctagtttgttgagtgttttatcttgaaaggatattagattttgtcagtgctttttcttcatctattaagatgattgtgtgatttttgttttttattttactgataagatgcattacattaattatttttagatgttaaaccaatttggcagtcctgggataaattccacttgtgcatggagcatagttctttttatgctactgcatttggctcgctagtgatttttttgtttgtttgtttgtttgtttgtttgtttgttttgagatggaatctcactctgtcacccaggctgtagtgcagtggcgcaatcttggctcactgcaacctctgcctcctgggttcaagtgattctcctgcctcagcctccagagtaactgatattacaggtgcccgataccataccaggctaattttttgtattttcagtagagacaggattttgccatattgcaggctgatctcaaactcctgacctcaagttatccgcccagctctgcctcccaaagtgctgagattacaggcatgagccaccgtgcctggccgggtttgctggcattttgtagaggatatttgtatccatattcataagaaatactggtctgtagttttcttgtgatacctttgtctggttttggtatcagggtaatacttgcctggtgaaattagttgagcagtgttcccttctcttctagtttttggaagactttataaggaattattactaattcttttttaaatgtttggtagaattcaacaatgtagccatctgggcctgggcatttatttgtgggtagttttttgatgattgattcaatctcttgttataagtgtattcatttttttttcttcttaagtcagtttcaatagtttgtttctttctaggaatttattaatttcatctaagatatccaacttgttggcatataattgttcatagtacttctttatgatcctttttctcctgtaaaataatggtagtaacgtcccctctttcatatctgattctaatcatttgaatcctctctcatgttttcttggtttatttagctaatggcttgtcaatttcattgatcttttcaaagaaccagcttttggtttcatgattttctctattgtttttctgttctctattttattaatttctgctctaatctttattatttccttccttctgctagctctaggtttagtttgcacttttttttccagtgtcttaaggtggaagtttaggttattgatttgaggtttgggtttttttccctaatataggcatttacagtcatacatttccttctaagcactgctttagctgcatcccataagttttgatatgttgtatcttcattttcattcatctcaaagatttctcttttgatttttttcttcaaccactagttatttagcagtatgctgtataatttttgcctatttgtcagtttcccagtttttttcctgctattgattcctactttagaagaaacttcttctatagaagaaatcaataattttatcctactgtggtagaagaacacattttgtattatttgtatgattttgaattattgaggtttgttttatggactagcatagggcatacccaagagaacgttccatgtgcagttagaaagaatgtatagtctcttgctgagtggtgtgttctatacatgcctgttaggtctagttggtttatagtgttgtttaagtcttctatttcctctttgatcttctgtctagttgttctttccgttattgagaatggggtattgaagtctctaacaattatttttgaattttctatttctttctttgtttttgtccatttttgcttcatgtattttgctgctcttttattaggtacattttgtttataattgtttttatcttgatagatcaaaatttttatcattatgaaatgctgccatttatctctagcagtatttttagttttaaagtctattttatcgatattagtatagtcattctagctttcctgtggttccagtttgtataatacatttttccatcctttcactttcactctaattgtatctttgaatctaaagtgtgtcttttaaattattttattttatccagtctgttaatctctgcattttaattggattgtttaatccattcacatttgatattaccacttatatagttggatttttgtctgccattttacttcttgttttctgtgtgtctcatatcttttttgttcctctattccttctttaccgatttcttttgcatattttctaacatagcatttagtggatattttctaatatagcatttaaacttctttaatgatgttttcactatatttttgagttatttttagaagttttatttaatttttgatggacagataattggacatatttattggatacaatgtgatattgcaatacatgcatacgttgtgtaatgattagatccgggtaagcagtatattcatcatgttgtaaatatattgtttctttgtggtgtgaacattcaacatctcctctattccagctattttggaacatacaatacattattgttaactatagtcaacctactgtaaaatagaacaccagaacttatttatcctaactaactctaacattgtacctgttgagcaattgctccccatatcccctccccttccttcctagcctctgacaagcagtattctgctcttactatttttgagttattttttagcagtttctctaaggtttaccgtatacatcttatttgaatgagcttctatttatactagcttaatttcagtgacatatggaaatactgctctgtgggatgacagtggttttggtagggttctccttccctgagatgccagtgggtttggtagaagtctctttcccggatcctttccggctgttaatctctactaattgctggatgattgctattctttcagcagtgcccttggtcctaaattgctctacagattaatgcagtcaaattctgtccccattatagggatagtttctgaagtcaatgtttgatatttgttctgatcccaggagttctcctggctgtcttattccctggttctcctctgctaactatctgggttatagtctagcttctatattcgttaaattcatgaaccatcactggattgcccttcaacacgacctccactgttcttgagagtccccttcgacttgaacttctccaagctctgttgcaactgaagtcagttcctttgggataagattaggatctgtctgttttacgggatggttctcccccatgggaaaatctctgagccaggactctgagactggggatggagacaatggcatcttctgagtgatgtccccactgagtgctttgtggaggggcagccagagatcctcttaacttccctctcctgccatgcaaccaccacctcacaagctggggcaaggttgatagaacccccacattttcagtggtgccatgcccaaagtacagccaccattccatgagtaggggttgtgtgaaagaatgaagccctggtctctccactccactcacctgggacttagcctcagcaacaggtagtgggagcaggatgagaatcactgagctcctgctccttccaggaagaaagccctgtgactagaaggtggtaaagggagaggaagccctgtgtgcttgactgcagtcatctgggttggagcctccatctccccaagcttggagcaggagtagagggagggagcagtcttggttcgagtaacagagattttcacctttctcactaaatttttatagattttcttgaatagatgtttcttcatttgctttttgcccttaggaccatttccaggggcttgaaatatttctttttctttttctttttatattttttctcgagtttccctggggagctcttcatgctgtcatcccagaagtcggtctcactcctttccttttaaattaaatctaaatctcaatatcagctggtgccaccaccgaatgcaaagaaagaacccaaggtcatgagtgagaaggggagaaaagagggaccctgtaaacaggccctggcttctgtcattactctcatcacagggaggatgacggagaagagaaggtacacccacattctcagcctttgatacggtgacttggcctctagtaaactggttgcatgagattagtgttctcacttctggggatgaagtagggggtggggtaggcagagggacataagtggtattgagaggaatggagccatcccctctttcatgcaggcaggactcatgacctataacagagttctctggaatggcatggctagagggagggatttgatgggtagagaaggataaatgtccaaccttcagattctgaaataaaagcaaagcttcaacatgtcttttcatctccggaaaagcccatgtctagcccatgctagttcagaggctgcaccagtgtagccgtctctgaaccactgctgcctccatcctttcccctccaatccctccactgctctgctttgccactggagtgattttcctaaaatgtgactgcagccaggcccctactgagacagtctcaacctctcctctagctcaggggctgggctgttcatctcttccctcactgtagagcccacagggtttttacctggtacaattagcctctcaatacacaggagttgaattgcatcaaacacagagcattgtatatctatatagtcaattcacactgtacagatgcaaagaccttgtggcaggaataagcttagcacaattcaaaaacatctagaagcctctattaatgatgtctgggacctgagctcagatgttagctcatcactgtatctactggtgtgacccaaccctaggcccatcattcaacccagcttcagttccctcatctatgaaatgagggtagtgcctcaaatgttgttatgggattaaatgtgataatgtaagtagaacacctggtaccagtaaaagcttaatttgttcatgcaagcaataaatatgtattgagtgcctgtttgtcctagggtctgttctaggagtcagaatacagtaggaaagaaaagaaaatctctgtcctaatggtacccacactttggtaggaaagattgatagtaaagtttcaaaattatatgtgtgtatatatacacatatgtgtatgtatatgtatgtgtatatatacatatatatgtatatatatacacacacacccataccacaaacacataaatacacacatcatacacacacacataaatttcaggttgtgataagtgccatgaagagaaataaagcaagagaaggtgttagaaagtgatttggcagttggggctcttgtagttgggagcggctgggaaaggccttggtaaggcaatgacatttgagtacagacctgaatgaaattagcaaacggcacatagcattaatacatatttgttgagtgtggatgaatgcaaagatctgggagaaaggcatcccagggagaagcaataggaagtacaaaggccctgtaaagggaagacacttgtctgttttaaaagcatcaagaaggctctgtagctgggggtggtggctcacgcctgtaatcccagcactttgggaggccaaggcaggaggatcgctcgagtccagaagttcgagaccagcctggtcccccaggctgtagtgagacccccgttgctacaaaaacttaaaaaattagctgggcatggcggcatgtgcctgtggtcccagctactcaggaggctgaggtggaagaattgcttgatcctcaggaggttcaagttgcagtgagtcatgattgcaccactgcactccagcctgggtgacagagtgagaccctgtctcaagaaaaagaaaaaaaaaaaacctctatgaatatttatgctgaagtgtttagagataaagtatactgatgtttataacttaatttaaaaatcattaaaaaataagacggatagaggggtggatagatatatgataaatctagcatcgtaaaatgtgcatagcggaatttagttgtgttccatgcatgttcactgtgaaattctttcaattttactttgtgtttaaaaaatgtcatactaggatgttggaggaaaaacatcaagaagcttagtgaggcaagagcagattgagctagtgaaggagagagagagacagagaagatgaggtctcagaggtctctgcgattgggatcctggagggccttatgagcagtgggaagacactgggattttgttccagcatccatgggaagccttctgaggattttgaacaggggagtttcatgatgtgattgtatgattgtaaaggaccctctaggctgctgtggggagaagcggctctacctaagcaagtatggaagtgaagagggtggcatgggaggtggtgagccatggtcagatccaggggacactctgaaggagtcgctaatggatgaggtgtgcagagccatgccagggcattggcctgggtgagcaggtagacagcagttctgtttcctgagatggggaagatgagggaatgaagtaagcttgggtaacagagtgtgggagagtgatgagggggagaaacatattctgtttcaggcacgagaagcccaaataacagacttagtaatcaatgggagctgttattactgtttccaccacacacacttatgtaacgacgtctgcaaacacacgtgctttctctgagctggaggttcgccctgttcctcctgttttctttccctcacattgtctgctccccctgctgccccactctttcaacttcaggctgctgtccagtgactgctggaggctctggtgatggtaaaggcagaaaccggaggcagcccctctgtgcccctctgagtatcagaaaacctctgcttaggtcagcgcctttcttagtttggggaatctgggtcagaggaagtccctgggcgaacccaggagcacgcagctgtctgggctcagctcctgcccttgcaaaccctccggcctttctgactcttgtaacgaggcaggcagatgggctagcaggcagttccagcacacggccggatgtgagattcaaagatgctgcagagagagggaccaagatctctgtttgttttactgagaatgtgactctgagtcaagatctgagttagtctgacccatttagtggtgctgtcatttccccacctccttccctccttccttctctcccaacacccaggttagaatagcatttaaagacatttgtcgggtagctagctggggaagctgacttgactgtttgaggcctgctccctgcagaaggctgcctcagtcactaagagctaaatacatcccaaagccactgcatctcatggggacacaagcatggtcttcttgagccagttgcttccagaggggagccctggtgcatgtgtgtggtggggagtgatggggagtgaacaagggagtttcctcctcctgctctttgattttccatgccatccgtggcccttagaagtgcaccagcctctggtaacaacatgtgtgtaactcttatagggtactatgtgccagacactgttgcaagcacttcatgtatattcactcacttaatccttctaataaccctgtaagataggttctatttattaccatttccatttaacagatgaggaaactgaggcacagaaagaaaaactaagtatcccaaggtcacacaactaaaaaatggtaaagccaaatgttctgagcttaactgtgtgatggacaggtggatgaatagatcgatgaagacgagattgtccacagtgaatggagcagatagagagccccaagaaagctcagcatggagaagctatctacaggctagagagagggcaggggttgcttttgttactcttctgttctattaaaataaaaaaaagtaagaattataatgttaaacctctttgtgcttactttaaaatattaaaacattaatacctatacaaaatcagttttctaccacatatggacacttcttagggtagaaactataaaacaggtggaataaactgtaggcacaatcccctgctccccaaaacgtctcttccccaaatatcactagttgtatggtccttaaaccatgcagtttaaaacacttaaactctctgcagttcaacgtctcttctctggacgcatcccataggccaaatccattaataattataatcacagtcatgacagctgctgtcaaccgaatacctcatgagtatctgtactaagctatgcccttttgtacaagaacttttgtttgtttgttttgagacagggtcttgctctgtcacccaagctggagtacagtggcatgatcatggctcactgcagcctcaacctcccaggctcaagtgatcttcctgcctcgggccctagagtagctggcaccacaggcacgtgctaccacgcccagctaattaaaaaaaaatttttttttggaaatgaggtctcactatattgcccaggctggtctcaaactcctggactcaagcgatcctcctgcctcagcctcccgaagtgttgggcttataggcataagctaccacgcccagcctctgctcctcttataaagacaccagcactaggattatgaccccaccattatgacctcatttaactttaatcacctcatttacattaattaaagcctctaaaatacagtcacgttgtgggtgagggcttcaacatatagatttgaggcagacacagttcagtccttaacaatgagctttgaagggtctgggtacccttaaaatcctgtatcggattttgcagattagagtctgcatacatgatgtggcctctcaaaagattaaaaattactaaaagtattataaatgacaaagaggaaaagggtgcatagaaaaatagaaatattaatagaacttgtgttaaggggtggaagaaaacgaaaattctacaatattgtcttaatgagcattaaaaagtagagaacaagaagggcagtggaaaaggagcatgtatcagctccctctttacattttgagggtttgatggttttcctgaggttgcagggtggagagtggatctgaggctaggaccccagggtcctgagccccagcccaccaggcgttctgtccatgttctcaccagctgtgcagtctatccttccccagagaagccagggccatctgagtgaggctcctgagctgccactttgctgacctcagagacgctttttcccttgatttccttccagaagtggagcagatcgaggctattgccaagtttgactacatggggcggtccccgcgtgagctatccttcaagaagggggcctcgctgctcctgtaccaccgcgcctcggaggactggtgggagggccggcacaacggcgtggatggactcatcccccatcagtacatagttgtacaggacatgtgagtggagtcgagacttctgtgaagaatgccgaaatagattagtgatgtctgggatgggcaccgtaggggagtgctagcttgtatgccagcaatttgctctccttgatatcatacgcttgttcttctctaacaatgggtaatatctaacttccctttaaatggtgatccacttaacggatatccaaattcctccttctgagcacacagaaacggtgttgggtgcctctggcctacatcctgatgcagctgacagcccccagggagtgccatcacccaccagggctctcagtatccaggggatcctgccatgtgcctccacctcctaggcctcccctgcctacggttctacactccagaggtagctctcttaggggatgggcagaaacatgcccttgtttctgattaatagggtactattttttaaaaaataatttcaggggttaatgaaaaagagccctgcatcccaaatgcctagtcctaccacaaaaagtctgcactttccattcctttgaaagccatggaagcttccagtgcacaccttccttgggagctctggtcaggctcggcagaacagatttaccatagaggcagccaccaagctgagcctcaagggaaggggatcaacagcccacattgtgatgggagagagggggtctcagccagagaaaaggccagggccaagcagactgccagaggaatgccatagtggagggcccttggcagcctcccgaagtccccagacctctgagatcagggacaagtcaccacagcagagggccgtggaaggaggccggcagggcaccccaacaagcttgggagccacctcacagtagcccaagccctgggtggggaggtgaggggcagaggcagcttcttcctcccttgcttagccagaagccatttctcatgaagtcacacagagactcagcactcagccctcggtgctcagcctgcggactccatccccccatttctccaacacaccctgcagcatttagcttgtcctagcctggagctgcctgggaatgaacaagctagaagagaaaaaaggaggaggtaggtgtgggacagaagagggtcccagctgcggaaactgaccaggagtgttgcaatgggcatgcgtggtgggaaggcacccagtgggcagtggcctagcaagcgctgtgggcacaaagtaaccataagttgtgttaattcagcccctcagacacatatcagggagctctgtatatgctgggttctttgggggaaggtgcctccaattcatgtctgtcttctccccagggatgatgccttctccgacagcctgagccagaaggctgacagcgaggccagcagtgggccattgctggatgacaaggcctcttccaaaaacgacctccagtcccccacggagcacatctcggattacggctttgggggggtgatgggccggtaggatatgcggattcattttttccctgctagtgtcaatcctgttcatgtctgatttgggagaagcacaagggcagagaggagagaaggagcctactgcagccccttgttccccacaaaatgaaatgggcacactgggcgggctggctggcattggcccaagaaggccaggtatagaaccatccagcctgtgttgcagggaggaggaggaggaaagacatgtgttgggaacccagtgcttttttatttaaaataataataatgtgtgagagagatacaaattggcaagtatttttcctacctgtgtccagttcctgcacctccttccagctttctgttgtagaactgagttgttatatttaaaaatgtaaagctcacatattccctgaaacgcgctacataaacagaaaactcacacctactcatgtgttgaaggaaattgaccctcgactccacccacttatttggagggagcagtattaccaatttcttcgctccctatgtgtgggccaggctgtgtcacataacctttctaccaggcaaggagctgtgcatgtccttctgagaacaggtataatccaaagtatgtggttattttttaaaaaattaatgaggaaataagaagaaaagaaaagaaaagctgacagtttctcactgcctttttagtcacactctcaaaatgtcatattctatgttttttccagtggaggggtcatgtggtcagcccacacatgtaggtatttgcagatagaccccaaaaaaatcagtcacagtgggaacacacaatttatgaatttatttcagcaaaaatcctgatgcctcttttctgcaaattccattcagttcagcagatagctcggggcactgtggtggaattgagaaggtcagggaagtggaaggctggcgtaggtagacaaagaagttatggtcccctgacttctaggaggaccatatcttctgcctctcttttcctctcccttgtcccccgccctcacctcctttgttcttgttctttctttctaagtactgcttcctttccaatacctatgctttggtcctgctggggcacccacaagcactgcttagcttggctggtggcactaggatctgaatcactggtggtccctagtcataatccattcccaacacacggtccctctccctctcccctcaccacttctagcccttcagactcttggtgacctctgtaggatgcagccaaatctcctgtgtatagaacctcttatcttcaaggtgctttcaaacccacttgaagcaaaggtaaagggtgggcaaaggatcttgcttaaacccgcttcacagattaataaagtgggcttgagagaggacacaggaaagcacgcggcagacacagggcaagaactcaccttcctgaaacacaacctaatccccttttcaccacaccagagcctccctgaagtgggaaaggtaccaaatgcacaaaagggctgtccagccatgcagtgtttactcttgaatgactagttttccaagatccaaaaaagcctcgcagaaggagccctcttctggggagattgggggttgggtggcaacgttagagtgtcttcagttcccaggggaccccaactgtgcttgcagggtgctggtaactttggtacagtcaagcctcaaagcttcagaccaattagaagcccctcagaatcatggaaatgtctgaactgcttcagagggtatcatgagcccaactaaccatcaccaaagcgtttccagggttggaatcctgtaggccttgacttagcatgtagaccagatgcattttgcggttggcggcacagctgtctgtggcctggaagcaccgtgctccaaatgctttcatgtttacagattagacctccccctgctgctgagctgtgtgctgagccagctctttcattatggaattgtagggtctggctgaatgaggctttactgtacccgctccttagactagcgtgtagtgtgtggcatggggttgactcacccattctgagacttgccaggcttgacctctgccccatgcccctcgccccctggctcctttgcagagtgcggttacgatctgatggagcagccatccccagacgccgaagcgggggcgacacacacagcccgccccggggcctgggccccagcatagacacaccaccccgggctgctgcctgccccagcagcccccacaaaatccccctcacccgggggaggatcgagagccctgagaagcggaggatggcgacgttcgggagcgctggcagcatcaactaccctgacaagaaggcgctctccgaagggcactcgatgaggtcgacctgcggttccaccaggcacagcagcctaggggaccacaagtccctggaggccgaggccctggcagaagtaagggccagcgggaaggcaggctgggcagccaaaagccccagagggcagcgggtgggaatccgtggagcggggagccaccttggcctttatgccaggctcatggctaagccagagaacaggagagtgagtggcctccccgtcccttgctgggcttcccgtgggagtggagactggttgggagcagccactgctagggttccgatagaggctgaacacccccagtgtccagggctggagagggcattggccagattatggggctggggtaatggcaggtcactacacaaaatgatacgattcagtttttgactcattcattcactcattcattcatttctctcttcattcatcaattcattcactggcaaatattgattgagcatctatcatgtggccgtcaccatgctagccaccaacagtaaaatggagatctaaaatggactcaggccctgcccacatggagcttacagtttagagaagaaagagacatcaacaaacacacacacacagttgtgaaatagttgtttggttgggtgcctttaaggaatggtccaaagtattttgagagcctaaaatgtgaggattgcacctaggcagggagagacttctctggagaggacttgacctgagacccaaagggtgggcagagctaaatagccgaagctgcaagagaagaatgttccaggttcttctcaagtgcttagagggttggcttttgtttgtttgttttgtatttggatgaaaaatctatatgatttttacatttgccaaatgaatagaactgtgatttgtttaacagtttgcatagccggtttcatgggttttttgacagttctatcatattttgagaagtttccattttttttgtctctggaatttggtgtgggggcccattatgtaccctctccctagtgttctctcccacataaggtaacagagacaatcagaaccttctggtctgtgagaattttactgtggagagtagcctttgaatcgctgttcaaaaggagaaggaagaagggcagggagtcatgagctgtgttctagaggaggccaggcagggttcccagggaatacacaacacagaaacagctcacctagcaatgagtactcctgttcacaccagcaggctctagtttggccccatgcccattcccaggggtccctgaagatcagtgccttccgaggaggcatgccagctgctggtcccccccatacttgaggaaacatcaccctagcacccaccatcatctggaaactctaccagtctagaaagttctaccagttatgatagaggatggcctgaggcctgccccagggccctttacatttataaagaatcaaatgcagtctagaaaactgtttctaaaagtagctctcacagcagattagtcccacaggatgctagggagtgggtagggaatacatgttctgtggtcagcaaggtttggggaatgctgctctgacaaagttgagtggcttctctgtaagacttataaaacctttaaagcaggcacccccagcccccgggccatggatggatctgtggcctgttaggaaccaggctgcacagtaggaggtgagcagcgggagccagcattattgcgtgagctctgcctcctgtcagatcagcgggggcattagatcttcacaggccgtgaaccctgttgtgaactgcgcatgtgagggatctaggtagtgctctcctgaggagaatctaatgcctgatctgaagtggagcagtttcatccgaaagcatcctcctgaccccccatctgtggaaaaattgtcttccacgtaaacggtccctggtgccaaaaaggttggggactgctgctttaaaagatgtgcactgtgaatctccaagaaagaaaacagggcatgccccatatcccagacttctgtgacctttattcatggagcgttttgcacgacctgcccctggaatgcacttggggcctgctgcatgtgttctcagtttgcagatggatctgcaccctgtctagtttgacagctgccatccaagaccccctttcactaacagaggtcaaatagggaattgtagtaaatgatatgtaagtaacccactgccactggagagtttccagcctcagcattggctctgatgagcccttgactttgcaggctgcaaaggggagtggcagctgaagaaccccaggtagtaggccgagtgacccaaatttctttggtctcaaaatgtcccttaggatttagatgtgaacccacttaaagaggctgtttggggaacttgcaacatgaccatccaaagtgggaagatcgaattggggaggagatgaaaagcaatcacggtccccactctgtctcccagggcctctctgccgctcagctctggagactcacagcgccacctctcggactaatgcaaggctgcagcctaaacaactcagctgatctttctctgaacttcctgtctttctgcttactctgctggggtagagtggtggggcgggtggggatggtggtagaggggcagtaattacattttatgtgttaaagtttcaccatgcagctcatgctggactagagcaaatagagagtagtgaggtcaatagggggcttccttcaagcggagtggttgatgatagggcggctcggctccaggaaagccggctgtgtcactgcagggctggcacatggcagagatggggagaggtctgccttccctcccttcctgcagaaaattgcccccacagcgcctccttttggataaggcacaaaacaccctttcttaaagttgccggtgttctggggcaacggatgaaacatcctggagaagcgtacaagctaatattagccattagccagacatccatagtcccctaacaaaaaggacaggctgtgacaatgcggggagcaagagctctgggccctgaccccagccagattgaagcctgccatgtggcctagggcaggcaggaagccacctgcagacaggggagggagagaatgtaaaagaccagggtgcagaaaggggccggccccagcatctccaggctccaaccccaccatctgtttcaccagactcatactttttatttattttttttaggatttgcaataaagcaagcctgtcttaatagtcatcattcctccatgaggttatgcacggcacctaccagtggtggcttaggcagtatccctcatggtgccctcgatggccaagccagctgggctgtggctcagctgagcctgagcaggtcctctcatgtctgtcggatgcggaggcatcccagtcaacagtcatgggaacccatggggctcttgggctagaaggattttgaaaaccaccacctggcagtttacaaagcttcatcacatccattatctcaccccatattcacagtaaatgtctgggattgtaatagatgaacaaaatatggtgcagagtgattgagatttgctcagggtcacacggccagcaactggccacagattctttttactcaaaagtccggggccctgtggcctgtcccagggctcttgggttaaatgctgccttccagctacagcaccaccttgggcatgaggggacgggagctgagggaagctgccctgtggcatggtgagcccgggctgccctgggtggcagggggctcgctctctctgagtccttcagagtgctcaatcagagtgctctcctcctgatgagctctcagatattataacatcctcgggaattatgtaggcagaagaagatttttctggcctgttaaaatttccactttttaaaaaaattttctgattataatacagagaagagagtagcagtccctctattctgggatgtgcgctgtgaacattctgatacataatctccaagaaatttttctgtgagcaaggatttttaaaaaaatactgaactgactgggttcagacttgggctatgctgctaattagctgtgtgaccttgggcaagttacttaaccagtctgagcttcagtttcctcctgtgtgacatgagcataaaggtagttcctaccttagaagtgtgaggattaaatgaattattagggggcagggtttggattggtgctcagtgttagctattattgctattgctattgtcattcgtatttttgagtgcttactctgtgccaggggtcaggccaggctcttcacagggactgtatcatttaatgcactcatcaactccctgaggtccatattataattatctgccatttacaaatgaggattctgggggctcagagggatgagggaacttgcataaggtcacatagcaaggaagtggcagagccaggatttgaatccgtgtctgtctgactccagagcctgccctctttatcagtagtctgacctgcccttatgaaatctatttcctgtgcaaggcagcatgcaggggatatccacattggttctcccatgtggttataagacatcctgaggacttaatctccatccctgccgcgaggcttctggggaacctgcctacgaagggaagctgcttagcagacaggaaggacctgactccaggtctccagactgtgctgaccccagctccctctgtccccaggacatcgagaagaccatgagcacggctctgcacgagttgcgggaactcgagaggcagaacacggtcaagcaggcgccagatgtggtgctggacaccctggagcccctgaagaacccgccaggccccgtcagctcggagcccgccagtccccttcacaccatcgtcatccgcgaccccgatgccgccatgcgccgcagcagcagctcctccaccgagatgatgaccaccttcaagccagccctgtccgcccgcctggctggcgcccagctccgcccgccccccatgcggcccgtgcggccggtggtccagcaccggtccagcagcagcagcagctcgggcgtgggcagcccggccgtgacgcccaccgagaagatgttccccaacagctcagcggacaagtcgggcaccatgtgacctgcaggatgggccgcgccgccgtggcccgctgtggctcaccacggcccagggtggccttggtggcttccacgtgcttcccagtgaccctggccttggagggcagaggtccgtctgggagggtgtgtctgtgcagagctgaggcccgggcgctggctgcagctcacgtccagccatgggaatcccacggacctctcgcgtgtcaacagacgaccagaggagtgctggagctccagcagccccaaccacagcattccctaacatggaggcaaaataccacatggcttctcccgcatatcgtcactggaaacttcctctctcgacattctctctacatacgtatatgtgtgtgtatatcgatgtgtgcatatatacacatgtatacgtatgtacgtgtctgtaggtgtgtgtatatatatatatatttatgcatctatatacatatactagatctggacacacgcatactaagtgtatatagtatctcctttttctttttatgaaacttagatttacctcagatccatgccaccaaacatctcccaccgagttatttggtgggatttgcagggacttttctgggagaacttaaaggcccatagtaactgcgaatgaagcaatataccactaacctgcagaaaaacacaaacaaaaacagactcccactgtctccagaagtcgtggccttccagaacagtctgcccctcaaggaagggtggggcaggcagtacccccaagcaggctgctcccagaggtggggaacccttcataggaaatccccacccccgtccaccccagagaccctgcccttccacccggaggccaaaggccaactgtactcccaaaggcatgggagaaggttggcgagaagacccctgactaccacatccttgtgtttgtgtgtagagacgggggatagtgagaacctaagccccatcgtagcacagtattacatgtggttgggaaaaataaaaatacagtggtgtggaatactccaaaacctagaaatgctgtaggaataaatctgtggtaactatagaggtttaacttatatcattttcaaactatttaattttttcttttcctggttctactaattatactgtgtcagatttggaactaaacaggcaaggaggctttgagtcacatcgttttcattttaaatcaggctgtgatgcactgtggctggtgccgtcttgcatgaaacgcatgagccgtgagcgcccagttcagactggggccagggaggggcagtccttggcactttctgtcctagaggacactgtcagttgagttaatacaagtgacatagcttcccttccctcccccttcacccactccctccagaacatttagtgtagatgaaaatgtggtgatagaaatgggtgcatgatcttcacgtgtgacagccaggcctttgcctcttggccaagtaaagcccttccgggtcgctctccttcgattccattttacctcctcttctgatcacttccagagatgagctgtttctggataatggcacacgggcaaatctgtgtgccctgtgggccgctgttacttaccctctcctgcgagacccaggggcttttccctactgttcccacgcttcctctctctcgaggccactgaagtttggagtcaaaaggcccagagtctgagtcccagccctgagcacttaggagccttctgacttagggtttgtcactccacctcattgagcctgactgttctgctccataaaatagggtaataaaggtcaaacatcagtgagcaagctgtgtacactggaaaacactgaatcaatacaatgcgtttgtgattatcattagtaaggtaagtcttagatcagagccctccagcccttctttttgaaacctcccaatggcatttcagaagtgagcagtggaattttcctgccatcctaataagagccctggattccatcattaacatttcagcccattggatgaagtggtgccctctcctctggtcccccgcgaaaaggtaaatacacccaaagggagggacctagttaagtcactggcacctagataagttaggagggtaaagccactacctcgtctgaaggactggacttgacaccccacagtggaagggagcatcaggagaggaacaaaaaaagggatctcagggagaggccagtgtcaaacttgacctcccttgtttggcctagaatgaacccttctctttagctcctggatatgaaaggccatctgcttggagcacagaaagatattgccattttacagcttaagagagtaaggccttgggctgtgctgtgacctgcccaagatttgacactggctaggagcagaggctgcgtcaggctcttaaagtcatgtgtttgcatgctggatgctatactgtccagccaggacacaagacttctgatttctaccctcaagatactcccagatcctaaatccagtagcctcccaggcaaaatatagcaatctgccacaactgccagatgaaaagcaacaatcagagtagaaaaatctgttgcctgatatacataacaccaatcagaccgtgtggatttttctctgaattgactgattttgtttttttcttactgaaaatggacctgcctttcactgaattttctgagggcagagtcttagctgttttctttaagcaccttttttttttttttccattgggaaatggctgatgagttcacatttagggatgtacacacacagatggcagacgtctccccactcatccagccccagatctgagccttgacgcaggccaagtggaaaaatactttcccgcccccctcccctgttcccacttcctcatctggcactatgcatgtctcactcaccctccacagcactcagtcccatcgacgttcactgaacattggctttctctttctgactcctgcctgttttagtccactatatattgctgtatttgcttaaatgctggaaagtaactgttaaaatgtgaaattgtaatttttaaaaaggctacaattaaattttagccaatgccactcaccaaatctttgcacctagtagatatatcaatgtaaaaacaaatacctaactgtacagtgagtgtgggggaaatgtagtaacctagttagtagtcttcaatataaccaattgtacaaggggaagtggtgtttacctacttgttcatcaccattactgaaagccgtactgatcagttagttgacaacgggcatttttttttctttgcttcatggaatgatttcttttcttaaccttcgacttatcctgaggtcaagccttttgtctttatgtgtaaccgacgttcagtctattctaggaatgaaccagcaagttgttcatttaaaactgaccaaagacaattaattcctggtctagtttcctgggccttgtggctcagctgccactaaagagctttttggataaaattgagaacaagctgtgcttcctaccccactctccccgtccccttttattcccttttcctcttaaagagctgctctgagctgtgggattctatgaaaaattcttgcctttccttgtttcagtgctaacgatttctcacctcgaagcgccttttgaaccccggacagagtgcacaatcggagggaattgcgagcttgggaattagactttggagtcttttctctgaagtcaccaggccaggggtcaggagagagatggattcccaagggatgaaaggtttctattcaatgaagaaatcggagtgggaagagacacagggaaattgagccatattttggctatcggctggaaccagcagttcagagatctgccttataaacatttaaaaccggtttgtggtacacaaagaggaaccagtgtgggaaggggcctttatgtggggctttcttctctgttggagtcccttggagtgccttgttgggtatatttctctgtcattcaggaggcacgaatgtggaggacttctcgtgacctggtcgtgatgtggcattcagtgcatgtccacagctaatggaaaaacacgaggactcgggtaatggttcttcctctcagtctttctattcctaacttttcacacatccagatggttccacactagtgcaaatgcctcactctcctgagaaacccagaaagaagagtggctggctcacaaccatggggttagcccctgctgggctgggagtcggggtggcggccaggaggaaaggcagaaaggggtgagccgaggtgttgcctagctgattttctgctgtgcagagctaatgctgacatttcatgtcaacttccccggttctctggggtctcctctcctctgagcagccacatagaacattccccacatatccaaagctgcccaggggagccgagagaagggactttgctgtcaggtccaagccctcctgacctccctgagattgatctgccagtgtcctgctgtccctctgggactggccacatggccatcgctgccccttgttgacacctcctttctgtgtgagttgtccccggccaataacaaagctgttccttgaaccagaacaaccagagtgcacttttccttccttagacggaagtagatcctggctagggtttctgcccaggcccttgttcccggcagtgtgactgtttacatggtttggcaataggtttgattctgattgcttcagagtggctggtctattttgtttcctttggtttccttcctccccaaattgtgacaggaaaaacagaccaaaaccaccctaggaaattgctggttgcctgtccccacgtgatgataaatgttgccctcttctggatatcgtttctctaccttacgaccaaacgcccgtcctatagagtgtctgattggatcctctgtcgcgtattctgatggtgcctgctggtttgacgtggagctatcctgtgaaataaaacagcttaacttttctcaaacatgctccagtggtttttgaaagggcgaggtggcacatcaggggtggagaggtcctggggggagtccccatcctccagtccacactgtctgcctgcttcccccaggaaacacctttgaaatgtccattagctcagatccaacaagatgaaggtaaggttacaaggaggaccacttccattgtagagctaactgaagaaggtaactaactgtaggatgactgctggggaaagagggtttggaaatgtcaaagcaaaggcaagttgggagtagtagctgtcatctgcagaaagtgtcttcaaaagtttaagataaattatcagaggccactgggtactgatacatcaaggcacatgcaacattttgatgttcattgtctacaaacgtcatataacctcttggacttttgtttttacctgtgtgtgtttgtgaactgtttattgaccacttatttctgtcccagccactagattaaaccctttacctgtattttctcatttaattctcaatacaccattgaaggtaagtatcattattatactctgtcctgcagatgaggaaactgaggctctgagaggctaaacagcttgcccaaggttaggctaggaagtagagaagccagaatttgaattcagtccgcctaactccaaacccatgctctttataagtttgtcatactgcctctgatttgagcattgtactcattacagcaggattaggggcaggatttcatgatgaaggtagcttgctgcttgctgcagtcaagaaatactccagggcctttatatcccaccaagactttgtatcagggaagaatacaagttgcccaaaggagattgtggggctgcccatgaaaaataataaatggtgatgattttcagtctctctttctgattaaacctctgctggatcttcatggaagggcctccttgcagcctcagtgactcattcccaccaaaaatgctcatcactcaatgatggtctcttgcgaattccagactcctctgctatgaaaatgtcttagtctattttctgttgctgtaacagaatagaacagactgggtaattcataaagaaaaacagcttatttggctcatggttctggaggctggaaagtccaagaacatgacactagcatctggctagggccatctcatggtggaaggcagaagggcaaaagagacagtgtgaggggcagactcttttataaccttctgtcatgataacaatcccatgcccatggcaatgacattaattgattcatgagggtggagccctcatgaaccagtcacctcttattaggtgccctctcccaagattattgcattgggtattaagtttccaacacataaatttgggggacacattcaaactactaaccttctaagaggctaaactttgtatgtgttccataatctgtttacttgctcatagcaacagtacacatttgaaagcttcaaatcaggagcctctcattcattcaacaagcgtgtatgaagcaccttagcacctttttatgcaacttgcctcaagttagctgctggggacacagaatgatgagccccagttcctttcctcaagttgcatacagtctaattgcacaaaatgatcactctagaattctaagatcgacttttactcaatgataaatagaacagtgtctctaacccacagaggcacaaagggcagattttagcaacttgactattttgtcagccacaaagcatagaccattgctggattgtccattgcacatctgtttaggaattttttgtttgcaaacgacaaactattcaacccaaacagccctaagcaaaagagaatttattggctcacatgggtggaaactccagtctagaaatggcttcaaacccaggatgatgtgacgatgtgagtgttgtctccggggtgcagttctcttctttcaggttggctctgctcagctctctgggttgactttatgctcagacagcttgtctgatattttgtggttgcccagtggctgctgaagcttccactacctgcacctcctcagcttcagtagtcttgggtctgattctcactgaccagaattaagccacaggtttatcccaaaagcagaccaaggggatggaatagaaaaatggccttaagcaacctgtattttgaagggtggtgtcaaccccaccaagactttgcatcagggaagaatacaagttgcccaaaggagattttggggctgcccatgaaaaataataaatggtgatggttttcagtctctcagttttagggtagttagctatgcagcaatagctaactgatacactagaaaaatgctcacgcaaatatgtagaattttgtccttgtccatggactgtacattgacttcacaataataaagttaacatccatcaagtgcattctgtatgttgacacattaccaagcacttcacatgccttgcctcattgaattcttacaaacaacttgtgggagtagattctgctagcacccccagttaataaatgagaagactgatcctcagggagttcaaaatgcagggacttaaagcactttcaggccagcaagaattccatggcccccaaatgcctagctgcagggaggtctgcttgccttgacaaccaccttaggagtaaggtctatctcagcttctctcaggaacctatgatagctctgttactcatccatttcttttaagccctaacattgagaatacttactatcgattccttgcattagtgccacatgtgtctttactgttgttgagaacattttctattttcccctttttctactccaactctcccaagaacatataaattatattagatgggatgttcattttacagatggggaaactgaggaacagagaagatccagggcttgtcccaagtcccaggatcacattgagggagagaaagggtctctggctttcctggaccctggcccatgctccctagaccccagccactctccctccacccaccccaagcatctcccactcccatgcttcacactggctgggtgatttggacgagcttcagtcatgggtgtaagtgcaaaggctctggattcagacagatctgagtgtggatcccagcaccggcttgtatcagctggttgactttagcaagtgacaaaacctcctggagcctccatttcctcaggaacacagggctaagaaggctctgctccacagggttgtttgcggtctggagtggatgatctacgtaacatccctggaccatccaggcaatcagcaaaggctgctgtgttcatccatggttgcttctgctccttaaagagtttctgcttcatctccatgctctgcagacagaaagagcaggttgttgggcatctgatgagtgactgaaccgaaggagctctaaggaaaaagcttcagtgggattctgccattcattggctaccagatttggggaatgtctcttcccctgtctgggcctcagtatcctcatctgtaaaacaagggggttggggaagctgaccttgattatttcctccagctctgagggctcactcagtgccttggctgaaggctgcagaagcacacataggggagggccaccagccccaccacatcccctctgctttctaaagggaactcccttaacgaccatgtttgatattgtgctaccctaccccctgactccattggattgagccaaggatggcagctgatgcaacagcagttgatggtagattggttagtcaccatggcccttggcaaagctggacctgcagatgacctttcttgggaagcttgacccagaagtaacaaaatgacaggccctgtaagcaggagaccagaagatgagagcccacaacaacgaggaggtcggaggcagagaggtggcccttctgcaccatagggaggctgacgtcactagggatgagactctgagagcacagtgacaaaaccaatgggcaaagccaatggcagagatcacaggcttcgagagcaaagccatccagtccctagagagagccagaacccccggttgagtacctgccccagtgcctattcctcactgggagaccttacattcaagccctccttacctggtgtaacttgagtgcgatttctgcttcttgcaattaaaacaaaaaaggggctcacgcctgtaatcccagcactttgggaggctgaggcagggggattgtttgaggtcaggagctcaagaccagcctggccaacatggagaaaccccgtctctacaaaaaatagaaaacttagctaggtgtggtggtgcatgcctgtagtcccagctacttaggagactgaggcaggagaatcacttgaaccaagtgggtggaggttgcagtgagctgagattgtgccactgcactccagcctgggcaacagggcgagactctgtctcaaaaaaaaaaggaaaaagtagacagaatgataatagccaacctgttagagcacttactgtgttctaagccccttcacatataaaggccaactcattagtcctctcaaccaccctttaaagcagatactaatgttactccagcttaacctacgaggaaatagtacagacaggctaagtaacttgccatgggacacactacttaggcatcacggagttggggttcagaactaggcagtctcactctggagctgggtctccattctctctcttaggcctgaggatgaggcaggacactgggtgtgatctgaaacagacagcttcaccaaactgggagtgtttgacccaagatacctcacccagagggagtttgcgcccccttggcatggggggtgctgtggtggggtgggtggtcatcggctgctcacacagcccccaaagaaggagcaaggatggatacagggtttcaccaggccatcctgccccaggctgcagccaagggtcagatcctgcctctaacacgagggagcattttatgttgggaaattccctagagaaagagctgtgcgggggttggggaaaggcctcctaggaacagcctgccagacaattgcctccacccctaagcagggaagtctagaaaggaccccactgctgcctcagtgcaagcagcgaggca

SEQ ID NO: 1840 - DNA, 2868 bp, Homo sapiens
atgaacaatgtcatcgtccgcctctcccagatcagtgaggatgtcatcagactcttcaaaaagagcaaggagattggcctgcagatgcacgaggagctcctgaaggtgaccaatgagctctacacagtcatgaaaacctaccacatgtaccatgcagagagcatcagtgcggaaagcaagctgaaggaggctgagaagcaggaggagaagcagttcaataagtcaggagacctcagcatgaacctgctccggcacgaggaccggccccagcgccgcagctctgtgaagaagattgagaagatgaaggagaagaggcaggccaagtactctgagaacaagctgaaatgcacaaaggcccggaatgactacttgctcaatctggcagccaccaacgcagctataagcaaatactacatccatgatgtctctgatctgatcgattgctgtgatttgggcttccatgccagcctggcccgcaccttccggacctatctctcagctgaatacaacctggagacctctcgccacgaagggctggatgtcattgagaatgcagtggacaacctggattcccgaagtgacaagcacacagtcatggacatgtgcaatcaagtcttctgccctccactcaagttcgagttccagccccacatgggggatgaggtctgccaggtcagcgctcagcagcccgtccagacagaactgctcatgcgttatcaccagctgcagtccagactggccaccctcaagatagagaatgaggaggttaggaaaaccctggatgccaccatgcagacattacaggacatgctgactgtggaggactttgatgtctccgatgccttccaacacagtcgatcgacagagtccgtcaagtcggctgcctctgagacctacatgagcaagatcaacattgccaagaggagagccaaccagcaggaaacagaaatgttttattttacaaaatttaaagagtatgtgaatggcagtaacctcatcaccaagctgcaggccaagcacgatttactcaagcagaccctgggcgaaggggaaagagcagaatgcggcaccaccagaggaagaagaaatgctcgaaccaggaaccaggattcaggacaagctataccgcttgtagtcgagagctgcatccgttacatcaatttatatggactccagcagcaggggatcttcagagtgccaggatctcaggtggaagtcaatgacatcaaaaattcctttgagagaggtgaagacccccttgtggacgatcaaaatgaacgagatatcaattcagtcgctggtgttttaaaactgtatttccgaggactggaaaacccactctttcctaaggaaaggtttcaagatttgatatctactattaaactggagaacccagccgagagggtgcaccagatccaacaaatcctcgtcacccttccccgcgtggtcattgtggtcatgagatacctcttcgctttcctcaaccacctctcccagtatagcgacgagaacatgatggatccctacaacctggccatctgcttcgggcctaccctcatgcacatccctgatgggcaggaccctgtgtcctgccaggcacacatcaatgaagtcatcaaaaccatcatcatccatcatgaagccatcttccccagcccccgggagctagagggacctgtgtatgaaaaatgcatggctggaggggaagaatattgtgacagcccacacagcgagccaggggccatcgatgaagttgaccatgacaatggcactgagcctcataccagcgatgaagaagtggagcagatcgaggctattgccaagtttgactacatggggcggtccccgcgtgagctatccttcaagaagggggcctcgctgctcctgtaccaccgcgcctcggaggactggtgggagggccggcacaacggcgtggatggactcatcccccatcagtacatagttgtacaggacatggatgatgccttctccgacagcctgagccagaaggctgacagcgaggccagcagtgggccattgctggatgacaaggcctcttccaaaaacgacctccagtcccccacggagcacatctcggattacggctttgggggggtgatgggccgagtgcggttacgatctgatggagcagccatccccagacgccgaagcgggggcgacacacacagcccgccccggggcctgggccccagcatagacacaccaccccgggctgctgcctgccccagcagcccccacaaaatccccctcacccgggggaggatcgagagccctgagaagcggaggatggcgacgttcgggagcgctggcagcatcaactaccctgacaagaaggcgctctccgaagggcactcgatgaggtcgacctgcggttccaccaggcacagcagcctaggggaccacaagtccctggaggccgaggccctggcagaagacatcgagaagaccatgagcacggctctgcacgagttgcgggaactcgagaggcagaacacggtcaagcaggcgccagatgtggtgctggacaccctggagcccctgaagaacccgccaggccccgtcagctcggagcccgccagtccccttcacaccatcgtcatccgcgaccccgatgccgccatgcgccgcagcagcagctcctccaccgagatgatgaccaccttcaagccagccctgtccgcccgcctggctggcgcccagctccgcccgccccccatgcggcccgtgcggccggtggtccagcaccggtccagcagcagcagcagctcgggcgtgggcagcccggccgtgacgcccaccgagaagatgttccccaacagctcagcggacaagtcgggcaccatgtga

SEQ ID NO: 1841 - protein, 949 aa, Homo sapiens
MNNVIVRLSQISEDVIRLFKKSKEIGLQMHEELLKVTNELYTVMKTYHMYHAESISAESKLKEAEKQEEKQFNKSGDLSMNLLRHEDRPQRRSSVKKIEKMKEKRQAKYSENKLKCTKARNDYLLNLAATNAAISKYYIHDVSDLIDCCDLGFHASLARTFRTYLSAEYNLETSRHEGLDVIENAVDNLDSRSDKHTVMDMCNQVFCPPLKFEFQPHMGDEVCQVSAQQPVQTELLMRYHQLQSRLATLKIENEEVRKTLDATMQTLQDMLTVEDFDVSDAFQHSRSTESVKSAASETYMSKINIAKRRANQQETEMFYFTKFKEYVNGSNLITKLQAKHDLLKQTLGEGERAECGTTRGRRNARTRNQDSGQAIPLVVESCIRYINLYGLQQQGIFRVPGSQVEVNDIKNSFERGEDPLVDDQNERDINSVAGVLKLYFRGLENPLFPKERFQDLISTIKLENPAERVHQIQQILVTLPRVVIVVMRYLFAFLNHLSQYSDENMMDPYNLAICFGPTLMHIPDGQDPVSCQAHINEVIKTIIIHHEAIFPSPRELEGPVYEKCMAGGEEYCDSPHSEPGAIDEVDHDNGTEPHTSDEEVEQIEAIAKFDYMGRSPRELSFKKGASLLLYHRASEDWWEGRHNGVDGLIPHQYIVVQDMDDAFSDSLSQKADSEASSGPLLDDKASSKNDLQSPTEHDYGFGGVMGRVRLRSDGAAIPRRRSGGDTHSPPRGLGPSIDTPPRAAACPSSPHKIPLTRGRIESPEKRRMATFGSAGSINYPDKKALSEGHSMRSTCGSTRHSSLGDHKSLEAEAEDIEKTMSTALHELRELERQNTVKQAPDVVLDTLEPLKNPPGPVSSEPDLHTIVIRDPDAAMRRSSSSSTEMMTTFKPALSARLAGAQLRPPPMRPVRPVVQHRSSSSSSSGVGSPAVTPTEKMFPNSSADKSGTM

SEQ ID NO: 1842 - DNA, 3174 bp, Homo sapiens
tgtgtgcccgcagagatccgcacgcagctggtggagcagttcaaatgtctggagcagcaatcagagtcgcgactgcagctgcttcaagacctccaggagtttttccgccggaaagctgagattgagctcgagtactcccgcagcctggagaagctggctgagcgcttctcctccaaaatccgcagctcccgggagcaccagttcaagaaggaccagtacctcctctcgcctgtgaactgttggtatctggttctgcatcagacccggcgggagagccgagaccatgccaccctcaatgacatcttcatgaacaatgtcatcgtccgcctctcccagatcagtgaggatgtcatcagactcttcaaaaagagcaaggagattggcctgcagatgcacgaggagctcctgaaggtgaccaatgagctctacacagtcatgaaaacctaccacatgtaccatgcagagagcatcagtgcggaaagcaagctgaaggaggctgagaagcaggaggagaagcagttcaataagtcaggagacctcagcatgaacctgctccggcacgaggaccggccccagcgccgcagctctgtgaagaagattgagaagatgaaggagaagaggcaggccaagtactctgagaacaagctgaaatgcacaaaggcccggaatgactacttgctcaatctggcagccaccaacgcagctataagcaaatactacatccatgatgtctctgatctgatcgattgctgtgatttgggcttccatgccagcctggcccgcaccttccggacctatctctcagctgaatacaacctggagacctctcgccacgaagggctggatgtcattgagaatgcagtggacaacctggattcccgaagtgacaagcacacagtcatggacatgtgcaatcaagtcttctgccctccactcaagttcgagttccagccccacatgggggatgaggtctgccaggtcagcgctcagcagcccgtccagacagaactgctcatgcgttatcaccagctgcagtccagactggccaccctcaagatagagaatgaggaggttaggaaaaccctggatgccaccatgcagacattacaggacatgctgactgtggaggactttgatgtctccgatgccttccaacacagtcgatcgacagagtccgtcaagtcggctgcctctgagacctacatgagcaagatcaacattgccaagaggagagccaaccagcaggaaacagaaatgttttattttacaaaatttaaagagtatgtgaatggcagtaacctcatcaccaagctgcaggccaagcacgatttactcaagcagaccctgggcgaaggggaaagagcagaatgcggcaccaccagaggaagaagaaatgctcgaaccaggaaccaggattcaggacaagctataccgcttgtagtcgagagctgcatccgttacatcaatttatatggactccagcagcaggggatcttcagagtgccaggatctcaggtggaagtcaatgacatcaaaaattcctttgagagaggtgaagacccccttgtggacgatcaaaatgaacgagatatcaattcagtcgctggtgttttaaaactgtatttccgaggactggaaaacccactctttcctaaggaaaggtttcaagatttgatatctactattaaactggagaacccagccgagagggtgcaccagatccaacaaatcctcgtcacccttccccgcgtggtcattgtggtcatgagatacctcttcgctttcctcaaccacctctcccagtatagcgacgagaacatgatggatccctacaacctggccatctgcttcgggcctaccctcatgcacatccctgatgggcaggaccctgtgtcctgccaggcacacatcaatgaagtcatcaaaaccatcatcatccatcatgaagccatcttccccagcccccgggagctagagggacctgtgtatgaaaaatgcatggctggaggggaagaatattgtgacagcccacacagcgagccaggggccatcgatgaagttgaccatgacaatggcactgagcctcataccagcgatgaagaagtggagcagatcgaggctattgccaagtttgactacatggggcggtccccgcgtgagctatccttcaagaagggggcctcgctgctcctgtaccaccgcgcctcggaggactggtgggagggccggcacaacggcgtggatggactcatcccccatcagtacatagttgtacaggacatggatgatgccttctccgacagcctgagccagaaggctgacagcgaggccagcagtgggccattgctggatgacaaggcctcttccaaaaacgacctccagtcccccacggagcacatctcggattacggctttgggggggtgatgggccgagtgcggttacgatctgatggagcagccatccccagacgccgaagcgggggcgacacacacagcccgccccggggcctgggccccagcatagacacaccaccccgggctgctgcctgccccagcagcccccacaaaatccccctcacccgggggaggatcgagagccctgagaagcggaggatggcgacgttcgggagcgctggcagcatcaactaccctgacaagaaggcgctctccgaagggcactcgatgaggtcgacctgcggttccaccaggcacagcagcctaggggaccacaagtccctggaggccgaggccctggcagaagacatcgagaagaccatgagcacggctctgcacgagttgcgggaactcgagaggcagaacacggtcaagcaggcgccagatgtggtgctggacaccctggagcccctgaagaacccgccaggccccgtcagctcggagcccgccagtccccttcacaccatcgtcatccgcgaccccgatgccgccatgcgccgcagcagcagctcctccaccgagatgatgaccaccttcaagccagccctgtccgcccgcctggctggcgcccagctccgcccgccccccatgcggcccgtgcggccggtggtccagcaccggtccagcagcagcagcagctcgggcgtgggcagcccggccgtgacgcccaccgagaagatgttccccaacagctcagcggacaagtcgggcaccatgtga

SEQ ID NO: 1843 - protein, 949 aa, Homo sapiens; identical to SEQ ID NO: 1841

SEQ ID NO: 1844 - DNA, 2835 bp, Homo sapiens
acttgcgactgtgtcaggatccaggcaatgagcaaggagattggcctgcagatgcacgaggagctcctgaaggtgaccaatgagctctacacagtcatgaaaacctaccacatgtaccatgcagagagcatcagtgcggaaagcaagctgaaggaggctgagaagcaggaggagaagcagttcaataagtcaggagacctcagcatgaacctgctccggcacgaggaccggccccagcgccgcagctctgtgaagaagattgagaagatgaaggagaagaggcaggccaagtactctgagaacaagctgaaatgcacaaaggcccggaatgactacttgctcaatctggcagccaccaacgcagctataagcaaatactacatccatgatgtctctgatctgatcgattgctgtgatttgggcttccatgccagcctggcccgcaccttccggacctatctctcagctgaatacaacctggagacctctcgccacgaagggctggatgtcattgagaatgcagtggacaacctggattcccgaagtgacaagcacacagtcatggacatgtgcaatcaagtcttctgccctccactcaagttcgagttccagccccacatgggggatgaggtctgccaggtcagcgctcagcagcccgtccagacagaactgctcatgcgttatcaccagctgcagtccagactggccaccctcaagatagagaatgaggaggttaggaaaaccctggatgccaccatgcagacattacaggacatgctgactgtggaggactttgatgtctccgatgccttccaacacagtcgatcgacagagtccgtcaagtcggctgcctctgagacctacatgagcaagatcaacattgccaagaggagagccaaccagcaggaaacagaaatgttttattttacaaaatttaaagagtatgtgaatggcagtaacctcatcaccaagctgcaggccaagcacgatttactcaagcagaccctgggcgaaggggaaagagcagaatgcggcaccaccagaggaagaagaaatgctcgaaccaggaaccaggattcaggacaagctataccgcttgtagtcgagagctgcatccgttacatcaatttatatggactccagcagcaggggatcttcagagtgccaggatctcaggtggaagtcaatgacatcaaaaattcctttgagagaggtgaagacccccttgtggacgatcaaaatgaacgagatatcaattcagtcgctggtgttttaaaactgtatttccgaggactggaaaacccactctttcctaaggaaaggtttcaagatttgatatctactattaaactggagaacccagccgagagggtgcaccagatccaacaaatcctcgtcacccttccccgcgtggtcattgtggtcatgagatacctcttcgctttcctcaaccacctctcccagtatagcgacgagaacatgatggatccctacaacctggccatctgcttcgggcctaccctcatgcacatccctgatgggcaggaccctgtgtcctgccaggcacacatcaatgaagtcatcaaaaccatcatcatccatcatgaagccatcttccccagcccccgggagctagagggacctgtgtatgaaaaatgcatggctggaggggaagaatattgtgacagcccacacagcgagccaggggccatcgatgaagttgaccatgacaatggcactgagcctcataccagcgatgaagaagtggagcagatcgaggctattgccaagtttgactacatggggcggtccccgcgtgagctatccttcaagaagggggcctcgctgctcctgtaccaccgcgcctcggaggactggtgggagggccggcacaacggcgtggatggactcatcccccatcagtacatagttgtacaggacatggatgatgccttctccgacagcctgagccagaaggctgacagcgaggccagcagtgggccattgctggatgacaaggcctcttccaaaaacgacctccagtcccccacggagcacatctcggattacggctttgggggggtgatgggccgagtgcggttacgatctgatggagcagccatccccagacgccgaagcgggggcgacacacacagcccgccccggggcctgggccccagcatagacacaccaccccgggctgctgcctgccccagcagcccccacaaaatccccctcacccgggggaggatcgagagccctgagaagcggaggatggcgacgttcgggagcgctggcagcatcaactaccctgacaagaaggcgctctccgaagggcactcgatgaggtcgacctgcggttccaccaggcacagcagcctaggggaccacaagtccctggaggccgaggccctggcagaagacatcgagaagaccatgagcacggctctgcacgagttgcgggaactcgagaggcagaacacggtcaagcaggcgccagatgtggtgctggacaccctggagcccctgaagaacccgccaggccccgtcagctcggagcccgccagtccccttcacaccatcgtcatccgcgaccccgatgccgccatgcgccgcagcagcagctcctccaccgagatgatgaccaccttcaagccagccctgtccgcccgcctggctggcgcccagctccgcccgccccccatgcggcccgtgcggccggtggtccagcaccggtccagcagcagcagcagctcgggcgtgggcagcccggccgtgacgcccaccgagaagatgttccccaacagctcagcggacaagtcgggcaccatgtga

SEQ ID NO: 1845 - protein, 929 aa, Homo sapiens
MSKEIGLQMHEELLKVTNELYTVMKTYHMYHAESISAESKLKEAEKQEEKQFNKSGDLSMNLLRHEDRPQRRSSVKKIEKMKEKRQAKYSENKLKCTKARNDYLLNLAATNAAISKYYIHDVSDLIDCCDLGFHASLARTFRTYLSAEYNLETSRHEGLDVIENAVDNLDSRSDKHTVMDMCNQVFCPPLKFEFQPHMGDEVCQVSAQQPVQTELLMRYHQLQSRLATLKIENEEVRKTLDATMQTLQDMLTVEDFDVSDAFQHSRSTESVKSAASETYMSKINIAKRRANQQETEMFYFTKFKEYVNGSNLITKLQAKHDLLKQTLGEGERAECGTTRGRRNARTRNQDSGQAIPLVVESCIRYINLYGLQQQGIFRVPGSQVEVNDIKNSFERGEDPLVDDQNERDINSVAGVLKLYFRGLENPLFPKERFQDLISTIKLENPAERVHQIQQILVTLPRVVIVVMRYLFAFLNHLSQYSDENMMDPYNLAICFGPTLMHIPDGQDPVSCQAHINEVIKTIIIHHEAIFPSPRELEGPVYEKCMAGGEEYCDSPHSEPGAIDEVDHDNGTEPHTSDEEVEQIEAIAKFDYMGRSPRELSFKKGASLLLYHRASEDWWEGRHNGVDGLIPHQYIVVQDMDDAFSDSLSQKADSEASSGPLLDDKASSKNDLQSPTEHDYGFGGVMGRVRLRSDGAAIPRRRSGGDTHSPPRGLGPSIDTPPRAAACPSSPHKIPLTRGRIESPEKRRMATFGSAGSINYPDKKALSEGHSMRSTCGSTRHSSLGDHKSLEAEAEDIEKTMSTALHELRELERQNTVKQAPDVVLDTLEPLKNPPGPVSSEPDLHTIVIRDPDAAMRRSSSSSTEMMTTFKPALSARLAGAQLRPPPMRPVRPVVQHRSSSSSSSGVGSPAVTPTEKMFPNSSADKSGTM

SEQ ID NO: 1846 - DNA, 24947 bp, Mus musculus
gtggagtagagcgccgggccgagtgtggctccgcaaacctttgccttagcccgttcgccgcccggtaccggcgcagcggcgtctgcgtggtgagtatgcccaccctactgggcgcccccacggttcccctctgggaggacggggtcggcacggagctcagtttcgtatgctatcgatccttcgtgatggcggggctcttgcgccttgatggaggcggggtgggggcgccggccacagggtgccaccgcggagctgaggggaaggcactcactcgaaggcctggggcgtgcgccactcgcggtccccctcagcgctcggtcctggtccgcttcgggcaggcctcctggtggacccggggtccccgcggtcgcgcgccactcggcaggtgcgcgcagagctggaaaggcgggcctgaggtctcgctgcgctccgctatggccacccacaaaaatcaacaaggaacggctacagcccacaaatgggccctgcaaaagccctggaaccccaacccagggaacacagaccttggaagactgcagcgaggggcacctttcctacacccgtgggcactactgtgtgcacagctcacactcacgcctgaactgtgaggaagtggctgacccctccgcatctccagtacccaaaatggtttgaaaatgtgcacagactggttgctgatgtttttaaaaagtttgttgaatggttggctgaataaccctataggattctagaagaaacccacagccttcagccaccaagtggcctgggcccacaaggattcacacattcgttcattcattctttcgtacattcatttacatactcaacaaataagtgtggaccagggacggatcagggtagaactttgtgggtggtgagaggctggaatgaagagctctgtaaaggaccaggtggtgttgagtatgggacttctaggctgggcttgaccttcatctgataagccacatagttctgagtcaagagcatcctgaggacccaggcagggctcccctactttcccaggctactgcctggtgccatggccaggattgcccttactggaagactaccttgaagccgggtctaggataagctagctgtggaatggagctgggagaaaccacaagaaggatgtggactttccacattccagctctacccaaccaggagactttgcagccctgccccatcccctgggacttggtcccaggcactaccctggcagtcagctctgagtgtttccatgggggggggggggggagcctgatccagtgctggggctgagttcagaggctttaatacttgagtgggctgagctctaagaaggactcggctgggtggtggtggggaagcagggtggcgattgtgtgtgtcctggcctctactgcctctcttgcccagagagggaatggcagggaggttggcttattacagctgggttagcaggcatttcacccactgacgaaaggtgctatctcctggctactgcggggtggagttgggtacaggctttggtgatggcaagtgaagagaagccggctggatgtggcatgctctataaagagatttaagtagccccaaggtggccaggttactggagctctgaaggatgagttgagggtgtacctgaaaagtgggctgttagggcagttactggcgaggctgggggaggggaagtgatgctcacagcttgaggttacctggttcctcttatttgcaagaaagaatagcctacgggggggggggggggggcacagtgctgggtgcctggcctccggaaggaaggcctgatgacacagccttttagaccttccgaagggcactgcatgcttttccagctgcccttttgctctctagtgggaagctgagggttggggacccacatctaggctgtgttcaagaccaaagagccattcctcatcagggagacagtgaatctgatggttccaaggatgagagttggaaactgcccgtccataagaagcccccactgtgggtctgtggtcactggacattttgtctgtggttgtatctctggccaccatttgctgggccgtggctgtggagggcagctggtgtttctgtttctttctgggcacgctgcctggctggccagtctcagaggccacatgtatttttcctcatagtctgaaggagacagataaactgaagcttcaggttggagggcagtgatgggcaagtgctatacagagccttctgggtctgataagcccacagagagctttgttttccttctcaaatttctttttttaaaaggcagaatgtcgcccagacttgtctccaactcctgctcaacaatacctccttgctgggccgtggtgggacacctttaatccaagaactcaggagacagaggccagtggatctctgagttccagccagggctgtacagagaaaccctacaacaaacaaacaaacaaaacaaaacaaaagagtacttcctgcctcgtcctcctaagtactgggactacagagtgtatcgtttattttaattaactcatgtcgtattacaataattagagactagattattacttccttcttcagaaaggtacattgggcagagaggggctaatttacttacccagggtctcaaaatcaggtggaaaactcccagtttaactgtaccacctgattctcaggctgcgctctgcttcccaagggaggtccatctgtggagcccaatagtcctcgggggtaaggaacagagaggatgcccacggtgttgtttgcttttttaacactagggaaaaccccggcctagtgtttgttccatgtgcattctgccactgagtcagacatgcacagccccttcctgtggactcttccccctagcaggtagagggagacagggcagctaggtgtatgaatggggaagctggaactttagtgccagggacctttatggtggggtttcccccacgaaccatcctggcagatgtccacagcagatgtgtctccagttcactgtgtcttactctctgactcttctccctcgactttcgctggtccaaacagggatatttccgacaaaagggtggtagcatctaccctgagctaaacaagatgaaaggcaaccatttctagaggtgctgccatcttgaaaattgagttcttagttggctttatgggcatttatcctcacagacatgttagccttccaaaaacattcaaacaaaaccaagtgaaatcaagggaacagaaaacagaggacaagtgttttgtgctctcttctcttctcccacccctctccctctccctctccccctccccacctccccctctctgtctctgttggtgtcaagtgacttcctcagtcattctctacatttccctgtgtgtgacaggactcttcactcaccgatttagtagactggctggccagtgggctctagggatactccagtctctgcctccccagcactcggattctaggctcagagcactacactagccttcccatggtcctcgtgatcccagctcagacccctatgcttatataggcctggagtttacagactgagccatatcctagccctggtttgccttaagttacccttcttccccagtaatgcaaacagacattaggaagtacttaggagccaggtgtttccctactggcccctggatcggcctaagaagggcagtgtgctttctggcactatgcctggaagggtgaggatagctaaaccctggcccaggactgggctgtgtggaagaaggcagccaaatgtagtgagagtttgcctatctgtgtgtcgtgagacacaggacagatgcttttttgcagtttcctgcatagtttctctagtctggagggatctcctggcccatagtgggtctactgtcaccatgatggccacagccagggaaggcctgtactgccttaggctactgttccctccttcagtgacaaaccttctttgtttttgatttttttgttttgttttgttttgtttttttggttttcgagacagagtttctctgtatagccctggctgtcctggaactcactttgtagaccaggctggccgcgcctagttttgtttttgcttgttttgttttgttttatgaggcagggtctcacatatacctgaggctggtttttgtctcactatatacctgaggctagccttgaacacttgattctcctgcttccagcttcccaagtgccaggattacaggcttcaaatctttcttcagaggcagtaaaagaacagctgaagcctgggtactcgagattccagcttgtgtgatccagagcccttggctgtaggcttttacctgagccagcagtttagttttcataactggtgtatgcatacatgtttctcctgtagtggtgctgttcccaataagtacgttacctcagcccaccttatgtgtcctcagaacagacagctagccttccaaggacaagtgtgactgatgggggaaaagggaccctggaactcaccagagccaccctcctctagctgaggacatagaaaacctttacctggatttctgtgggaacttcccaacaggcttttcctaaccagtcttggaaaggtgtattgagactgggtgacaccatctggaagaggccttggaacccataggagcctaccatgcctcctcagtctggcgtgttgctatcttatagcatagacctatcttcccttgagttctagacaaggcaagtttctggccaggacatggtcttgtttttctttgagcatcttctagaaaccagggagaccataccacaaagcccttactggactgactactgcatgcgcacctccaggagcccatctcatcaggcaaggtgactgctgtcctgtctctctgatggaggccattgcccctttaacaaacgaataaaggtcgctctcccctctagggtgtggaagacaggaaatggctgttacccaatgcaggcccactgccagctctgccctcagagcacggtgcagacagtccagtcgtcctccattggattctctgctgggctaggcacccccagtccctctgtggctaagctaagaaaaagagagagaaaaaaaaaaaaaaaagagtaaagcattgggggtggggcaggaagagagcacaggcgtgcaaacatcgaagagcggcctctgtgacatctgtctgcgcccctgttggctcacccttaggacatctgactccctttctgctagccatcttgtcccacccaatgcttagatatttcagaagcctcggtcctgggtagggagggaaagcaggtctctgtatcttataggcctcagacaaccaggacagccatcttctgcaggcctagtgaggccccagggatgggcagcttcagtggcatggtgcacacgcccttttccacaccaccctttggcaagattactttctgtgctaatggttaaaggcagaaacctttgcccactaagcagttgctgcgcccctgagctacgctcgcgttcttaaaaccattgtattgctggtgtggtgggtcaagtctgtgatgccagcacttggcaggccaaggcaggaatgagaaggagaacaagtttcaaagcaagcctgggcttcatagtaagaacttgtctccaaagcccaaagaaagggctggagatacaggacagctggcagaaaccaggcacagaggttggcatctgtagacccaacacccggacagtggaggcaggaggatcagaagggaagaccgttcttgcctgaacgtcaagttctaggccaggctgagggccatgccaggctctctactgtctatgtatgtgggtgtttgcttacaccactttcaaacctggtgcccaaggaggccagaagatggggtcgaatcccctggaactagagttacagacaaatatgagctgctgtgtaggttctgggaaatgaacccaggtcctctggaagagcagcctgtgcttttaacaactgggccatttttccggcccatattcatttttattacgtgtagttgtttatttcattatgggacatcccacagcatgcacctggctatcagacttgcggaagtcagttctttctttgcccagtgtgggtcctaaggcttcattcagttcatgttggcaggcttgtgccccctgctttagatgccacgtcatctccagccactcacatattcttgctacccgttccttgtcagatactttgtagacgtttcctccccaggctggatttgaactcactgtgcagatccgtctgtcctgttttagcttcctggatgttgagattacagataggaagcaccatgtctgactcggttttatcgtctcaggagtgtcttttgaatcataaaagttttcaactttgaagactacgttaggtaatttttttttcttttgttacttgtgcctctgggctatgtctaagacgttgcctaatacaagataattgagacttcctctcgtgttctctttttaaattttttattttataaattatgtgtatcggtgttttgactgcgtgtctgtgtactatgtctgtgtctggtgccccaagaggcccagaaaaggacattgggtctcctgagcctggagtttcagttctgagccagtggatcctgggaatcaaacccaggtcctctggaagagtagccagtactctactgctgaaccagctactctccagcccccacccttcttacacttaggtctatctgttttggtttggtttggtttttaagaatttgttattcaggggcaagagagatggctcagcagttaagagcactgactgctcttccagaggtcctgagttcaattcccagcaaccacatggtggctgaaatgggatctgataccctcttctagtgtgtctgaagacagtgacagtatactaatacatcaaataaataaataaataaatctttttaaaaaataaaaagagaatttgttattcaaagccaggtgcatctctttgggaggctagcctagtctacatagtaagtttgagaacagtcagggctacatagtgagacctatctcaaaagaaaatctgttattcagactggagagatggtgactcagtggttaagagcactggctgctcttcccgaggacttgtgtgactcctggcatccacatgggagcacgccaccctctgtaactccagttccaggtcatctggcaccctcttctggcctccacgggcaccaggcacagagatacatgcaggcaaaacaccatatacatcaaataaaaataaaatagtttgttatctttttttttgaaagggaagacaaagttttacttttaaaaaagattacaagcaccccaaataacatgtaacgagttgagtcctcgcatctcgtgatttgggataggatacactaacagcagccggaataagcataccatattgactgtcctaaattatccaggctagagtactgtaaggctggctgctacttcataggagttgctaatagctattactacttttccataaataacgcccctgacctttaagaaagtagaagggaacagcttactccctttctttcaaagaattttttctacttgactaataaaaaagtcagcactgatatccattacttgcagaagacacaggaaacaggtgacaaacactccttaaagacacacaagataagaagatggaacttcaggtacatagcaagtcggtacaaaaagctagatttgatactcttaaaacgtgaagggtcctacaacggcatagagaaataatttaatgccttccagaacagaactcgagctctgtggaggtttcctattctataggggcagatctcatgccaacccacagagcaggcgcttccacctcctatccctttatgcggtagctttcatggatttctggctggatgtcacacacagaggccaagaggtcattcaggactccatccctgttctgctcgaagtggttgctggaggacgttcatcttcccctgggtctcctcttccacctcactgctgcagctgccatgagaccccagtgctgcagcttccttggcctctgcagtactgttcaatttcagcctggcggcttctttggcctgcttcggcctccggttctttcacttgcaggccttggacaccttcttggctgcctgcagtagctgctggatgccccgcaactgactctcgccattgctgaggggactttgggccgagagaatggcctaaatcaaccaacggctcaaacatagtcagaagcccctccgtttgatgtcatttaatgagcctttctgtgtagcttcaggtcactccctgaggcctggaacaccctgaatctttttcagcttttctgctgaatttggctgtcaccaggacagactgctgagggagtgtgttagtactccagaggagcccagttgtcactatgactggagcagcgcagtcttgtttgtggcactgttgggctatgtctgctcactgacagttgggatcagttcctcttaggtgactcataactgttgcggtaaatctcctcccaaatatgccccggcaatgaaaacacaacacagttcatatgaatacatgctgtgcgcctagattgggcagatctaccgctacactaccatcttccacatctatgagaccccttagaacttgcggtttctccaggccttgtgcttctgctccacttttccccttctttctccttgtctgtgtcctctccctcttccattttctctttgttctctccccccaccttccgctccaccttcccttttatctgcccaaacttcagctcccctttattttacaaattaaggtgggaagcaggtttacaggaaatcacctgagtgctgactatgttcttgttcacaaccactctcaggagaacggaattaacatcaaatataattagccccagggctatctgcaacacataacaactatgtcagtgtgatctggctctatctgcaagagttgaccctctggtgatgccctgactgagcgtgtcctgcgcttgctaatgctgtggtgctgcccctggatggtatgtccacggccaacatatgtccaaaaggaaagcccctgtcagctgttgtttttttcaaatttatgtctatgtgtgtgagtattttccctttttgtatatctgtgtaccacatgggtgcccagtgcctgtggaggcagatgccccagtactggtgttacaggcagttaatatgagctgggaattgaacccaggtcctttggaagagcagccagtgctcttaacttctgagtcctctctgcagccttcttagcatccatttttaatcttttgtatgacatctggcagaggtaggaattcatgccttttggggggatagttggctatcccagtgtccttggttaaaactgtctgttctttccctggcggtggcccgggtcagtgtctgatgaactcgatgctcactgctctctgatttcttcaaccaggcccgcaccttcatgacgtcatgacgagagctatgggaaggtttgaaatcaggaagtacaagtctgtcatccactttgttccttttcaagaatggcgatttttgaaaatgtcctccgcgttcatgtatggatttaggaattgtttgtcactttctggagtattttttataggaattgtgtggagtgctgtagtctgatagtgtgttgtctcttccagcccctgacaggtgcttgccttccgttgtttatctcaacaagttttgcagttttcgtttagtgtctaatgctcgtataacattcgctcctaaatgctttgtgcattaattttgttcacggcactggggttgctctcaagctctcggtagacgtgtgttctactgtggagatgcaggccgggtcttaggattttctgtctcttggtagcacaataatcatttcattttattttgggttatgagtagtgtatagaaaaacaggacagcaggggcttgctctctgctactttgttttcttcatgaattccttgggtgctgtgtgtaaggtcatgtcagatcactgtgttcaggggcttccagaagattccactgtgcagctaagcttgaaaattgctgaggaagctgggcaccacagcacctacctgtcttcctgaggcctgcaaggtagcgccaagagtagacctcgctggcggcgtgcctggcaccccccgcctgccatggaacttgtcttggtctatgattggtacatgatagacaaagaggctcttttttgtcacatcaaggattcagctttgtgaccttaacgtttgttcatctttatgaataggtgacatagctgctttctgttggggggctgggagagcacacccggttgctggactgttttctctgcgtccttggtcgcaagctcggttgaactgttttgtgtccaaggagaagaacagcatccgttactggacctgtgagtttgggtctctttgtcctgcctccctctccctgcctgcctatgtgtgctcgtgtgtgtgtgtgtgtgtgtgtgtgtgtgtgtgtgtgtgtgtgtgtagagggaacctcaattgagaaaatgcctccatcagatttgcttgtaggtaagcccgcagggtattttcttgattggtgatggtgtgggaggtctggcttactgtggacagtgccgctcctgggcaggtggccctgagttctgtaagaaagagcctgagcaagacatggaacaagtcagtaagcggcccccctccctggccatgactccagctcctgcctccaggttcctgccttgacttccctcagggggagggggacggggacgggacctgagagttgttgtgctgagatatgtacttttctccccaaattgtttttggtcaagtgttttattacgatagaaagtaaactaaaacacactctccccacacacacactgactccaccccacacaccgtgaacacagggccttgaggattccagacagccttgttttgtatttattttgggacaaggtcttagaaagttgaacttgtgatcctcctgcctcagccttttgagtagctgggattataatctgtgtcaccgagtttgttcttgacctaagtagttgagaagagcctttgctcttgtgtaaatgggaaaaggtgctttagtcacagaggtttaggctctggcttctcactgatgcagcaccaactggaggagacattcatacaaattaaacatttttaggatttttaaaaagtgtgtttcaatgttacatttggggtaagaatgaaaatacaggaattatgtcggtgcattgggtgttttagattgtgtgtgtgtgtgtgtgtgtgtgtgtgtgtgtgtgtgtgtgcgtgcacagagttttgaactgaaggttttgctcatgctaagcatgtgtgctatcacccagttcctctgaaaaagcatctctaatagaaactgcccattctcgggcactccgggtagcagagcagcttccgctactgcgtgttgactttattgtgctcttggctttttagacattgtgggaaggggtggacaaagctcactgtttatgaaacagtctgggtttgtgtcattaatggataaccatgcctattctcgtgcatgtgaccctgtgttaattggatgtcctaccacctaatgcttcttacaacacttgatgtttactgtttccaaaattggacctagatttagaaaaaacaaaacaaaacaaaacaaaacaaaacaaaacttgatttgcttatttctattttgcatgctggggatggaatgctcaggccttactcttgcaggcaggcattctaccatcaagctgtgttcccagccctttcaggagcctgacacctaaagctgagcttgggcaatcctggaaaatctcaggtgtggccatttgtattgtaaaaagggaaaattagggagagatggagggatggatactggaaactgaactcatgtcctctggtaggatagacagaacacttaaccactgagccttctgcaaccccctttagagagagagagggagagagagagagagagagagagagagagagagagagagagagagcgtgcatgtgtgtgttacacacagaggccagaacagctgtcctggaactcactttgtagaccaggctggcctcgaactcagaaatccgcctgcatctgcctcccgagttctgggattaaaggcgtgcgccaccacggcccagctttcaagacaaattcttaaccgccagtccatctcgccattctccaaccagtcccttaaaaatatttttttttcaggtgttgagggtctagccccgggatacaggcatactaggcacggctgaagcactgagctccacaccacaattgggtattattaccgtcttaccctctaggttattgatatgctgcagaatacagatattaatgcaggcacttgtccacaggcctttgtccagtgcagtgtggttattatcttacagctattggcagtcttgcctgcgtctctaagttcttctgtttctcatcatctgtgcatatggttctttgtcatttgagttttgtttatttacttatttgtttgtttatttttatggagacaaggtattgtatagcccagcctggcttccagctcacagtgttgaagaaggcggccgggaacttctgcttcctgcgtgctgcagttacgggtgtgtgccatcgtctccggcagcccggggctctgcatgcatgtgaggcaggcactctaccaacagggctgcatctcaagcacctgggcagttttagcacagttccttggtttcccattaagtaatgagttaaatatttaacatatgtccatttgaaaagatggaaaacaacttctcctggtcactcggcattcatcagccagaagtctgggaggctttttcttctctggatctccacttggcggcgttctctgcctgctctgtagcctttgataagtggatggctgggtgccctctccgtaatatttatcacatttttctcggttacttgtatagataaacctcagcagggcaggggcacaaggacacccagctctgtgtaacagtactttgtaccttcctccctattggtgtgtcccgagtctgcacttcgggtgggcggggttttgtgaagttcagagttttcagctacttcagggcttttggcttctacagtacaagagaaacttccaggttcctgggagagtgagttggagtctgagtagtgtgacccacgtgagctgctgtccattcctcttactcaggacacagctctctgctcagaaatagctctctcgtcccaagactccacctggtggcttctggaagaagtggcctctgtgatggtggagattgacagctctgactgtgattgacagctctgaccaccatgaggtgcatgcaaagtgctttcacacctgtctaataattctggatgtaatgagaaataccaagcaaggtgtttttttttttaattagaatttttattcatcactgtgtgtatatgagggaggtgaactcatgcgtatggagggaagagggacctggaaccggctcctctttgacctttcacattgttccagggatggaatgcaggccatctggcttgctgactggcacattcaccagctctcttgcttgcatctgatcttagcttttttgagggacctctacactattttccatagtagccatattaatttgcattctcagtaacagtatatacaatgaatggatatacttttttaaccatgcaacaaaacctttattaacattttaaacagatgttccgctattactgaaactttgtgggggttggggcgggggcaggtttcaagacagggtttttctctgaatagtcctggctgccctgaaacttggtttgtagaccaggctagccgaaaactcagggatccacctccttctgcctccaggtgctggaattaaagttctataccaccaagcctggctgtactgaaacttataatttctaaattcaaatgcacaaatggttttagtgtagagtaataccattagtgcctacgggaaatttaggctgaagaacggagaccatgtgtgggcttgagtcttttctggatcaaaaagagtatggtcatctttcagctgcttgcctgtaacgatgagcgtctgctgggtggggtgggaggtgccctcctaatcctgggtcttacccttcacattctctgtggtatcagtgggctctacctcagggtctgggtcttcacaaagattcacatcttttttgggggagggggtgcgttgagacagcgtttctctgtgtagtcctggctgtcctggaactcactttgtagaccaggctggccttgaactcagaaatctgcctgcctttgtctcctgagtgctgggattaaaggcgtgtgccatcatgcccggcaagactcacatcttaacctgttaatgaagggattaaagtgcaaagttcaaagcacatcagggcacctagttataagagcctctgcactggacaaagctgctcgtctggacatcctcaatgaagttcttcaatgactttggtccagtcagctatggtagatcagaagacttgcatggcgggcacgttttaccagccaagctgccttgccggctcctccagatgacatcttcttcccattaagttggaatacatactgtgtgctttgcctcatcgtgtggaaagaggaagtggttggtggtttgggggcactgtggtcctgtagtgtagatgccctgcagtcttgcaggagtgtgtgactagctgggaaacccactaaccagtgtgaggattagcagcagcagttcttgtgggaagcaccagttggcctgatcagacttactgaacatgggaagaaagctgagctctggagaactggcctggggatgcccaggtcagtgccagcggaggcttcaaggaggaagactgcagacctgactcactgggtctgtgtggagagcaaacaaatgagccaaagccagcggtgtggctgggtgtgcctcagctgcaggtgtgacagtgtcctgtatcccgcggggccccgcagaggcattgctttagggaacagccacccatggcttgtatatgtcctttttcaggtgattccctggactctgtgagctggcagtgcttggagctacacagcttgtgccatggactctgaggttagattctggtatcttttcattttgttcatcctgggtgtccccgttaagcaacctgacccctcagttgtcaggtctggcaaggtgtacctcagataatccaacagagttcatctccactggcacctgatagggacttagtacagaatggggaagggggacgtccttccagaaggacggaacggcgtgactgtcagcttggtagacatagcaagggcggcacaaaggcgggacagaaaagatctggaaggttcccttttgccccagtcaggggctgagctgggctcgggcaatagtgctttctagcctcccagtatctcctgctgtcctgcagggcctcttgagagtgggcccctcctggacaacggtagacttgctgctgtccccttcttctaccttggagcaggaaagctgaggcacagaagaaagtgaaatgctgacattttctcttacatcttggcatttgacatccttgccccacatcagaacttgtatcttattgtagatgtttctgactttatgacaactgttatgcacacagttgagggacattaagtgaagcaggttttgctactacgtttttttgtactacagggactcatggaacaggcgttgctgagtgctcctccttttttttgttttttgtttttttcgagacaggatttctctgtatagccctggctgtcctggaactcactgtgtagaccaggctggcttcgaactcagaaatccgcctgcctctgcctctgcctcccgagtgctgggattaaaggcgtgcgccaccacgcctggcgctaagtgctccttcatagtgctcctacccagggctgcttttgtacacaccatagaactggcagagaggccggtgagcaagaccctccctgctgcctctgatagtgcacatgtccccctgaaaggcacaggcagagtcggacctgggtccctgcttcctagagtttatcaggcatcctgtgtctgctcatgagggagtgaggggaaagaggaaccgcttgctgctaggagcacagcccgtacagtcaggctcagccctgaacggaaacatggatggaactgaagtagtgacatttgcctgccaccccagtgtccctgagaccttccctcgaagcagcttccccagtgggtgtcttcaggaggggatctgtagaaggtggctcgatggccccttggtgtcttctgtttggcaagcacaccacagcctgtttctctgcccctgggcctctcactagggcatttagatcctccgagttattgattgtcacaggccattgtgactcgggtccaactgtgctctgacccaggctcccgtgagccttcctgactccccttccaccttaggtcagcaacggttccggcctgggggccaagcacatcacagacctgctggtgttcggctttctccaaagctctggctgtactcgccaagagctggaggtgctgggtcgggaactgcctgtgcaagcttactgggaggcagacctcgaagacgagctgcagacagacggcagccaggccagccgctccttcaaccaaggaagaatagagccaggtaggtcctggccttgtccacctcatcccaaatgtagcctttactgacccccaaaagctacaagggcttttggagctcagtctctaaccttacattgtcaggctggtgtgtgtgtgcatgtcatgtgactcctgccttgtgatctgcatgtgactgcccccagtaatgtccagttcatatgacatcgcctgtatcaggacaactaattagaaagttcttccttctgatgagtcctgagttctcttcaggtctggacctgaggatcctctctggaccaatatttaaaacatggtttttaaaacatatgtcccaaacagttatagtacagccaaagtatggaaattgattgtctagtttaggcttcattgctgtgaaaagacaccatgaccaaggcaactgttttttgagggggagggggcttcgagacagggtgtctctgtgtagccctggctatcctggaactcactctgtagaccaggctggcctcgaactcagagatccgcctgcctctgcctcccatgtgctggctaggttttttattttattatttttttttatttcttagttctttcctgcaactatcaagtcattcagaaaagaggagtcaagagaggggatgaggtacatttgaaataaaaaactataatgatgattggtcctgcttctgcctccctagtgctgggattaaaggtgtgcgccaccacgcccagcccaaggcaattcttataaaggacaaatttggttgaggctggcttacaagttcagaaggtcagtccattaacatcatggcaggaagcatggcagcgtccaggtaggatggtgctggaggaagagctgagagctctgcatcttgatccagctgtcatcttccgggctgctaggaggagggtctgaaagcccactcccacacttcttccaacaaggacacacttcctatcagtgccactatctgggccaagcatgttcaagccaccatgctggtcaagatgttataacccagaagtgccatcagcttcagcttgtggagttttggaaagtagcaaggcagagtccttcgtcctgccattcagatctgggaggtctgggacattgctagtctggtcatggctgccaggtaagcatccttcaatagccacacagcacctcatttgtgtaggctagctgaactctcaatccagtgaaaactcctgccgttagagtcattttgcctcctaaatgaaactttaacatatgtgacttgctattacctaaagagatgaccgagtattgaagtatcctgaccctcatttccagataaggaaactgaggcacagcagagaaatggctgacctcagatcaaactgcccatgcagcaggagcaaggctcaaccaagctgctccttcatcagtgcagtcacctcctgctaagcctgtgtcactcggctgctcctagccttcacctgtcccctgtcccctgtccccatgctgtgtttacagcaactgaggagacctccctaaaggctgaggtgcagcgagtgctcagagcgctgtgggcagcatgcaggtgggcatcactgagttcttcagagtgtacaggcctggctcgggctctgctcctccagcaggttctggagctgcatgattttttttaaaatgcttgtctgtctgtctgtctgtctgtctgtctgagtatggggtatgcacatgccctagcatatgtatggagtcagagctggctgttttccttccaccatgtgtgtcctgggatcaaactcaggtcaggatacttcaggactctaagcactgctgcctccgatcttggacacagaggcttcactgccctctagtggttgcaagggagaccagcagctagtttggcttccctacccccctctggctagtttatttcttttgagacagggccttaccctgcctagcctgaaatttgttgtgttgaccaggctaatcatgaactcccagaactctgcctgcttctgccaaatgtggttcatttttcaaatgccctgaagtggtatcttgagtaggctgggatgtgacaggtattctctacaagctgggttttaccatagccttgtctccgaagcccaccagtgagccagccagccaggccaaaactgaagagaagcgccaggcagtccaggaaaggctcaggaagttcagggcagcgggaggaggctctggctgtgcgcaggtgtctgtcactctgtgccatacccgcttctttctgcatcagtccatgccagacttcaaagcctggcttaagtcacgagactggggatgacgaggctttgcagacgatcgatcggctgcagattgggagcagggcaaagtagtggcttcagcaagccagtgagcagctgagtctgcctagaacactcggctagtagtggatttaaatcacagggaaccggaagccatgcagttactgtcacctaagcagaagcagtgagcaccagagaggccttgaggagagcagtgtggtgaccatgtgacaggcatggactgagggagggcctggagtaccgctgaatgctgaagcagttgcccactgcattaaagcagcagtgacacaggcaggacacaggacaggagcacccccaaccccccagcccccgcagcagcaagcatataatctgggacaggcctgcttctccagccaggttctgctacccaggccttccctgcacccggggaggggcggcactcatggtcctcactagggcaggtgcggaggtaggaagtggcctgaagctgttgacagaaccattgctgagtcttgtatttgttgcctaaacagattctgaaagtcaggaagaaatcatccacaacattgccagacatctcgcccaaataggcgatgagatggaccacaacatccagcccacactggtgagacagctagccgcacagttcatgaatggcagcctgtcggaggaagtaagtatgactctggtctgggagcccctcttatgggacatttcggaagtgtgggacatttttccttgtcgaaccagtctttcccaggaagtaaaccctgtccttgactgcccgtcagcatggtctctccaaagaatttagtcagagtacagagcttaggagtcaggcctccaggaagatccctgaagtacctgatctgtacagatactcagtcttctcttgtggcgaactccatgtcgttcccccagggtgagcatctgctgggctgtgtggttagaatcagcacatggaaaccgatacaagtccacctcttgctgggtatacggtgaaggacccaaagctcgttcctcagcaccgggtccttcctaaagcagaggtggaggggtggtggggagaggggagagagagaaaccaaaccccggggctgtgaagtacctgcccaaggaggaagattctgttcttaggacttccagcagctgaaatcgtggctgccctcaccatctagattcattgtgcctacatacagcctgtctttgctggcactctctctacctgccactctccagtggctgtcaaagacacacacatttgtcaacagccttgggctcctcctatggggtagattctttaatgtgagccacagaacctgaagctcactttccaccccaccttgtttttttgttttttgtttttttgttttttttttgaggcagggtttctctgtatagccctggctgtcctggaactcactttgtagaccaggctggccttgaactcagaaatccacctgcctctgcctcccgagtgctgggattaaaggcctgcactcccctccccattttttaaagagttaacgttacctgtttctgcgtgcacctcatgtgtgagtacatgagcatgcttgcaggtacatgcattgccatcagatcccctggagctgaagtttcaggccattgtgagctgttgcctataggtgctgggaactgaacgggctcctctggcagagcagtacatgctcttcaggtccaggggtccagtatcttcctttcctgcctgaagggaagataacatgtagcccctaaagctaagctcacagtaacatgagcctaagatgtgctcgtgtccagccaattctgtaagcatctgagtgcagggaagagctcagacgcccatatgtcagtagtgtgtacaggctactcactaaccatgcactggtgagtctccacgtccctctctggtctgtggagagtgaatcctctatcatttcctccacccaacgttcttagctatttaaccaccactcccctctgaaaggctgcttcctcctttggcctgatttggtctctctgaaggaagagcatcagtaaactgtcttctttaatgtacaggacaaaaggaactgcctggccaaagcccttgatgaggtgaagacagccttccccagagacatggagaacgacaaggccatgctgataatgaccatgctgttggccaaaaaagtggccagtcacgcaccatctttgctccgtgatgtcttccacacgactgtcaactttattaaccagaacctattctcctatgtgaggaacttggttagaaacgtaagagccagcagtgacaccagcccctgcctgcttgcctaccctattctaatgcagcagagcctctgctgaagcccctctggcctgctctcccttttgaccacccgcagactgagagaggcaaggctgtttcacaccactgatgggaaccgagcaagctggggggacgtggagtgtttaggaagatgactaagggctcagccccctaagtgtgtgtggtgtgcacatggaagccagaggccattattgggtgcctttttatctcgctctacctatctttgtgaggtagggttggttctccgtgaagtcagaacttgccggttaggctaaactagcaaaccctgggcttccactgcctgccttcccttccctcactggggtaccagttgtttaatgtgtattgatgctctacctgaatgtgtgcctgtggaccatgtgtgcctgatgcctggatagccaggagggtgctgcatcatctgggattgagttgcaagtggttgtgagctgccatatgggtgccaggaatctgaactcggttcttcaggcctctgtagctcttactgagccatctgcacagccccaggtattatgagtaatcagaaagtgactacacttatttgtgtgcgcatgttgctgtgggagcatgtgtgctacagcatagtcggtcaggacgactctgaggtcccagggattgcactcagctcatcaggcttggcactgtaagccatggcccatgacttagattctttcgaagggcgcttcccgaggatggagagagaaactgataggagtaataaatgagttaagtgagaatcgctgtcaagctctccagtaagcctgaggacgggcccattgctagggtagccctgagtttctattgcgcatgctcaggaagtggttacacggagctaagcccaaggtcagtctactgagactgctggaaaatgaccacgtgttcttagagtcttgtgctctggttacacaaacccaagtgggagctggatggagatacctaacctgcactaggattttacaatgtttgggattttagaacctgtcagaaacattatccgagattcttttggggggagggggtttttgtttattctgggtgaaggcagagtccacattcccagatggcaatggaatgcaaggcaatcctcctgcctcagcatctgcaggcatgcacccccacacctgggtgggtggagcagaggacaggtctctgtgtgccaggcaggcactgttgactgagcagcagcccagtgcttgttttctaacgcaccgtatcctccaatgagacttactctgctgcctctttcttaggagatggactgaggagcccgcacaagcccgatggtgacactgcctccagaggaaccgcgaccatggaaagaccttggcctgaagacaggtcccagagaacagctgtctccctatttccaggtggtgggaaccccaagctggtgattcactggacatctctgcgttcagcttgagtgtatctgaagagtttacgccggctcctgcatccacaccatgtacctttgtcctatcagctgtatgggttcccacttgggaatgaaacttaacagcaggctgtaaggcagaaaagcatctttgtaatgccaagtgactgttcctgagagccagctctgggctgtcttcaccatgtaggtgggcttctgtctaaggagaacagcattaggagaggtgcatcggcccatgagcgtgaagtccacccagcctagtggacactgaagtgctcacaaggcctccacctgcctttgtaaaagccgaatggctgatctcaaaccatgggaagcccgaccgccccacccctcctcaccccagcgtttagctgtttcaggggtcagctattatctcaagatttctatccaagtggaaacaaactgaatcatgcacacgacttatctgtgtggtgtcagttacactcaggctcttgctacggaatgcaaagaacaactcacataccagtgtcaaacagaatgcacagaagagacctaaaacagcagcaggtcactcggttcacaaaaggtgactcccagtcaggtctgacacactgtcttggttgtagagcacagctgccatcctctttccctgggtaacatcacagaagattccatatcaaaagcaaatgttccctccgcttctgtatttcagagacaaggcctcactgtatcctcaagcgttgttacgtcttgtgctgaactttgcttaaagctgggatcgtcagcacgagccgccacagcctacaagtattctagttctgaactcatcccagccatggtggctgtgatggcttgggtgtatcatacctgtaaattagtggatttttctttaggaacatgacctttgggtgagtataattgagaaattattttaattcagaaagtacttttcattgtgttctaaaaatatgtgaattgtcttaagtggtagaaatttgtttcttcaaaataaaaggctcttctctagatgtttgggagagctgtatctccaaatgacctagtacatcagaaggtcagaccatcccagcagaaacacacagctgtttgggtcacagttctgagggctgtctttattccagcgacttcactagctctgctgactggggactgaggtgtggttttgtatcccaggaccatgttttcaacactgaaaggcaaaccaagagtgcatgcacttttagaatatgaaacgtgacctgaaataatcccccaagtaaatagtggacaaaaagatgagtcaccagttatcataaaatctcgttttattgtcacctccagggtgcttccccccatgatgttgcttctaaatgaaagcacagtttgtagacttgaattgtcacttgccgataaagaatagattgggcacaaagtagacaacagtatgggaaaggggccggaacaattggaacaattcgcagtaatagagtgagcagatcagacagcagcagtcagctgttggcgcacactgcaaatgaacgctgcctgggttaaatgcttatgctagtttagtttttttttttttaagataggatctcaagtgtccagggctagcctttagctctgagcctagtatggccttgaacattgtcttcctgccttcacccgagtactgggattacaggtacgtattccatgcccaggatggaacccaggatttcatgcaccccgggcagacattgatagctacatctacctgactctgctatgttaaggataaccattccagtacctgggggacaagataccagaaccactaacaaactgagtttaatcaaggagttaggagaaagaggcacttttagtctcaaggaagaaaatcatgggttgtcagagcaggggaaatacaggtccaggagaaaaaggctggccaacagatggcccatggatgtaggaccacacagactgttttaggcctcactaagggaggtgtgtagctcaccttcctgggggaaggcatccacaaacctgtcatctcacaatgacaaaacgtggcactggcaagaaaactccatggatcaaggtgccttccatcaagcattgggacccacatatcggaagtagagaacaaaccaacttcacaagttgtcctctgactcccacatgcacactgtggcatgcagccacacacacataaataaatgaacagcttttcgtatcaaaatgtttgccgaaagc

SEQ ID NO: 1847 - DNA, 3100 bp, Mus musculus
gtggagtagagcgccgggccgagtgtggctccgcaaacctttgccttagcccgttcgccgcccggtaccggcgcagcggcgtctgcgtggtgattccctggactctgtgagctggcagtgcttggagctacacagcttgtgccatggactctgaggtcagcaacggttccggcctgggggccaagcacatcacagacctgctggtgttcggctttctccaaagctctggctgtactcgccaagagctggaggtgctgggtcgggaactgcctgtgcaagcttactgggaggcagacctcgaagacgagctgcagacagacggcagccaggccagccgctccttcaaccaaggaagaatagagccagattctgaaagtcaggaagaaatcatccacaacattgccagacatctcgcccaaataggcgatgagatggaccacaacatccagcccacactggtgagacagctagccgcacagttcatgaatggcagcctgtcggaggaagacaaaaggaactgcctggccaaagcccttgatgaggtgaagacagccttccccagagacatggagaacgacaaggccatgctgataatgaccatgctgttggccaaaaaagtggccagtcacgcaccatctttgctccgtgatgtcttccacacgactgtcaactttattaaccagaacctattctcctatgtgaggaacttggttagaaacgagatggactgaggagcccgcacaagcccgatggtgacactgcctccagaggaaccgcgaccatggaaagaccttggcctgaagacaggtcccagagaacagctgtctccctatttccaggtggtgggaaccccaagctggtgattcactggacatctctgcgttcagcttgagtgtatctgaagagtttacgccggctcctgcatccacaccatgtacctttgtcctatcagctgtatgggttcccacttgggaatgaaacttaacagcaggctgtaaggcagaaaagcatctttgtaatgccaagtgactgttcctgagagccagctctgggctgtcttcaccatgtaggtgggcttctgtctaaggagaacagcattaggagaggtgcatcggcccatgagcgtgaagtccacccagcctagtggacactgaagtgctcacaaggcctccacctgcctttgtaaaagccgaatggctgatctcaaaccatgggaagcccgaccgccccacccctcctcaccccagcgtttagctgtttcaggggtcagctattatctcaagatttctatccaagtggaaacaaactgaatcatgcacacgacttatctgtgtggtgtcagttacactcaggctcttgctacggaatgcaaagaacaactcacataccagtgtcaaacagaatgcacagaagagacctaaaacagcagcaggtcactcggttcacaaaaggtgactcccagtcaggtctgacacactgtcttggttgtagagcacagctgccatcctctttccctgggtaacatcacagaagattccatatcaaaagcaaatgttccctccgcttctgtatttcagagacaaggcctcactgtatcctcaagcgttgttacgtcttgtgctgaactttgcttaaagctgggatcgtcagcacgagccgccacagcctacaagtattctagttctgaactcatcccagccatggtggctgtgatggcttgggtgtatcatacctgtaaattagtggatttttctttaggaacatgacctttgggtgagtataattgagaaattattttaattcagaaagtacttttcattgtgttctaaaaatatgtgaattgtcttaagtggtagaaatttgtttcttcaaaataaaaggctcttctctagatgtttgggagagctgtatctccaaatgacctagtacatcagaaggtcagaccatcccagcagaaacacacagctgtttgggtcacagttctgagggctgtctttattccagcgacttcactagctctgctgactggggactgaggtgtggttttgtatcccaggaccatgttttcaacactgaaaggcaaaccaagagtgcatgcacttttagaatatgaaacgtgacctgaaataatcccccaagtaaatagtggacaaaaagatgagtcaccagttatcataaaatctcgttttattgtcacctccagggtgcttccccccatgatgttgcttctaaatgaaagcacagtttgtagacttgaattgtcacttgccgataaagaatagattgggcacaaagtagacaacagtatgggaaaggggccggaacaattggaacaattcgcagtaatagagtgagcagatcagacagcagcagtcagctgttggcgcacactgcaaatgaacgctgcctgggttaaatgcttatgctagtttagtttttttttttttaagataggatctcaagtgtccagggctagcctttagctctgagcctagtatggccttgaacattgtcttcctgccttcacccgagtactgggattacaggtacgtattccatgcccaggatggaacccaggatttcatgcaccccgggcagacattgatagctacatctacctgactctgctatgttaaggataaccattccagtacctgggggacaagataccagaaccactaacaaactgagtttaatcaaggagttaggagaaagaggcacttttagtctcaaggaagaaaatcatgggttgtcagagcaggggaaatacaggtccaggagaaaaaggctggccaacagatggcccatggatgtaggaccacacagactgttttaggcctcactaagggaggtgtgtagctcaccttcctgggggaaggcatccacaaacctgtcatctcacaatgacaaaacgtggcactggcaagaaaactccatggatcaaggtgccttccatcaagcattgggacccacatatcggaagtagagaacaaaccaacttcacaagttgtcctctgactcccacatgcacactgtggcatgcagccacacacacataaataaatgaacagcttttcgtatcaaaatgtttgccgaaagc

SEQ ID NO: 1848 - protein, 195 aa, Mus musculus
MDSEVSNGSGLGAKHITDLLVFGFLQSSGCTRQELEVLGRELPVQAYWEADLEDELQTDGSQASRSFNQGRIEPDSESQEEIIHNIARHLAQIGDEMDHNIQPTLVRQLAAQFMNGSLSEEDKRNCLAKALDEVKTAFPRDMENDKAMLIMTMLLAKKVASHAPSLLRDVFHTTVNFINQNLFSYVRNLVRNEMD

SEQ ID NO: 1849 - DNA, 60475 bp, Homo sapiens
aattttgtatttttagtagagatgcggtttctccatgttggtcaggctgatctcgaactcccgacctcaggtgatccgcccacctcagcctcccagagtgctgggattacaggcgtgagccactgcgcccggcccagggcctgcccctctagcccccggttgtctccccggcagagtggctgccaggtctttctcgggagaaaaggagagagaggcacctggcagccagcagctccctttccccagtgggtctcacttcttttaaaaatgtttttagagaattaaatacctttcaaaaatgtatctcggaccaaacttgttccctcggggggctgggatgccttccacccggaggccccagcacagggaccacctgcccagccagaccgcctcagcaggcagctcctgcaggtcccgactctctcggctcctccatggccagtcattcccgcccgtcccctgcgctctgtgtctgtagctgctaagttgccgctgctggctggtaagagaattcttcctgtccttcccctggtgtggccatgtattttgacaagaaaagacaagcaggaaattgtctttttccccaagcttcttgcccacgtcaagggcaggcctgctccaccagcatctgccaatgctttgttatctcggagcaatcgcgtgcagctaatgggaggggtctctgctgttggagagggtgggatgggaggagtctcagaatcaagatccaggcaagatcagggataaaaaattggaaacccacttatttcaagccaggattgtgataagaaggactttggtgaacagccctagggtgaggcccacaagcagaagcaatcggatggcaccaaagacagcaccggcccccagaaccctgcagagccttgagtaagcggggaaggcttgctggccttcccaggcatgagcatcctatccctggccccagggagggggtagtctctgctcccaccaggtcaaggtttggaggagggtgaagaacttcgtgcatgagacaaggggcatcagaacaaggtccacccccagcctcctccccctagcaccatcctttcctcctccctggagagtcctccaaggccccggggagaactaaagcacagccacgctcttggcaaggcaccatggcagcagagcacgtaggcgtaagcacatgcagtagagagatttggtgtagagaaatagagattaagtagggctaaggcagctataaacgtcatagttttagatgcattttcaggtgccaaagaattgcccttggctttgagagctggacggtgagctcagctggggctgggagccggtggcaccgtgtagtactgaagctttcccacacagggcccaggggtggcagcgccccatccagggaagtcccctgggtggatccgccattcaaaactttcctgtccttttcctccacgccagcggagatacaggctaagactccctaatgcaggatttcctttgagcatcatgtcggcaaagattccaaaatctgaaaaattgaaacacctctggtcccaagcattctagataaagggatacacacccacctgaaggccccccccccccgcttctccatcagcacctctaaagatgatcccaagagccttcatccctctctccaggaagatcttttactggaggccacatgcctgtgagaaccaagcgctagaccaggcgtctgcctggctggctgatgccgggtgcggctctccaagcctgtttctacctttgaaccaggaaaagaacatccacttctctgccccgtaaacagatcctagacgctgagcactttgggttttgtggggtgctgggccatccctctgtggctgcctgagttggtcccatacaggcatctcttccctgaaggctgacccggccctgcccacggcacgcctgggagcggctcctgcccaggcctatggccggaaacgccacagtggctcctctggctggcatgaacttcacgatgacacctgggtctcagtgcagtttgtaggaaaggaaggatgccacggggtcagatcgtgtgtgggggagatttggtacagaagcgaacacaggaatgaagatggcagaaacgtcacgtaaggcgaggcgtgtgtctgctggcctctcgcctatcgcaggtctgaactgcgcacagcataaggctgcagtgctgagactcagcccctccccggggggccacagcctgggccgttcactctgcacgtggcagtcttggtttctgcacctttgagcagaatgctagacacagtggtggtttgccctctgctcaatatccctctaacaaatcaccatgcaaaacattccagctgggcacagccaccccacgccgggacccccacaccgggacctccactcccttccctctgctgggtgtgatttggccaatatccaaagagttcacttcagaaagggcagggtgagaggaaggatatcatgggggtccctgggctgggccagccctggggcggacgccagagggcccagctccctctgggaaatcctgctcgccctgccccagcacccattctgagccacagccagactctgggagggctgtgcttggagttttccagcccttgggccttaggagttagccctctgaaagttggtggcgagggctcactagcagctgagggttgttggcattagatagagcagtcccagggaaaaggctgcttgaagcaatatgggaaaccccagactggtctttctgcaacagctgagtcatgccagcctcccagagcttctgcagggtcacacccacccagcagcggggctggggaattcctggggtctacttgcctccgctcagtgggtgggactggtcttcaccatggccgtgatttcaccatgggggtgaacatgattttcacccccccaggctctggtcctgcatctcgccatctctcccctctcctctagcaagactcttgccctcacaacccaccggcccttcaaggcccagcgcttggggaaagcacctcctaggcagggagccacccagccaggcaccaccagccaggcccttctctaggctgtcagggcagagccctgggtctaggcagagaggggagctctgtggtcggtgctgacttggccaggagccaccagccccggtgctgtggccctttgatgttggctgagagctctgggccatccctgcagccccagttcctggggaactaactgcagggagggctctgtgcacctggcctcctgccatgtgatggtgtgtgttcactctgtttttccaacccaggtctcgggcaggcgtttattgtcggtttctgtcccagagatgaggggaatggggtggccaggaaggaggaagccttcactccagcaatcaggcccccgccagtactggggtgggctccagttcaggggcttaggaggcaccatggaacgcatgggcttattcccaggggagcagaggccttgtgcagacctcacctcctgcagtgtggggggatgagatgcctggaggggcaggagggagaaatggcccacttggtaatagccattaccgcgtgtcagccctggccagcaggggacaggccacctctgcccctgcctccccagccctgtcctcaggccaggaggacactggcccctccacccctcattccttctgcttctgagagcacctgagcttcagtgagagcacagcagcccggccggggaatgagcggcacctggagacagcccaccctcaagaagagcatggaagtgtctggggcggatggtagggacaggggcttcaggacaggggaaggcggtgggggcagctggcagggagggggtgaagttccaagggtgcactgagaaggggactggggtggaaggggaaaagggcagtgcgtggcagcccctctgctcctgtctttctccccatgcccctcgggagccgccatccagcccccactctgaagcacctcccacagggaccccagccaccccactcacagcacacagagctgctaggagcctcccaccgcactgccgggtaatcacaagccacgcttcctgagcgcatgctgggtgcctaagaccttgcgtttcatgtattcacagcccgcctctgaggaatgtactatcatctctttaatgacaggaaattggggcccaagaaacttgatctggggcctcaggatgcggggagctggaggccagcttttctgggggcagcccctggccagttacagctcacgaagctcgtcaaggatagagctgagaaaacaaactctgaaggctgagctcttaaccaccaagctagaggcctcccgccctcctcttgacctctgccctgggaggcctgcccagacccccgtgcccacgcaccctctgccctccagatgcacagatgcttctggtcagaaccgcaccctgctcttcagtgcaccagtgtcccttgtagagttctgtgccctggcttctatcccaagtcactcgggagtaagctacgcgcactgtctccccatcttcacccagggatgtgaagagctggtgaccgcggagacgctggatgggacagcatcaatctcggcactcttgggaggagaacctcagaggaaagccgggaccccgtcagactgagctagcaatacgccaggtccggagctcccagtctgttactgcagcgagcctgcagaaagagtccgccatcaggaaggtggtggacttctttctccaggtgccgccactactgctctggagccgtgggaatgctgcagtctccttccacagagaacgtgctctccaggtgtgtggagtgcctcagccgacagcctcgggctgcagccacagaggccacgtgctccaggcactgagccagtggtatggggggtctgtcccttgctcctgcaacagcatccttggccctgagctgctgttggtgtcgcagcagggccctatcagatctgcttcacagccgaccagttctcttcctccctctctcccctcccaggggtccgatccccattgtgatctgaaggctgtccctgtccaatcccgccccttcctcttgggtgtcacctcccaccgagctttgtctcagcatctgcttgccggaggatggaaactgacacctctgtcctctgctgagtaataccaagacgaaacccaaaggacttttctcttttgttttttatttttattttagaaacggggtctcactctgttgcccaggctagccgtgcactgacacgatcacaactcactgcagcctccacctcccggggtcaagccatcctcccacctcagcctcctgaggagctgggaccacaggcacacacaaacatgcctggctaattttttatctttcttattttttgtagagatgaacatctcactgaattgcccgggctggtcttgaactcctggtggcccagtctggtctcgaactcccaaaggacttttgaacaaaaactctcaaactcattgttcaccatggaaatgcaaaaccaaaatagcaccgagctatcattttatactattagactggcaaaggtttggaggctagatcctgcccagtgttggtggggatggagcagggcggcctgcaagccctgctgtgggattaaagtgtaccactggggagacctcaccacaggcccaccttagacgggagctctgtccctacagtttggtccccagatatctctctaaagaaaccctcattcgggctcagagcaccgtgtttgaggatatgaatgagagtggctcgtcatggcggcaagttggaggtcactggggttccatggtttgggaggcagttgggcaaaatgcggggctgcccacagtggggaccccatggcactggaggcacacgcgcagcaatgtggagggacccagcagatggagccgggtggagaaaacgcgccagctcacatctcagttaaaacacacgtgcacgagcaacagcacacttgctcgtgagactgcctaggagccagtccacggcgcggagagagccggcagcgctgtctcattcactgtctcagtccagcttccagccctgcgccatccttatgcgagagtccctcaggtgtgtggcaacctcagctctgcacacccagccttggacacccacagcgcaaacagggaccctcccagagctgcccccaagccctcccctggcctgtgtgcgggcgtctgagcgggtggaggccagccatgggctctgcttccctgtgagccagggtctgggctgagtctaacctagaggcccagggtgagcgccggggaggtcacatcattcccggagtttggagggatccaacacagctcccctgaagttggctgtgacttgggcctgtcagaagcagcctgagaggagggtcgcaagcgacccagacctgggaaggagggaaaggtttgaattttgcaaaaaaaaaagataactttgcccttttcgcttgatcttggggggacaagatgggggtgacgcctcccgagaccgggagaggaaggccacctggcgaagctgcagtcccagcattatctgtatgttaaattgatgttttaaatcagagttgatatccaagtaattaaagaataactaacaagcacagggactagtgaggggctgggccagattctctgcaacccatatggcttcacctactttccaaacccccggttctgtgaggaccgaaaatgaccatcccagactattccagaaacagcctggggattctgaaagtttcccagagcataggcagtgaaagagagagaagctcagcccttctggaggggacgggtggctcagaacagaaggtggaaagggagagaagctcagcccttccagaggggatgggtggctcagagcagaaggtggggatgcagttctgggggcgccatggccgagcaccacagacccgggacttgcacaacagaagcgggtttcctcacaattctgagccggaaggcggagataaatgcgtgggcacggctgggttccccggacgcctctctccctggcgcagagacgatgtgttgttctccccgggtccgttcctgtgtgggtgtccgcgtccccatcaggacaccagtcagataggaggagggccatccagtgacctcacttcaccttaatcacctctggaaagtccctgtgtccaagcacagtcacgttctgaggtcctgggggtcagggcttcaacttacgaattttgagagcattcaagtcagcccacaacagtggactctgaaataatcttttaggaactggactcctcaaggacgctttagaaaatgccggcctcgttctgttgcaaaggggtaactgaggaagaggggctgaattttcacaggaagacgagcccggtggcaggaagtgacagtgagaaactgcagcataaagcggaagcaaaggccgactgtgactatgtggtcgccagctcgccttccccgtcaaaccttgctggattttgtgtttcattttcattgccaaaaacatcattcaggtcgggtgcagtggttcatgcctgtaaccccagcactttgggaggccgaggtgggaggattacttgagcccaggagttcaagaccagcctggggaacatagcaagaccctgtcccaaaaaaaaaaaaaaaaaaaaaaaaaaaaggccaggtgtggtggcacacgcctgtaatcccagcactctgggagtctgaggcgggcagatcacctgaggtcaggagttcgagaacagcctggccaatatggtgaaaccccgtctctactaaaaatacaaaaattagccagccaatcatggtggtgggtgcctgtaatcccagctacttgggaggctgaggctggagaatcacttgaacccgggaggcagaagttgcagtgagcggaaatcacaccattgcactccagcatgggtgacacagccagactccgtctaaaaaaaatttttaaaaaattagccaggcgtggcggtgcatgcctgcagtcccagatacttgggaggctgaggcaggaggatcactcgagcctgggaggtcaaggctgcagtgagctgtgatcacaccactgcactccagcatgggtgacagagctagatcctgtttcaaaaaaaaaaataaagtcatcattctctcatgtatgtgtatattgtttcatttgttaattaaggtataattttacatacagtaaaactcaccattcttcgtgcagagttctcacaaaagtgtacaattgtgtggcatccaccacaatccctgtatagaagaatcccatcatccccggaatttccctggacccttccatagccccccagtccgtcaccccctgaattgttttctggcaccccgcccccctttctttttgaagtggttgttttgcaggaaacatcaccctctctcattttacaaatactgcagacagattttgaagcccaaagcatcatagaggcagcagatcaggacagggaggattgaggcggggaggctctaccctgactgtaagaagcacttgagagacctgcaaaaagccaacaggagaggcagagactgtgggggccaattggtacaggtcctgccctgcatgacagggccagtggcccccacagtgctgaggataaaatccaactgctcatccaggctgctggagcctcctgccttcaggccaccccactggcctcttgcccactgtgccccactgtccaagctctcgcctgccctgggaggggcccctgcagcttcttgtgcccaggtgcacgtccctctcttttcccatctgggcgcctgctgacattgtaccatgaatttgaacaccaccctgcagatgacctggcctcagtccatgaagtttccctttcgtcttctgcagggcaccggcccctaatgccatctgacggtttccctgctcacaggatcttccatttgttagccccccagagtgcccagcccgagtgaagagcatgcaggaaacaagcccctgtcctcgtggaggctacattccgagaggggaggtaggcaacacacacacaaacgactccgtggtatgtcatgctgcgatgctggctgtggaggaaaatgaagtgaggcctggtgaaagccagaggccatggggctgccgaggaggaacagggacagggtaggatttgcttagagcagggcaggtcgcgtgggactctgcgggccactgaaaggaacttggcttttattcagaggatgttaaagcgtgagtgacatcctctgaccttttataaaagaggcaagagtctagggagcccgggtagaagtgagggcgtctggaggagccacagtgggctcagggagtgagcccacgcgagggcgcagagcaactggacgctccaacagggctggtggaagtgccgaacggtgtgcatcaccttggaaagcaggcagtttttaataccatgaagctcgtccagccctatgattcgcatttccactcctaggtatcacactcaagagaagtgaagacgcccacaaagggctctgcagcagcactgccggtgagagctgcatccggggatgcatggactggcctgtcattccagcaccttgggaggccgaggtgggaagcatcgctggagcccaggagttcgagaccagcctgagacctccagaggtggagaccccccccccaccacctccactaaaaactgaaaaagaaattagctgggtgtggtgtgcgcctgtagtcccagcattatctatatgttaaactgatgttttaaatcagagttgatatccaaataattaaagaataaacaacaagcacagggactggtgaggggctgggccagattctctgcaacccacatggcttcacccactttccaaacccctggttccgtgaggacctagaatgaccaccccagactgttccagaaacagcctggggattctgaatgtttcccagagaatcattaggaattatcccagcggcgctggagtaagtggccaacttaaagttggacgacactgtctgaaacagtcgcgtaaggggtaagggtggaaagcctggttctcactgcgctgccggctccccgccccgctccacagccccgcgccggcgcgggctccccgggtccccgcaagccgccgggggcgggccggggcgggccggggcgggcccgggcgtggggggccgaaggaggaagcgcgcggggcgccataaggaggaagcgggtagtcgaccgtgtccgcgcgcctgggagacgctgcctcggcccggacgcgcccgcgcccccgcggctggagggtggtgagtgcacccgcgcccctcccggggtacgcgccgagccccagcccgtgacccctgcctgccgcctgccccggcgtggagctcagggcccgccgcccgccctgggcccgaccgcggtgggagccagaggaggggaggcggggggtcagagccccaggcctcagcagcgacctgagggccgggtctctcccgcctcccctccgcccgggcgccctcctcggcgcggccggcaggtcggtgctgagggtcgggtccgcctcggaggcggggaaggctttgttgtgtcctctccacgtggcctggggattcaggggaggggtgcggggcgcggggagggggaggggccgaggccagccccggagaggagaaaacccgcgggcctggccgggtgcaggccacccttgccggcggatcggaatccccgcccacaccgtggtctttccagcaccgcagacacctgccggctcctcccgagcggagctcagggctgacaaagcgcggtcagagcggccgcttactggggctcgcccgctccttagagcactggcaatgatgtgcggatcctcgctgctgctgctgggaaactgttgagtggctgaatgaccccaggggaccctgggagagctctgaagccctcagccaccaagtggctgggctggcaagggttcattcattcattcaacaaatacgaatgtgcagcggtgctggggtcatgatggctcggtgggcagcgaggggccgggccggctggaggagcacagtgcggattctgtaagtgggctgggggctgggccttctgcggctggaccggccttcacctgcaggcagggttggggcaggtgaggagcagatggacccacccagagctcttccaccttctcaggcttgcacccccttcctggagccttatccacaccctcagtcctcgctctcactgtgggggagctgcagaggatgcggtttttccacattccatctccacccacaggaggctttgagatggggggagctctcctgggcctgaatgtgtgccgtcctggggccctgcagtcccctgggagtgatgaccgagaccagattccctgagctggggtcttaagggtgtggggagcgcagagggatcctctggcatcaggagttgaggtagacagagctccagggaggcactgccgggaggacgaccctggccaagcctctgcctgcggcccagggtgtgcgtccctgccccttctgcccctcttgcccagggagggaagaggaaatgcggggtcagcagttcgtggctggggtttaaaggcagggatctcccaggacgggcacagggagcatgaggaagcagctcgtgtctctgttcatgagatgtgagagtggtgactgagacgaggggtgcagagacctgccgtggctggggcgaggtgctgttagtgcttctgaggaggttgggcaggatagacggtggctgtcaggtggtctcaaggttgtgcaggagcttgccagagagggaagcggggcatggccccagggtggtatgggggattctagggggagggtgcctgggtgggaaggggtgtcgcatgcccagctcagaggccttgcttaggggtgctcacaggctcggctgacgtgaggatgctgatcgaaggagctgagggtcccactcatttgcaagggggaactgtctgcccaggagccccagcagtgcccaggcccctggactgacaaggatggatgagggtgatggaggcggatggacatttgacactggagcctgccttccaggcagaagggccgtgagtcatcctctctccggtgccaagtggaggggctgagcaggtcctcgacgtgaccgaggactgtgcccgttttttcaggggacccggagcgctggctctggctgtcagcccatgagagacctccctgcagagctgtggcctctggaaatgcttcctgtcgttgacatctggtcaccattctccagctggggctgtggagggcagcacaggcctggagtgtccccgagagcagctgggcgtctgcccctgcccaccccacagggcctcccactcacagggcctaattagcagctccatggctgccatacctggcggaccgccctcagcggccacatatatccttgccccaagccaatgacaggtctgaagaagacactgatggagctgaagcacaggacagagacaagcacctgtgtgccggacgctcacggagcacttgatgtgtgctgactggctcacatcacggtggtcagacgagggtagcatccccattctccagatggtgtaactgaggcaaggagaggctaagtaacttgtccaaggtcacacccgagggagttggacttcagggtctcagctctgagcatcaggcacactgcccagattccccctccacatgtcacacctgttaggccactgggggtaaggagcctttctgtggcctcgctcccctgtgagcccctgggagggaggcagcccagattccaaggcagcgagtgacgtgtgtgggaaaggggaagcttccggggcaggggttcagaaacctcgcagtggggttttccccaagagccactgctggcaggttcctacagccccatccagccccaacacagcctgcctcttttccttcctcttcctccttttctctttctgcctgcgttggtccaaaatggggaagtttcacataaatggcaaacaggccacaaagcagctatttctggaggtgctgctgccttgcagattgaattcttggttggcattttaggtgtttgttttcaggatccttttctgtagaagaagccaacaactaagaaaaggaggaagtggctttgggaggctgagacgggaggattgctcgagcccgggaggtcaaggctatagtgagctgtgattgcaccgccgcactccttgaatcctatcagcttggccagggtgggggtgggaagtggggtcttaaaggggaaagaccagccgggcgcggtggctcacgcctgtaatcccagcactttgggaggccgagttgggcggatcatgaggtcaggagatcaagaccgtcctgactaagacgttgaaaccccgtctctactaaaaatacagaaaattagctgtgcgtggtggggggcgcccatagtcccagctacctgggaggctgaggcaggagaatggtgtgaacccgggaggtggagcttgcagtgagccgagatcgcgccactgcactccagcctgggggacagagcgagactccgtctcaaaaaaaaagtgggggaaagatcaccatctggatcatagaccagacctgaaagggggctggtcacttttaggtacgtagagtaactggaaagacacactgtcctagtggaagccgtgggtggcctctgtggctgctgtggccccaggggaggagatacctgtcttctggggctgcggctcagtctggctccgggtccggatcaccagggaactttctgcagagcatcctgcctgggctttgcctggtctgcatgggatcccccagcctgtggctcagcccgcttctatgctcatagccatgctggcgccgggggcagtccttggcttccctcctcgttggcttaacaaaccccctttcttcagaggaaggaaagtgtgccgtggcctggtgggacaggctgggcttggaggtgccaaatgtcctgtgtgcttggggacagctgctgaacctccccgccgccgtcacggcccttggccaagagctttcatccaaggctggcagtagttgctctatttctgttatggggcacctctgcatctgggtttggtttaatttgtgtaactgaatgtctcattttattcctcacattcattctgtgaagtttcccttgtctgggtgagtgttcaggtgactacaaccctgggtccgggatgggcggtgttccaggagcttctgcttgggcctctcccattctcccccaaaaccaaagagaagggaaaaccctttgtaagtggatgtcacatgtcaggtgctttttctgatactgcatgtgatcccacaaggcagggagtgtccccttttacagacggggaaggtgagatcacattgcaggttcaaagcccgacatgacctgtccacctttacagcttccctctctgggctgggagtgcgtgagggcttcttaaaatgcagatggacttgggggattgagcttctctggggttctggtgtttttgtagggagagccatctggggtcagggctggggtggggacagcaggagaacaggacaggagtggcaacccagggccagggaagggagtaggcaggggtagcatatgggggtggaaagaaaggggccagtggcacgaagggccctgggaggcagcagcgtgtccctcctgggggtaagtccaggaaggtggccatccccgaggagctccgttcctgtgacaatgaggctaggcctgagggcaccggaggccagcgggcaagtgcacacccccaagcctggcggggcaccacgtgaccaggcctggtattgggactgggagtggctcctgcaccagctggcatctgcctagagacaggaaggtgggtgcctcctgggttcagctgggaactctgagctttgggtgctggaggtcactgcgtttgggatggctgcctcctggacccagctgcctctgtgtgtggagtcagtaaggcaccgtcctggctgcggaactgaggcaggcatgctatgagaagataaaattgccttaacaactgtccccaggatccttccagcaggcacttccttgctgtgccctggaaaagcggggtggcactctggatgacagcacagcctcagggtgcttctctgtggcccacacacccttccggcctgatggccacgtccgttcctgtttacccaagccccacttcccctgaaatccaggcagggagagatggggcctggctgtgagaaacctggccccaggtgtcaccatttccccaaaagccttgtttctccctctgggtatccctgaggacccctgcagacatccagccccaaacccggccaactgagcagggagcccagctaggggcctttgtggaagggtcacccgtgtactcacaccagcagccagccgctcctgggtcatcagcccctccataggagaggggaggcgtttctgccaggggctgggtggcatttctgccaggcaggggcatggcgttggcacggcacaggccctgctgtgctctgtgaggctctgccctgacttggactctgcctgggatgtggtgaaagccttgttctttatttatttagttattatttatttatttatttatttatttatttatttttgagacgagtctcactctgtcgcccaggctggagtgcagtggcacgatctctgctccctgcaagctccgcctcccaggttcacgccattctcctgtctcagcctcctgagtagctgggactacaggcgcccaccaccacgcccggctaattttttttttttttttttttgagacggagtctcgctctgtcgcccaggctagagtgcagtggcgcgatctcggctcactgcaagctctgcctcccgagtttcacgccattctcctgcctcagcttcccgagtagctgggactacaggtgcccaccaccatgccggctaattttttctatttttagtagagaaggggtttcaccgtgttagccaggatggtctcgatctcctgacctcgtgatccacccgcctcggcctcccaaagtgctgggattacaggcgtgagccaccttgcggcccagccttgttctttatgacagagtctacagagagttcagggaggggcggaccaggaggctcaccagaggctcaccagggattctggagtagctgagggacacctgccttcccctgccatccaccatgccccacccagaagcccagggcctgggcaggggagggaggcaggactcccgggtcacaaagacctggagcataggggtccactgacttctggggcctgtggtggagcctccgacctctgggagggggccccagtcacctgaagaggctcttgcctcctcatgtctcctcctgctggctgccttttcaaaaaccgtttgattgagacatactgcacatgccataaaattcacccatcaaagggcacagttcagtggcttagtatatacacggtgtgcgaccgtcaccaccgcctacaggcagaacatttcagtaacccaaagagaagctccagacacactggtggctgctccgcagccctggcagccctaatctttctgtctatggagttgcacatttaggacatttcatactaatggaatcacacactacgtggtcttttgtgactgacttctttcatgtagcatattttcaactcatgttaactgctgtaactcatgttacagtaggtgtcaatgtttccttcattttttattttgtattttttgtagagacagggtctcactgtgttgcccaggtttgcctcaaactcctgggctcaagtgatcctcctgccttggcctcccacagtgctggccttttcttggctaccagaggcaaattcaagcagcaatggaacttttcacttcgcggacgctgtttctccgttttctctccgtgtctctgtttcccctgcccctgactctgtgttctgttggtttcgggcttacccatggcttggtggcatcagtgattgagcattggtttgtggtcatattgttttgctcatctttgtaggcggatgacagagatcagttctctgtggtcagatacggagaatctggatgatcagacttcgttctctgtgtccttagcctcttttgagctcaattcaattcagaattttgtgtccaccgggaaggatacctctttgacacctggtccagggacttttccagtttctgtgtttactcttgccctggggctgaagttgtaattcagaaaggcctttgcctctcactaagtgaatgtggaaaactttttttgagtcattgggtaaggtcatgaagtgtcttgaattggaggaactctattctgattggttcgtgattagcttatgtaagtaaatatttctaagatttccagaacgtaggaaaatcgtacttctaataatttatttctttatttattataattttttttttttgagatggaatctcactctgtcacacaggctagagtgcagtggcgcgatctcggctcactgcaacctctgcctcctgggttcaagagattctcctgcctcagcctcccaagtagctgggattacaggtgtgtgccaccatgcccagctaatttttgtatttttagtagagatggggtttcaccatgttggccaggctggtctcgaactcctgatctcaggtgatcctcctgccttggcctcccagagtgctgggattacaggcgtgagccaccacgcctggctgtacttctaataattttaatgcactagactttaaatttaaaaagaaattcttggccgggcatggtggctcaggcctgtaatcccagcactttgggaggctgaggcaggcagatcacgaggtcaggagatccagaccatcctggttaacacagtgaaaccccgtgtccactaaaaaatacaaacaattagccgggcgtggtggcagacgcctatactcccaactacttgggaggctgaggcaggagaatggcgtgaacccaggctgcggaggttgcagtgagcagagatcacaccattgcactccagcctgggcaacagagtgagactctgtctcaaaaaacaaacagacaaacaaaaaaggctgggcgcgaagtggctcacgcctgtaatcccagcactttgggaggccgaggcgggtcgatcacctgaggtcgggagtttgagaccagccaggccaacatggagaaaccccctctctactaaaaatacaaaattagcccggcatagtggtgcatgcctgtaattccagctactcgggaggctgaggcaggagaatcgcttgagcttgggaggcggagcttgcagtgagctgagatcgcgccactgcactccagcctgggcgacaaagtgagactccatctcaaaaaaaaaaaaaaaaagaaagaaagaaattcttcttacagaaacaaactggaatattttaagaatcttaagttcaggccaggtgcagtggctcacacctgtaatcctagcaatttgggaggctgaggcaggaggatgtcttgagtccaggagctcgataccagcctgggcaacatggcaagaccttgactctacaaaaaataaaagattagccgggcatggtggttgtgcctgtagtcccggctctggaggctgaggggggaggatcgcctgagcccgggaggttgaggctgtagtgagctgtgactgcaccactgcagtccggcctgcggaacagagccagaccctgtctccaataataataataacaataatcatctaagttcacgtaattgatgtaaatctttggcaaatgagactaataatttgggttttaaaaagctatgtcttttcttcagtttctttttattattatactttaagttttagggtacatgtgcacaacgtgcaggtttgttacatatatatacatgtgccatgttggtgtgctgcacccattaactcgtcattaggtatatctcctaatgctatccttccccccttttcttcagtttatcagcattagctataatacaggtgtaccttttgttctacttggcttcctcccctaaacttctacgggtttacttatcaaatcagctaatattactgttacataatgtttaagattatgaaaaatataagtttgtgttcaaataaatgtgttcattattctgaaagtgtactgtaccaaaataaagcttaggtaacttaaaaccttggactgatactaaatggagttgagtaggtattctttggatatcgacatacttactcggtaagacagaatagtaaaacattggttactaggtatacctgggtttttttcagctctaaaaagaggccgtatcttggcctgcagtcatgaccttggcaagtcacttctttcaatgcctcagttccccatctgtcaaatgggggtgatcatactgacctacctcacaggggcgttgttgtgaggcattgtaagtcaaagttaatagaataccgcagggtcctctgtggaggatgtcttgggtcctctgtggaggatgtcttgggtcctctgtggaggatgtcttgagccggacacacaggctttggtcctcactgagctgtctccaagactggaactacttactgactcggcaaattctctacccccacccctcatcagatctgctagttcagatgttgacagtgttttcatgaatgttggaatcttactagtccagacttacttaggatgttgttggggaaggcacttgggattttctgtgtcttgcattcacagagggaggtcatttcagatgcaggagcattggattagggaatcgtgaggcagagatgctaccgcttatttctctctgcaggttggggatgaaagttccattccccatgggtttgaagcagactcagactgtctcaggatcaaagcaaccctcaatggttttgatttatgtcattgcttaccactccccaaccgatcccaggacagctgggtcactgtacccctttgtggtatctgtacccgggcctctccttcctcatagggacagctgattcaataaatgtgaccaccttatttccaccccccaacaaaaagctacattggaattatttttcctagaaatgtgtgtaacactcagaattgggcattgatccttaaagcttcatccgattcactgtattcagcatctgtgatctcttagtgtctgcagtcttaacctaaccttgaccttttttccctctggtttgagaaaagtttggacactatttctacttgcccaggtgtgggctcaagagccttactctttccatctcagtgtaggggcacagccaacgcctcttcccaatagggctctttctcctttccctctccttggccctagatttgtaatccatgaaaaagcacaaggtcctggctgcttgcagtcacattctggttctctgtgttttgtggactgtgctctcactgttcacccagcactagcagtaccagacggttctgtggagtcctggggaatggagagagcacagtctgacgccctgccaagtagccaggagttgacttgcccatggtccgctggctttcccaccacttcctacaggatgggatctaagagactcagtagctgggtttctttcagcacgctgtactgtcccaagtagcaaacaaatcactctgtagccagatttctgaatggaaatgagaaattgaattctccatggacttttaggtttatgggggagttttggttgtgtttcctggttttatttcagccaaacatgtctgcttttgattttttttttttttaaattataagtggtctatatatatgttcaccttgtaaatgtcagtgtttaaaaagagtaagcatttatgtgtttccataactgacatctgatacagacctcattctctccccctcttctaccctcctcttttccctcttttcatactcttgtattggttctaataaatggttgcttttcaaaaaaaaaaaaaaagtatgttttcatgttgaggaagcatagaagggcgcgagtggctgtgaaggctatggtgtgtgtgcccacaggcgtctgctaaacatgtgtctggagacagctctcaactgtcagcctgcggttctctgtaaaatggaagtcagttactttgttaaaagttataataaggccaggcacggtggttcacgcctgtaatcccagcactttgggagaccaaggcgggcggatcacctgaggtcagaagttcgagaccagcttgaccagcacggaggaacccggtctctactaaaaatacaaaaattagccaggtgtggtggcggtcacctgtaatcccagctacttgggaggctgaggcaggagaatcacttgaacccaggagacgaaggttgcagtgagccaagattgtgccactgcactccagcctggatgacagagccagactatgtctcaaaaaaaaaaaaagttataattaatacacatgatggagacaaacagctatgtaaacgcttttatttttcaaagaaaaaatacaggtggccaggcgaggtttctcacgcctgtaatgccagcactttgggaggctgaggcgggtggatcgcctaaggtcaggagtttgagaccagccaggctaacatggtgaaacctcatctctactaaaaatacaaaaattagccggatgaggtggtgcatgcctgtagtcccagctactcgggaggctgaggcaggagaatcgcttgagcctgggaggcggaggatgtaatgaggcaagatcacgccattgcactccagcctgggtgacagagtgagactccgtcttaaaaaaacaaacaaacaaacaaggttttgttttttttcctcaaagcagcacttctcaaactttttggtctctagatccctttatatataaaaattattgaggaaccaaaaagcgtttgattaagtaggcttttatccctatattctgtgttagaattaaaactgagaaattttaaaaataggccagtcacagtggtccttacctgtaatcccagcactttgggaagctgaggcaggaggatcacttgagcccaggagtttgaggctgtagtgggccatgatcgtgctactgcactctagcctgcttgacagagtgagaccctgtctccaaaaaaaaaaaagtgttcattcatttgaaatttgtgaaattgtttaattaaattaattaattaattaattttgagacagagtcttgctctgttgaccaggctggagtgcagtggcctgatcttggctcactgcaacctctgccttctgggttcaagcaattcttctgcctcagcctcccgagtagctgggttacaggtgcacgccatcatgcccggctaatttttgtatttttagtagagacgggatttcaccatattggtcaggctggtctcaaactcctgacctcaggtgatccacccgcctcggcctcccaaagttctgggattacgagcgtgagccacctcgcctggccaacgtaactattttataaaacaaaacatttctattgagaagaacagcattgcgtcagtgtttctgcagatctcctgggtgtctgactgaatagaggatacctggattctcggttgttgcagtatctctttcgctcagcccctgggaaagtccactgtaccctcatgagagaatgacagaagaaactgtgttatggaagcttttcaacctcacagattctctgaaaagggcctcaggcaccctaggatatcctggtccacactctctcctaaagcgatttaccagtgttttccagaatatggtaaaaatgacaaaaaacatagtgaagggcaaaactaggtatgtgccttttatcatcatggtacctgagtctgaaaagcagcaatgaattatgtcacaattttagcaaagtttgctggccttgatggtcttgccttctttgtttactcattaatgcctttgccttcaaagtgaaagattatggccgggtgcggtggcttatgcctgtaatcccagcactttgggaggccgaggcgggtggatcacgacgatgtcaggagatcgagaccatcctggctaacacggtgaaaccccgtctccactaaaaatacaaaaaattagccgggcgtggtggcgggcgcctgtagtcccagctactcgggaggctgaggcaggagaatggcgtgaacccaggaggcagagcttgcagtgagccaagatcacgccactgcactccagcctgggcgacagagcgagacttcatctcaaaaaaaaaaaaaaaaaaagtgaaagattattctttcctttctgtgtaatgcacctggatggcagaggttctgtatagcagaatcatttttgatgctttatgttgactttattatgtttgtgcttatttaaggggaaaaaacaaagaacaaaggttcatcacttgtgaaacatcaggtttgttttgttaatggataatcaagtctctctcagacacccgcgagcctgccttaaacaactgtccagattgcctctaaaactgtccctgagactctgagtgcccctggaaaatcacaaagatttgatcattcaccttataaaaagaaaaataccatagacataatgaggtttgttttaagcgttatcttgtaagacctgcacgggaagagtggttgtcaaatcacaagagacgctggccacagctccttggttcggtgtgtatgtgtaaatgttattcatggaaataattcagaagttctgggcttggcgggaggccccgtgcttgtcagtgccctcccttgctctgtgtaggatattttcattcagaaaatatctgaatgaaatattcagaaatatctgaataacgcatctggccagatgcattagaaaatcgttatgaaaagagactttgagtcttcccatgctgatgttccccatgtgggaaaggattgcctggtgctttcaccagtgactaatagagcctctgggcccaggcttctgcatggacattacctcaatggctctcagaccaccccagcgcgccgggccagggcttcgtgaggctggaagctggctccgagtcctgcagagtgcgacgggctgctgagggaactgaattgtggtggtttgcttggaatatagctgatgtgttcatttctgttttctagatgtaagaggaaatgctttctcattcttagtgtctgtaatccgtgatgatttagtaggctctgctctggtagatggatatgaaacttttttttttttttttttttttttttgagacagagtcttgctctgttacccaggctggagtgcagtggcgcgatctcacctcactgcaacccccgcctcctgggttcaagcgattcttctgcctcagcctctcgagtagctgggactacagttgcccatcacctcacctggctaagtttttgtatttttagtagagctgggatgtagagtagagatgttggccaggctggtcttgaacgcttgacctcaagtgatctgccctcatcagcctcccaaagtgctgggagtataggcatgagtcattgtgcccggccagatatgaaactttttttttttttttttttgagatggagtctcactctgtcgcccaggctggagtgcagtggcgcaatctcggctcactgcaagctctgcctcccgagttcacgccattctcctgcctcagcctcctgagtagctgggactacaggtgcccaccaccacgcccggctaattttttgtatttttagtagagacttagggttagccaggatggtctcgatctcctgacatcgtgatccacccgcttcggcctcccaaagtgctgggattacaggcgtgagccacctcgcccggccgaaacatttttaaatgatattgctttctcagtgaacccccattctcactgtctccttattttttgtggtgatatagttatttgcataggttcagtaagaatctgtcctttttaaaattgaaatttgaaatttaaaaaattttaaactttaataataataataatttttagagttggggcctcactatgttgcccaggctggccttgagctcctgggctttcaagcagtcctcccactgcagccttctgaggagctgagattacaggtgcacaccactacacctggctctgttttttgtttgtttgttttgagacggggtctcactctgtcacccaggctggagtgcagtggcatgatctcggctcactgcaacctccgcctcctgggtttaagcgattctcctgcctcagcctcccgagtagctgggattacaggtgcacgcccggctaatttttgtatttttagtagagatggggttttctccatgttggccaggctggtcttgaacacctgacctcaagtgatccacctgctttggcctcccaaaatgctaggattacaggtgtgagccaccgcacccagcccacacctggttcttttgtttttttttttttttgttttgttttttgttttgagacggagtctttttctgtcgccaggctggagtgtagtggcgtgatctcggctcactgcaacctctgcctcccgggttcaagtgattctcctgcctcaacctcctgagtagctgggactacaggcgtgcgccaccacgcccagctaatttttgtatttttagtagagacggggtttcaccatgttggccaggatggtctcgatctcttgaccttgtgatccgcccacctcgtcctcccaaagtgctgcgattacaggcatgagccaccacacctggcccacctggctcttttttaagtgtatattttttatcgtggtaaaatagatatagcataagatttcccattttaagcatttttaagcgtacagttcagtggcattcagtacagtctcattgtcgtgcaaccattaccaccaaccatctccagaactttttcacctttcaaaacagaaatggtaccattaaacgctaacttgccacccccagcccttggcaggtgcctttgtactttctgatccttgtgaagttgactactctgggcaccccttggagatagaaccacatgtatttgtcctttcatgactggcctagttcgcccagcgtagtgtcttcaagttcatctgtgttgtagcgtgtgtcaattgtatgtcaccccatgttttatttttccactcatctgttagacatctggactattttggccttttgtttgctgttagcatgggtgtgcaaatgtgtgttccaggctctacttttcagttcttcagcgtaatacccaaaagctgaattctaggtcaaatggtagttctaggtttaattttttgagggactggcgtctgtgccttttctcaaactaaaatataactggataagttcctagtgcggccagggccttccctggaatgccgtatttgtgaaggatgctgaccagccacttctagaggaactgaggcgaccgtggagtcagtgcctgcgaggtctcggcctcctgggaagagtagctcggccccagctcacagcgtggcaggaaggtcacttgccagcagctggggaacttaagctctttgagggacctgaataaaagagatatgagactgaatgtacaaacagacatgactggaccccgttaccttcaaggaccccccaggaggccacaggccagcttgtggagccgggtgctgtcactagcaaccatccgggaagccatgcagtaactagagtctatgctgtcagccccacatggccagggcttgattgactggcagcttcctgaagttttgtctctgcttccatccaacttgagaccaagtagagaacccataggtgcacgtaacggatcgatgggtagctttccttggagcctctcccaggcaaacgcgagtgacagcggccgagtcccttgctgttgggagctctgagaacacaccctcgcctcacctttgggtgggcttcactcgcacaggcactacaggagaaacctgctggaattgctttctttttttcttttttttttttttttgagacggagtctcgctctgtcgcgcaggctggagtacagtggcgctatcttggctcactgcaagctccgcctcccgggttcactccattctcctgcctcagcctcccgagtagctgggattacaggcgcccgccaccacgcccggctaatttttttgtatttttagtagagacggggtttcaccgtgttagccaggatggtctggatctcctgaccttgtgatccgcccgcctcggcctcccaaagtgctgagattacaggcatgagcgactgcgcctggcatttttttttttttttttttttttttgggacagggtcaggctctgttgcccaggctggagtgcagtggcgtgatctcggctcgctgtaacctccacctcccgggctcaagcaatccttccccagtagctgggactacaggcacacgccaccatgcctggctagtttttgtatatattatagagactgggtttcaccagattgcctaggctggtcttgaactcctgggctcaggtgatcagcctgccctggcctcccaaagtgctgggattacaggcatgagccagcgtgcccggccgaagcctggtggtttcttaggcttagtttccagccctccaaatagcagattgttgatggtgttcaagggcaatctaagattccttctgaagatagccagggagaagctgcttttgtgccctcattgctgtttgacactgcatggccctaaattagtcaaagaagcataaggaggcttagttaaattgaactctcactgcaccatgtaatggtcaggtcagtctcatgagtcctgcccttttgtgttaaagaatcctttgcggccggcatagtggctcacgcctgtaatcccagcactttgagaggctgaggggggcggatcgcaaggtcaggagtttgagacccgcctggccaacatagtgaaaccccatctctgctaaaaatacaaaaattagctgggcatgatggtgcatgcctatagccccatctgcttgggaggctgaagcaggagaatcacttgaacccaggaggtggaggttgcagtgagccgagattgtgccattgcactccggcctgggtaacagagcgagactccatctcaaaaaagaaaaaaaaaagaaagaaaggaaaggaaggaaagaaagaaggaaggaaggaaagaaggaaagaaagagagagacagacagaaagagagagagaaagaaaaaagaaagaaagaaagaaagaaagaaagagaaaaaagaaaagaaagaaagaaagagaacagaaagaaatgcgactgaactttgcccagtggaaaacgaccagtgccttgtggctgttgggcccagttttgcgtcagtttgtcaacgcatttccagtttccccgttgcctgcgcacacagttcttggactcctttgaatggttttaacatcgctgtttcccctgttaaaaaatgagttaataaaacctttcacatgtgttcacgtaagaacaacaacaggccggctgcagtggctcacgcctgtaatcccagcactttgggaggccgaaggagggtggatcatgaggtcaggagttccagaccagcctggctaacatagtgaaaccccatctctgctaaaaatacaaaaattagtcaggtgtggtggtgtgtgcctgtaatcctagctactcaggaggctgaggcaggagacttgcttgaacccagaaggcagaggttgcagtgagccgagatcgtgccattgtactcctgcctgggcgacagagtgagactccgtctcagaaaaacaaacaaacaaacaaaaaaccaaaaaggaaatcaccttctccaaaccctttatttttcttttcttttttttttttttttgagacggagtttgctcttgtcgcccaggctgtagtgcagtagtgcgatctctgctgactgcaacccccgcctcccaggttcaagtgattcttctgccttagcctcctgagtagctggattacaggtacgcgccaccacacccggctaatttttgtatttttagcagagacaaggtttcaccatgttgaccaggatggtctcagtctcttgacctcgtgatccacccgcctcagcctcccaaagtgctgggattacaggcatgagccaccacgcccggcctccaaaccctttatttttctgaagacaccaaggcacaaaaaagtgaagtgtcaggaattcctttccctacccctctccttttctgattaattcttgggcattcttcagccctgacccaaatggcactgccccttctctgggtcaccaatctaggccatggtccatgtgtgttcacatttccgggttggagctttccttggcactgcacggagcatgctgtgaagtttggtgggtggatcgacgttcctagagcagcacgatgttcctaaattagcgggcatggtgctgggcacctgtagtcccatctactcgggaggctgaggcaggagaatggcgtgaacctgggaggcggagcttgcagtgagctgagatcgtgccaccgcactccagcctgggcgacagagcaagactccgactcaaaaaaaaaaaaaaaaaaaagaaaagaaaaaaagaaattcaggccaggcacggtggctcacgcctgtaatcccagcattttgggaggccaaggtgggcgatcatgaagtcaggagttcaagaccagcctgcccaacatagtgaaagtccgtctctactaaaaatacaaaaattagccgggtgtggtggcacacacctgtagtcccagttactcaggaggctaaggcaggagaatcgctagaatctgggaggcggaggttgcagtgagccaagaccatgccattgtactccagcctgggttacacaggtgagactctgtctccaaaaaaaacacaaacaaaaacaaaaacaaaaaaactggaaaagaaattcagtgagtcagctgtttcctgtgagtgggactaggaagacagggatgatgttgaccaaggagtggactgccctgcagatatctggcccttaaaaatcttcttctgggagcacctgtgtgctgtgcttgtccccgtgtgacccatgcctctatctgaccaactgcatggtgttttcaatgagttccaggacatttggcttccagagtgcatgggaggcacataggcctcagaagcaaagctggcatctgagcatactcgtgagggcctggcgccccctggctcagcagcagcgaagctgccccctgccctccctgggcaccctggagcctcagtcgtgtctccgaaaccagggcagaagcgccttcctggcgaggccgtggtgaggattggaggggaggcctgcggaggggcctggcggtgcctgctggggtccttgttgtcagagatggtatttgtcacccccgtctggcaaagtcctggagactgggggaatgtcacccccatccggcagagtcctggagactgggggaatgtcacccccgcccggcagagtcctggagactgggggaatgtcacccccatccggcagagtcctggagactgggggaatgtcacccccatctggcagagtcctggagaatgggggaatgtcacccctgtcctgcagagtcctggagactgggggaatgtcacccccgtccggcagagtcctggagactgggggaatgtcacccctgtccggcagagtcctggagactgggggaatgtcaccccagtcctgcagagtcctggagactaggggaatgtcacccccatctggcagagtcctggagactgggggaatggcacatgcagggctcggcacctcaccctgctcactgcgagggccttggggaacctggctgtgagtgtcctggcatgagggcagcctcactgaggtgaggcagggtatttcccgtttcccatctgcctggccgtcttcccactggcccttggaagagagagggcatgaactcctggctgcgtgagtttccttcttactagcaactttgtttaggagttgggatgggcgtagggccgctattgacgggggagcctctgtggtttccagggcgtctgcatccacgccctcctaggcccactcacagctgcagttgactcattggatttcttcttaagtgacaaatgaagccagaggttacccgatgcagggctggtgctccacctaaagttgaccagccaggcctaggaatgccactccctgctcctaaagccctccaagaccgttgcctaggggaggcggcctcatgtcccaagggatggggcccccagggtctgggccgtgtggcctcaaggcacagctcaggggagctgccctcactctgtcctctcccgagactgccacaacaccttgcccctctgttatcccatatgatcatggatttgatagaaaatgtcccattcgggggctgggcgcggtggttcacgcctgtaatcctagcactttgggaggctgaggcgggcggatcatgaggtcaggagatcaagaccatcctggctaacacggtgaaaccccgtctctactaaaaatacaaaaaattagccaggcgtggtggtgggcgcctgtagtctcagctactcaggaggctgaggcaggagaatggcgtgaacccgggaggcggagcttgcagtgagccgagattgcgccactgcactccagcctgggtgacagagcgagactccatctcaaaaaaaaaaaaaaaaaaaagactgggcgcggtggctcatgcctgtaatcccagcacttcgggaggccaagacgggcggatcacgaggtcaggagatccagaccatcctggctaacacggtgaaaccccgtctgtacgaaaaatacaaaaagttagctgggcgtggtggcgggcacctgtagtcccagctactcgggaggctgaggcagaagaatccctggaacccgggaagtggagcatgcagtgagccaagatcatgccactgcactccagcctgggcgacacagtgagactccgtctcaaaaaaaaaaaaatgtcccattggggtactcatcacagccctgtctttagtggtgacaatgctaagctattcacatgcccaacactggggttagtggtattcactgtgtatgtgacacaccagcatgggttagtggtattcctccatgatgtgacaacatcggtatgggtcagtggtattctgctgtgtatgtgacacaccagtttggattagtgggtattctgccatgcatatgacactggtatgggttagtggtatttgctatgtatttgaacacactggtatgggacttcggccctgagcactagtgacactttgagctggatgagttgtgggtttgagctgatgagccgtgcccccactgctacccgctacgtgccaggagcacaccccccataaatgtctccagacagctccagatatttcctgggtatccaagtcgccctggcagagaaacactgcatgagacacggcgttagggtctggtgggagactcaccacagtgccaaggtggctgcagtttgcttgtgacatgggcgtgtatctgagtgtgaaggaagctggtttttgtgagctgcctcccgagctcagaggtgacagtgggcactttccccacagagacccctgaagttgttccttggagaacaaagtggtgaggggcggggattccagaccttgaggcagaagctagggtctggtccactgttctgtggactgggcagtggccctgggaggtgccgtggcctctgtggcctgtttcctggggtggggtctgtcttgcgctttgtctcttgtgggtgcagactccccttcctctgctgtggagccggcagatggccccggagccagatcctggtgcctccctgtccacatgcagctcagtcatttgctcttggtcccttcctatgaaatgcacggccacacacagccagggtttctcctgggctccccagagggagagtagggtgcagcctgcaacagtgcagggtccccaggcctgtgtgagcccccaggtggggaggtgggtgatgcgcatgtcagtgctacctcctgccacctcctctctgcctgggcacaggctttctcctctgtttgctttttatttcctatgtattcaggaaccatgtgaaattgccaatgcttggttttgtcctacaaaatggccatttcatttggttcaacctgatattgtgtctacacacacacacgcacacacacacacacacaggcaaatactttttaaaacaggattattctattcacagtgttctgtagaaatttgtgttcagtctttttttttttttttgagacggagtctcgctctgtcgcccaggtcggactgcggactgcagtggcgcaatctcggctcactgcaagctccgcttcccgggttcacgccattctcctgcctcagcctcccgagtagctgggactacaggcgcccgccaccgcgcccggctaattttttgtatttttagtagagacggggtttcaccttgttagccaggatggtctcgatctcctgacctcatgatccacccgcctcggcctcccaaagtgctgggattacaggcgtgagccaccgcgcccggcctcagtctttttaagacagcttactgtactgatgccgcacagatcttttttttttttcgagacagggtttcactctcgcccaggctggagtgcagtggtgcaatctccgctcactgcagcctccacctcctgggtgtaagtgatcctcctgcttcagccccccaagtagctgggcccacagggcttgcatcaccacacctggctaattttgtatttttgtagagatggggtttcaccatgttggccagactggtcattctttttgagatggagtctcgctctgtcgcccaggctggagtgcagtggcgtgatctcggcttactgcaacctctgcctcccaagttcatgccattctcctgcctcagcctcccgagtagctgggactacaggcgcccgccaccacgcccggctaattttttgtatttttagtagagacagggtttcaccgcattagccagggtggtctcgatctcctgacctcatgatccacccgcctcggcctcccaaagtgctgggattacaggcatgagctactgcgtccagccggaagatttaattttttaattgtcaaatccattctctctctctataaacattttacattttatgataataaaataatttgtgagcccacggccccgtttccctgatgcctgaggtcttcctggggcggcatgggagggctgaattcaggtgcggggtcggccccagggcactgagcgcctgggtgagtatctggaatgaggaaaacaaagcttggctcccgccaaggagaaagaaactcaggatgcggggctcaggccaggacctcggctcagccgccatttctggagcacaggccagcttcgtcgtcctcccgaggggtcctgaccagggcttcccaggagcggccgcccactctgtgtgtccctttccaggtcgccactgggacactgtgaaccaggagtgagtcggagctgccgcgctgcccaggccatggactgtgaggtcagaggccagatcccctgcgggtgccttgtggggggcggggtcgaggggtaagggcctgcgtgtcccccaccacgcatccctgagggctgaggctgagcccgcctggcccttaccacagctcggcacagacgaaccccgcccagccccttcactgaagcaggcgggagccgggaagtcctacctttccctgtcctgcgccttcctcgcactccgcttgtggtgcagcccctccacaccgcgcctggggctaactgcaagggcgagggggctttgggtttaagaccatttaacagccataggctgtgggtcccagcactttgggaggccaaggcaggaggattccttgaggccaggaggtcgaggctacagtgagctgtgattgtgccactgcactgcagccctgtccaaacaaacacgaaagagatttaagaagaagaaagggggcattagataagcacttcatataattctctcaactgtaaaagcaagacaatacttaccttgtctaaccaatgccattgctatgaggagcaaataaatcaataaaggtcaaataaaagtactgtaaactgtaaggtgtttcaaaaattttttaacccactggatttaaatttcccttcatagctgggcgaggtggcttaggcacataatcccagtgacttgggaggcagaagcgagaggattgcttgaagccaggagtttgattgagacaaacctgggcaacatagtaagaccccgtctttataaagataaaagcggtggagttctgggaggggagcccggagcccccgccttcagcaggacgctccctggatgcttccttgtctctccttccctttaaatggtctggggagagaaaaatcacagcacacgggtgctctctcccacccgctgcatcacatcctcctcccctccctcctgccgaattctgcagcctctgggcgcctcacgctgtcctggcagcctctgggaaggcatctgcgaagtctaatgccttggcacttagtgactgtgtcgcagttcctgagcatggagagcacccggcacccaggaggttctcaagctgcccctactgggggtcctttccaaaggtggggacggtgtggatttcagcgtggtggctggagggctgaggcagtggctcgagtttgatgttagttacataaacagaggagattgcaggagctcccccggccctgatccaggcttgttgtcagtgtccaaaagaccactctgggtgccactgtcccttcccacctgccgctgctgttccggcttcgcgctctggcggcctccgcaggtagaacaccaccgtcacccgcgcagcgccctgactcgccggaggaggcgcctgccctcccgcccgcctctccccggccccctcagtgagggagggtggacgtcgccactcccctttcttgccttcggagtgaggaagcggaggcagcagtacggcagcccgcccagggccacagagctggggtcacagcgaaacactccgaaactttcttttcaattatagggttcagccttttttcccatcataactttaattctgtgtagatacttctattttttatttttatttttttttttgagattgagtctctgtgtcgcccaggctggagtgcagtggcacgatctccgctcactgcaggctccgcctcccgggttcaggccattctcctgcctcagcctcccgagtagctgggactacaggcgcccgccaccacgcccggctcattttttgtatcttagtaaagacggggtttcaccgtgttagccaggatggtctcgatctcctgacctcgtgatccgcccgtctgggcctcccaaagtgctgggattacagatgtgagccaccgtgcccggccttattattattatttttttgagacgcagttttgctctgtcgcccaggctggagtgcagtgatgtgatctccgctcactgccagctccgcctcccaagttcatgccattctcctgcctcagcctctcgagtagctgggactacaggcgcccaccaccacgcccggctaattttttatattttagtaaagacggggtttcaccgtgttagccaggatggtctcgatctcctgacctcgcgatctgcccgcctcggcctcccatagtgctgggattgcaggcgtgagccaccgcacctggctaatttttgtatttttagtagagatggggtttcaccatgttgcccaggatgttctcgacctcttgacctcatgatccgcccgcctcggcttcccaaagtgctgggattacaggcgtgagccaccgcgcccggccagcaccatcttttcctttccactggaactgatcttattatttttgcctccattagatcatttttgtaacatgtcttgcaggatttactgtcttgatcgtttctcttaacatatttttttcctgtgatctaaaaagataaaaaactatcaattcttttatcaaaagtggatctagaggctgggcatggtggctcacgccagtaatcccagcactttgggaggccaaggtgggcagatcacctgaggtcaagagctccagaccagcctggccaacatggtgaagccccatctttactaaaaatacaaaaattagccaggcgtggtggcacgtgcctgtaaccccagctacttgggaggctgaggcaggagaatccattgaacctgggaggcagaggttgcagtgagctgagatggcaccattgtactccagcctgggcaacagaatgagactctgtctccaaaaacaaagtggatctagaagatcaaaaaagggcatgattccatattggcacagcacaagccctattcttggaattaaatggcatccatcttccgagcccactcctgtcctgcagggccggcccagcctgtccctgaggcactggtccagacaggagcctgtccacacagctgtccactcagtgggcccagtgcttggcttcacggtcacttgcggcacctagacctcctctggcaggtgccattctttcctctccctccctgccgcctcgagtctttattttctgtgggatcttgagtttgataacctgacctgctgtggtggcagcgccgctctgtgtccagattctggatgccaatttaccaagcgcaggtcaaaaagaagtccttgggcagcggctgcctgcgttagcttcttggggctgctgtaggcggttccaagcaggagagtggctttaaacaacagatgcggatcccctcccggttctagaggcccaaaggctggaatcccatgttgcccggctgcttccttctggggcgctctcctggctcctgtggctgcctctgtcttcacatggcgtcctctctgtgtgtctctgcttaaatctccctctcctttctcttacaaagacaccagtcattggatttagggcccaccctaatccaatatgacctcatcttaacttgattacatctgtaaaaaccttattttcaaataaggtcacattgacaggtacttggggttaggacttgcgcttttctttttgggtgacacagcttagcccagcactaactgtgtcaccaggactgtcgcttgaggcaggaatgaagcacatcctgtttgtaagctgtcttgtgccatgcggctgctccgtacaagaattgttaggaattgatgcagtggaattttgcatacagtttttcctctcttcagaaacaactttggagaagtaaaggctgaatagcaatacacaagcaccttattttattttattttagattcaggggcacgtgtacatgtttgtcacatgggaatattgtgcactggtggggactgggcttccggtatcgcatggagagggactctttctgcgctcccccgcccccgcctccctactgtaaagtgcccggtgcctgctctctccatcttcgtgtccatgggcacccattgtttagctcccacttataagtgagaacagtcagtatttgattttctgtttctgagttagttcacttagggtaatggcctctagctccatccgtgttgctgcagaggacatgattttattcttttttatggctgcagcaatacacaagctccttatttttatttatttatttatttatttttgttgtttgtttgtttgttttgagacggagtctggctctcgtcccccaggctggagtgcaatggcgcgatctcggctcattgcaacctccacctcccgggttcaagcgattctcctgcctcagcctcccaagtagctgggactacagacgcccgccaccaggcccggctaatttttgtatttttagtagagacaaggtttcatcatgttggccaggctggtctcaaactcctgacttcgtgatccgcccgcctcggcctcccaaagtgctgggattacaggcgtgagccaccgcgcccggccaagctccttattttaagcattttttttttcttttttgagacagggtttcactttgtcacccaggttggagtgcagtggtgtgatcatggctcattgcagcctcaaacttctgggctcaagtgaccttcccgcctcagtctcatgagtagctgggactgcaggtgcatgccaccttggctaatttttattttttgtagagatggggatcttgttgccaggctggtctcaaattcctgggctcaaacgatcctcctgcctctgcctcccagagtgccgggattacaggcatcacctagcaaagcattaaaacaatttgctgctgggtgcagtaggtcacacctgtaatcccagcactttgagaggccaaggagttggggggagttggggggcgggcggatcacgaggtcaggagttcgagaccagcctgaccaacatggtgaaacctcgtctctactaaaaatacaaaaattagccgggcgtggtgatgcacacctgtaatcccagctactcaggaagctgaggcgggagaatcatttgaacccaggaagcggaggttgtagtgagccgagatcacaccactgcactccagcctgggtgacagagcgagactccatctcaaaacaaaaacaaaaacaaaaaaacaatttgccctgtaagaactgtcctctaaaagtttttggtttttctaatgaaaaatattatggacttagagaatagaaataaatttctgcctacacttccatcttccctcccacccttctctggcagcccaggaggtctttttgtgtgaatctgcgcagatctcagcgtccctgcccttctttgtgttttgttctctcttccaccttaggtctttctctggtctgggcacacccagctgcagggctcacctttgcctgtaagaatacagcccccaaacacagtcagtaccccaagaacagtccctgccatctctggcggcacagatgctggccaagctgcagctgccagtgctgcccagggagctggagagctgccggccaagagcccagcccctctgggtagagcaggagccagtgccaccactccctgtgggattcggattaaggacacacccacccaaagtaaaccaagcttggccaaaggcaggtgcccagctgtggtcaccactccgcagtagttactgaaaatcttccatctgcccaataccctcctgagcccgtgaaggagatgagcggaaagaggctccgcctgttggaagcacagccaggaaaggtgggctcagattgctgaagcctgcaggggaacttgaagaaagcgtgccagcacaggatggcggatgatgcccgcatgacactcgctcgcctccccggaacagcctgtggccttctcacctagtgggaagctccccagccgcgtgtttcaggaggtccagcagattcctctgcagaggaatccctttctgcagagtcggggctcgctccctgccatctacgggcagtgctgcttaaagctgtggctgcagaccttgcctctgcctgttgagacctcctgcagggccctccagcccacagggtccctcagctctctgggacctgtgaggctctttgggccagctgcaactggagctctttgcaggaggggcctctggcctggctgaagtcccggcttcctgactcccctttcccctcaggtcaacaacggttccagcctcagggatgagtgcatcacaaacctactggtgtttggcttcctccaaagctgttctgacaacagcttccgcagagagctggacgcactgggccacgagctgccagtgctggctccccagtgggagggctacgatgagctgcagactgatggcaaccgcagcagccactcccgcttgggaagaatagaggcaggtaggcggccggccccacctccttccccaaagctgggcttctctgtcgccagtaacattcagggagcctcagggctggaagggacccccgggatcactctgcctctgcagtttcagctgccacgtacgctggtatcacttaatcacttgactggtctctacttgattccctccagtgctgctgaactcactgcctaccatttttgggtgactctgttagaaagttcttcctttctgttgagacagaatctcatgtactggtcttgagtcccttgtctggaccaacatagaatggtgtttttatccaattttccaaatgtgattctgatacaaagattgcagaccacttgtctggattatataacccaaggggttctcacacttggccttgtatcatttcaaggacctggagctttaaatgctggtgcctgcatctcacctccagagattctgattggttggtctgggcattgctgggtctgggcaaagcccccaggtggcactaccggtgcggcccctgcctccccaagcaggcctggctgactgtcccattgattgaggcccactggtttcacagtgacttttgcactgtctatacctgacatatttcctttcatacattatgctccgtgattacctatacaagaacacagaagtatttggaacctcatttccaggtgaggaaacccaggtccagcaaagggtaaatgactagctccagatcacacagcttgtggccatgttaccactgggacatggggccaggccccttcttgaggtgggcctcagccgccctcccactgtagggcactgactccaggtcaccatggtttccagactgttcacctttcctgttgctgatccctgcactctcctccagcctccagctccactcccctttgccaaggggctgcttctatggacaggggctgtcccgagtggaggctgggggcgagtggaggctcacccacttccagatccagccctgcgacgctggctttcagtagtgtgcacattggaattacacgagaaaccttttccaaatgcaggccttgggccctactccagctgcctgcatcaggctgttttagggcgggagactgcccagaggattctgacgcaggtagaatccctgccctgaaagcctgcagggatccccggaccctggtccaggccttccaagctcaagggttgcactgccctctggtggctgtgggggagaccaacagctgacccagccttctgcctcccacctgtcttagatcaggtgcttgaggacgtggctggagttccccactagaccggggtgggggtgggggtggggggtggggggaggtgtctgagaatgtctctgccttctaatccagccagcatatcttctggctcgccctgaactgaggagaaaccccagatccctttgggaaggtccaggaagggcaggagtggacaggcacagctctgctgtcagcactgctgtgggggtgactgtagccccagtctgccctggtgtttttctctcgctcttctccatgccggcctttgcctctagactgagaaaccggggttgactcaagtggcacctgcaaaagtgatcatggcagttcacttagcctgcaggtgacagggactgtgaatctagtccctggcgagcctggaaagaggggcaaggtagaggctctggctgccggggtttctttggtgagtccgttcactcggctggacacagacggatcaggaaagattcctgttgctactcggctggtggccagagggagagaggacgtgtccgtaactgaagcaaggtggataagcttcgggaacgagcgaggcacagattctgtgctgggggagtgatgaggtgctggaggagctgggtgctctgctctgcagggaatcaggaaaactttggggctgcagctccaattgagctgggccttgggggttgggtatgtttggttccttggaaactgggaagagggaatggccatcttttaagcaaaagcccagcggctataaatgctacagtgaggctgggtgcagtggttcacgcctgtaatcccagcactttgggaggccaaggcaggtggatcatgaggtcaggagttcaagaccaccctagccaagatggtgaaaccccgtctctactaaaaaaaatatataaaaattagccaggcggggtggcgggtgcctgtaatcccagctacttgggaggctgaggtagagaattgtttgaacccgggaagcggaggttgcagtgagctgagattgtaccactgcactccagcttggggaacagagtgagactatgtcttgaaaaaaaaaagaaaaaaaaaagctacagtgagtagttgagtttgcctaggaagcgtggaagttaagtcagacgtactttcaggctgggtcatgacttgtcacttaagcagagatgagcacttgagaggttttgaagagaagtgatgtggcagccttactgcatgttccatggacagactccagggaggccgtgaaacccccagagcacagcttctaagaacgtgcccactccttagcacgtcacttctcccaaccctgccctgctctgaggtctgtgctgtgaaggtggccgagtagactggacggcagggagtggggctgtcatcatcagatgagagctaaggggacccccaccagggtggcggcaatggcagagggtaggcaaaacgcttgtatttgcaacataaggtgagatttgacagctgaccgagggtgggagcagcagccaaaaccaaaaaagccagagggaagttgcaagcacagaaaaaatagaagatttaatgggagaaataacaatagctggcatctattgaacacttactgggagctaggtacagggcccattcattcattcatgcaattaaaactttttttaagaaacggggtcttgctctgttgcccaggctggagtgcagtggtgtgatcacagctcactgcagccttgaattcctggcctcaaggagtcctcccacctcagcctcctgtgtagctgggattataggtacgtgcggtacacctggctccctttaaaagttttttgtagaggcagggcacagtggctcacacctgtaatcccagcactttgggaggccaaggcaggaggatcacaaggtcaggagttcgagaccagcctgaccaacatggtgaaacccgtctctacttaaaatacaaaaattagccgggtgtggtggcgggcgcctgtaatcccagctactcaggaggctgaagcatgagacttgcttgaacccaggaggcgaaggttgcagtgagccgagatcgcgccactgcactccagcctgggtgacagaacaagactccgtctcaaaaaaaaaaaaaagtttcttgtagaggcagggccttgctttgttgctggtgcaatcacggctcactgcatcctctaactcctggccttaagcaatcttctgtcctcagcctcccaaagcactgggattacaggcatgcatgaccacacctggtccctgccattgtttattgagcacctactgagtgccatgtattaagtgctgggtatttgtcagtggacaaaacagattaaaaaaatcacagcccttagggagcttaccttctggcaggggcgtcagacaataacacagcaagtgctgaggaagaaacggaggcggcagggagcgtggcagttgagcgtggccttcatggagctgcgacagtggtactcgggcaggggcagcacggaggctgtgcgccagaggaggaggactgaggggcaagggggagagctctggttggaaaggcaggggagattctccagggccttgccggtgccagtgacaactggggttttcctgagacgggactgcgaggaatgggggctctcaggcttgagagggcaaaggtgggtctgggatgccgtctgcccacagagccccttccccaacggctgcccaggccaaggccaaccctgttgggttgtgtggtgtgagccatgaagccgctgccaggtttgtacctcaggcgtggtcgtgatgccccagcttcaccggccctgcctgtggggacgtggtgcctgtgtgcgggagcctgggcctcagccgaggccctgagctccggcactgcccagaacccagctcagcgctggtactcagcccgcccgctgtggccctggtggagtggagcacgtgcccagtgggggctggccttgtcccatcgcggacctgtcctttcccggggcagggtggtgtgggagagggtatcagggacattttctgagtctgctctgtctctgccgcccctgcccgaacacagattctgaaagtcaagaagacatcatccggaatattgccaggcacctcgcccaggtcggggacagcatggaccgtagcatccctccgggcctggtgaacggcctggccctgcagctcaggaacaccagccggtcggaggaggtgagtgagggcctgaggaccgcgtgggcgggcaagtgagccaagggggcctgtcccctgcctctcaccaggcagcccactgtcccgtgaggccactcaactcgtgactgtcaggtccagaactctgacgaagtaactggacgtagggcatggttcattgccttgcagatttcagctggttgacatcgaggaaacctgaaccttaaatcagagtaaagagtttaggggtaaaagcctctaaaagatgaacgaagcatgtttggccaacagaagaaacagacgcttcctttggttgtagggagtttaataatggtgccagtgagaaccgtaagccctgggagtggtgcctgctgctctgctgagctccttggttggaatccacacaactttctgagctctaccatctgcttggcactgttggggatacaagattggtccggggcactgtgtccccagaacacttagcggaaagaactacatcctcccaactgccaaatgcaggcctgtagcggtaggagctgagaggagagaaagttccactttttcgactctaccagctgaaaatgcaggcgtcctcacctcctagaaatccaatcatgcttctgttcagtggggccagcctgtgatgtcccagcagctgcctagaacgcaggagtggctggcgcactcccatgtaactctgcatgtgcgccgaccgcctgacggtccttgccagccttgtagtctgtctagtgtcccccaggaacccccttcctcctgtccattcagctaggtctgcaccaataaaatgggcctaaggcgtcgcaggtggtcactagttctggactcgaagtgccttgggcgcagggatgacccaggcttcttgtatcccatcaccgtctaacagtgggcacatgggctcaccacacatgcgtttgcttaccgagccccctgcagggagtgatcgcagtcttccctttccattgcctctcagaactcaactgtttctcattctttccgcccagcagccctggatacttaataagtactttgaagtgcttcttcatactggggactgtctttcctttgagagggaagagtattagtaaaccaggttctgtgtgcccctctgtgcaggaccggaacagggacctggccactgccctggagcagctgctgcaggcctaccctagagacatggagaaggagaagaccatgctggtgctggccctgctgctggccaagaaggtggccagtcacacgccgtccttgctccgtgatgtctttcacacaacagtgaattttattaaccagaacctacgcacctacgtgaggagcttagccagaaatgtaagaacccttgaggtcagctccttccctgcctgccgcccatgcccttttctctggaaggttgagaagcccagcggggcccctgcctctgatgccagcacaagggttacaggctgtcctgctcgggtttggttttgctgttgtgagctagaaagctgtgtgtaaaggtgacgaagagcacccagagtcctttggagctttagcagcttactattggagacatgctccattcagaggggtggcaaaggctcacgtcacactcctggtggggtcctcaaggcacaagcaggtacagagtggaaggaaggggctggagggctcacaatgagcttttcagacctctcaccttgccataaaaaataagtgtaatgtggccagtgcggtggctcatgcctgtgatcccactgctctgggaggccaaggcaggtggatcacctgaggtcaggagttccagaccagcctggccaacagggtgaaagcccgtctctactaaaatacaaaaattagccgggcatggtggcgcacacctgtagtcccagctactcaggaggctgaggcaggagaactgcttgaaccctggaggcagaggttgcagtgaactgagatcgcaccactgcactttagcctgggcgacagagcaagactccatctcaaaaaaaaggtgtaatgtgaaccaaaacgagtagtcaaaaaagggggggaactgtctgaaatcttttccagagcacatctgtcccataaccaggtattacaagtcacagtctaaaggctgggcatggtggctcaagcctgtaatcccagcgatttgggaagcagaagcagtgggattgcttgaggccaggagtttgagacaaaactgagcaacatggcgagaccctgtctctaaaaaatttataaaaataattagctgagggccaggcgcggtggctcacgcctgtaatcccagcactttgggaggccaaggcaggcggatcatgaagtcaggagttcaagaccagcctggccaagatggtgaaaccccgtttctactaaaaatacaaaaaaaattagccgggtgtggtggcgggcgcctgtaatcccagctactcaggaggctgaggcaggagaatcgcttgaaccctggtggcagaggttgcagtgagccgcaatcacgccactgcactccagcctggatgatggggtaagactgtctcaaaaaaaaaaaaaattagctgagcatggtggcgtacgcctgtagttcacgccgtcatggaggttgaggcagctcctcaggaggctggggcagaaggatctctttgcttgagcccaggagttcaaggctgcagtgagctgattgtgccactgcactccagcctgaacaaaaacaagacctgtctctaaaaacaaacatacagtgttcacaatgctgcccaagaagggccagtttttgcagctgcccccatgtagcaaaatctggtgcttctgtttcatagacccaaatggaaattaagtggatgtgtcttatttgtaaatttaaaaatattagcgaatgtttgggaatttttttttttttttttgagacagaattttgctcttgttgcccaggctggagtgcaatggcacgatctcagctcaccacaacctctgcctcccaggttcaagcgattctcctgcctcagccccccaagaagctgggattacaggcacacaccaccatgaccggctaattttgtatttttagtagagatgaggtttctcccatgttaggctggtctcgaactcccaacctcaggtgatccgcccacctcggcctcccaaagtgctgggattacaggcgtgagccactgcgcccggcctaatgtttgggattttatgacatgtcagaagcattacttcaggctttggtttttaagtaaaatagcatctaatcctctactgagaactcataagaaaacattccttatatgctgtggtcttcagttatacaagcattttaaaaacaggagaatgaatataaatcttaaatcaggcattaaacccagctgaattgttggaaggaggtaagcctgagaccattcctggacagcttttaccaacacccatgtaaagggggaaagggtgggcaagacgtgtgcagcagtctgtatggacagcttaccagagactgagggctgaggcagaatcgtgattcctctgacccagcaggggcctcctgacaccgtcagtgccttggagatgtgaatacccacctcaccgcctgaacggcctgtttttgcagttgcccccatgtagcaaaaagtaggatgcacggataggacttcagggctctggagaacgtgtttttgcataaaccccagctttgctctactgtggcacagagctctggagcctggtttgtgaatgagcctagctgattctggctttttctcctttcttgctctaggggatggactgaacggacagttccagaagtgtgactggctaaagctcgatgtggtcacagctgtatagctgcttccagtgtagacggagccctggcatgtcaacagcgttcctagagaagacaggctggaagatagctgtgacttctattttaaagacaatgttaaacttataacccactttaaaatatctacattaatatacttgaatgaaaatgtccatttacacgtatttgaatggccttcatatcatccacacatgaatctgcacatctgtaaatctacacacggtgcctttatttccactgtgcaggttcccacttaaaaattaaattggaaagcaggtttcaaggaagtagaaacaaaatacaatttttttggtaaaaaaaaattactgtttattaaagtacaaccatagaggatggtcttacagcaggcagtatcctgtttgaggaaagcaagaatcagagaaggaacataccccttacaaatgaaaaattccactcaaaatagggactatctatcttaatactaaggaaccaacaatcttcctgtttaaaaaaccacatggcacagagattctgaactaaagtgctgcactcaaatgatgggaagtccggccccagtacacaggggcttgactttttcaacttcgtttcctttgttggagtcaaaaagaaccacttgtggttctaaaaggtgtgaaggtgatttaagggcccaggtcagccactgtttgtttacaaaatcaggtaactaactgcatacactttttctctttccatgacatcaagactttgctaaagacatgaagccacgggtgccagaagctactgcgatgccccgggagttagccccctggtaatagctgtaaacttccaatttctagccatacgctcagctcatccatgcctcagaagtgcatctggagagaacaggtttctaagcataaaagatgaaagagcagttggactttttaaaaattcagcaaagtggttccctctcttagggacagtcaaaaccaagtcacttaggtagtaccaaaataaataaggaaaagcttagctttagaaacagtgcaacactggtctgctgttccagtggtaagctatgtcccaggaatcagtttaaaagcacgacagtggatgctgggtccatatcacacacattgctgtgaacaggaaactcctgtgaccacaacatgaggccactggagacgcatatgagtaagggcactgacggactcatgatttcttcttaccagatgctttcctgttctttgagtttaaaatcatcagaaaggaaaaacaaactctatattgttcagcatgcaatacataccacgctagggctggctcaattgaaagtgggcaaaagcttacaaatactaaaaagaagtgctgccgcgcagtgtggaggccactgtttggaaataaatcttcctaacactacgacttttcatgttttggagtggacttttaaaaaagttttccaaccacaatggaaacaggttgaaccacactgcgcctacacatccatccatacgtcagccattataatcagattctcactgggggaggcattttcttcccaaaggagctgtatgcagtcatcacccggaactaatgggaaagtgttcttaagcagcaagtgactctggaccacctctctcacacactgactcttccacagcatcttcacctgcttctgtttcacttgaattcatacagtaggccaccattttataacaggtcttagtgtaaattcttccagaccaagtctgagatagtcttggttgtaaagcaagaccgtcaccccttctcccaaagccaacattataaaaagattccattgtctcaaacacaaatgttccagtcttgagcacttcccagccatggtgactcgggcatatcctggcagttggtggattttgccctgtaacacaatccttgtggatatgattcaaaggtgactttaattcagagaatgtgttttcctttctgttttaaaaatatttgaattaagtgatggaaattcttttgttaaacatcaaaagctttctccttgaaaagatgcttggtgtatctgaaagtcacgtgggacatttggtgcattcagaaggtcaaatcattcctgacctctcctcttaggacccagcattaactgctgcgatactcaaggcttccttaaaggatcacagcactggcgcctagttttactgtccagcaactttattagttgtgctagctgagaattggaatatagagtcctttgaatgttacgatcttgttttcaaaacctggagtcaaaccaattaagtatggacttaacaaagacaattgatgatgtgaaatgataccacctgtcaagggcatagttaccatgtggatagaaagatgagtccactgattatcttcaaatcccatgtattctctctagcacgttgcttctgacagaaagaataactcacagatttgaagtttgttcctttcccctgatgaagagtagattggccaaaaggtagatgacaggaaggaagaggagccagaatgacccacagtgatcagttcagcagtgcagagcggcagtgcagaggctcatggaactcacacggaaaaaggaaacacatgctgcttaaaatgcacgataacttaattatccaaattaccattcaattccggtatttttgagatgaaagcatttgagccaacactaaattgaccttaattaaggaatgaggtaggaagaggcacttttaatctggaggaagaaataaatggaagactgtaataggaaaaatacaggtctaggaaaaaaataatttttttcctttgatgctggccaaggacccctctacataatacagttctcctgctggaaagcatcagggcaaacagagttattccaaactctgcaacagggaagactgtactttgaccttcttttcctggggaaagggaacaactagtaatctttaaatgtcaaaacttttcttctaaatagtacattcattaaccagtttcttctggtggtgcaaagaacactcaccacagtgagcaataccactattcaatttcccctttggagaggtgacagcggggtagaatcacctggagtcagctgctagtctttaactgatgacaaggccttgcaaatacccctgagaacaatttcactctgagctcacagggaagcagcagtctggtgtgggctcctgtggtgtaaccatcaaatgtggaagacctgatggtgttagtgtgtggggatgccgggctgaaattcaacagccttgcaaaaagaaagggaagatgggatgtgttaatattgtagtggcatgcactttccagctctccatggagctctctttatatatgaggtaattgaatgtcactattctgtaccatacagcaggtattatctagccaaggttataattaccatgaagtgctgtggaatgtagtaggaggcttttcactgggaagatcctccaggagctgacgtacttgtggccatacctggtcaaccctcctaagtccccaacctctttgtctgtccagaggccaagcaatgcttccaggtattcccctacttcactccacagccccacccttatgatggcatacacaggggagaagggacgaactcgaacaaacagaaaaagaccaagaaatgcatcgtggtgctgtcttcacccccctcatttagcactttgtgataactgctgggacagattgcctaaccttgtctaaaagcaaaaatatttaatcaagaaagctaatgaaagctcatcggcaatgactgtgaattctgtaaccacaaagcatctcactcaatgtctacagggaaaacagctacataattggaagctgagaccagtcctggacctaaccctcactcttgtttttttgtagtagaacatgcttaatgtttaagtgagcctatatggtgcctttgtacaaattagaaaaatacttcgcttctcccagagcccacagcatggtgagcagagcacaggctgcacgtcggaatttgtccccagtcagtccttatgcagtaaacaactggcgcaactgtttgcaggggacctgccaatactgctttgcagtgccaggaaaatgataaaaaccggcaaaatcattgccttgcctctcctatgcttgaggacgttagaaaaactaactctgggccgggcacggtggctcacgcctgtaatcccagcactttgggaggccaaggcgggtggatcacgaggtcaggagatcgagcccatcctggctaacatagtagagaccctgtctctactaaaaatacaaaaaaagcagccgggtatggtggcgggcgcctgtagtcccagctacttgggaggctgaggcaggagaatggcgtgagcccgggaggcggagcttgcagtgagccgagattgtgccactgcactccagcctgggcgacagagcaaggctctgtctcaaaaaaaaaaaaaaaaaaaaaaaaggaaaaagaaaaactaacaaactctgattaggttcttcattctgtaatatgggaataaaaggaatacaaacagctattagaactgtgaaggtgaaataaggtatgtgagagcactagaaccgtctctggcatgttataaatgctcaactagtatttgctaaaatataattatcgacatgaattttttttaggaaaaattatacaccctaaactcaaatgaatgtcataattgagagattatcactaagggcaggttttggtgcaccagagaagaggaaacattattctggtatccagtatgtcgctgagatgttaaacgagataatgcttgtgtgggaatttgggcagaagctctaggtcgtgtctgttagcaatcagatagcctacaaggccgtcttgatgggtatgatcaccacctcaaattcttggaaagataagtttgtgtggaaagatgtaagaaattaagagaaagggaaaattcttagctacaaaacgttttatttctataaaacatctcttaaaataattcaaacactgaaatgtccacatctcatacctttcaggagaaaggcaaggagactacttgccttactgtcatattattgagggaatcagcgcaaagcctgaggaaatgaacagtagctgtgggtcaaagccatgtctccaggttcacggctcactcccccaggacaagcctagttaggtagtggctgcatctggtatccctgggacagaaatgcaggtgagaaggggtatcaagaatgcctcgagggggagatgggtgaaccagaaggtcaacagttgcatttcttcatctagaatgttctctagaagggaatgatgatcatgagagtccccttaaggcacaccgcaggtactgactgatttctgtgggcccagaattatcactttaatacagagaggataaattggcgttgttttttccccccaataaatcattaccttcaacagagcagttgagatgaggtctaaggactaacaagaacttttctataaacaagttggatttattctgaatctttccttcaccttagacttagagggtataagttggaggtggaaggaatggcctcctactatcagctcctccccccaaaaggaggggaagcttgagaaatagttttttaaatgtatgagcaaaaagcaggagctgcagtaggaagcagtcctcatgagggctgttcccttccactgctggaggcagagggtgaggacgtgaaggaagaacagggatgctgccacatcctgttaactcaggagctgaccaagagctaccagagaaagccaatggaaaacactatctagttccattaccgtgaaatacaactggccaaatcactgtggaggaatgtctaacaggtgggaaaataaagcagcaagtagccgcttccataccacatttcttccttattctttcctttcgtgggcaacacaggctccaatttcctaagcctcacacctcctttcagcagctcagagatgaacctggcttcgattggtgcttgaatgcgctcagccaatgggtgtgaggatccagaactggcaagtgttaatactggaactcataggatttattactttttaaaaatcaagataacgcaccagtttgctcttcacctatgcaaacacaaatatagcaattagaatacagaacaatcaatgcaactatcagagcccatgaagaaaaaaatcattgcctcaataatcccattccccccactcacctctaattacttaatccaagtacacaaaaacccttaaaacatcactccctaaatgggacactaaaacacagaacaaagacacgctacaggataaagctggaaagacacacaaacatactcccagaccttgttttgaccaatttttaaatattgctttagggagattttatttgaaaacataaatttcaaaaagaaagcacatttaaaacatcaggttttggtgatcagggtaggtaaagtatttttattataaatttcaagatctaaaaaataatttattacatttactaagataaatctaagatgacctttttaaaccaagccacgtgtgccctgcatagtgacgtcgtggccctcgggcatggaaagacacgggtctgcccttcctttagggctggaaagacacgggtctacccttcctttagggctggaaagacacgggtctacccttcctttagggctgggatcagccagaggaaagaaaattatgccgatgctcaactagcatatactgattaggactattttggtttattaccctggcattgaagaattcaggtgaagatgccaccactcttgaactctgaaagccaaactagaatctgcagagcagcctcagtcttaaaattcaagcttctttttcctactttttatttcagtgatatttaggacactctctatttcataagaattatgatctaactggctctataagcccaagaataaaaatccttaccccctagcaagagacccatagaactcatcagtagtaagactaaggtcccatattggaaaaaatatactagcccaaggttatagacagggaccatccagcaatagagatgttgctggcaagtaaccatggtggtgggtgaccactagcgaaaagggctgaagagacctcagaaggtcatccaggttatcctcctgccttgacacaagacacatgtgtctctctagccagagttacttgcagttgcactcacaagtggggaccccaggtctccttcatgtgattttctctgtgtacatatttcgaagattcccaaaggcagcatttttacaaggtggagctgcaggaagcttcggggacttgacagactgagtccagagcaagccctcgcccgtgggatcttagcaggaacctgggggtgaagaggaacagtgcagtccctgagaggcagctgagagtacgggcgagcaccctcacactccaggatgagggcggggggcaaaaaaagagtgggtgcagagcctgctcatcgagaaagatgaaattctaaggggattaagagctaagaagtcagtagctgaggagcccacagctaagttctctcagctgggaatttctatcccaattcttcctaagtaaaccctctctcgctaaagcagtgggtctcaataggggatgttcacacgggacatttggcaatgtctagagacattttcgtttgtcatctctgggagggggtgccactggcatctagtgggtggagcccaccacacacaggacagccccaacacagagaatggtcagaacagcactagtgccaaggctgagaaacccggtcctggagggggtgctttacccctaagattctcaatttagcatgagcggaggcccttgggatttacagtcagatgaatgtgaatgccccacctcaagccctaacatgcctaacatgccactgccatgttgagcagaagtccccaattatcccagagtgttccacaaatgtccagacagctgctggaggttcaaattccagccaatacaactccaaccttacatccttctgtctttctcttctgaaaagcctcctatttctttctcagagccagggctaccccgatggccactgccaggatggcaacagcagcagcccctccaaacagcagtatagacttgccctcagacagcggcatgggcttcatctcaccggcgggggacagtctagacttgccctcagacggcggcacgggcttcttctcgctggcaggggacagctcttccacaaggctctcttcccttgcgtttatctccttctcactcagcagcgtttctgtgggttccagtgcggggaccacctcctccacttcagtaggttcagttgttgctgctttcacctcttcttcatcaagttctacaaacagagatgtagcagggctggatttctcaactgtgatcacttctgtgtcaggttcccttgtccccagcagggaggtggcagtgatatgtggaagcaagggagctggggcttcaggaagtgcctcttgcagctcccgcgctggcaagaccacagaagccacagcagcctcttccatgccctcgggcacctcttctttctccacgtgcacaatgtcagaattagaggagttgttctcactcttctctccagctccgttgctgtctaagcttttcacttcttcaggatccattgcaatctgctgccaggactcagggcctagtgacactggcaggctttctgtgtgccaactctggctagccgacagtgacacaggtaagctctcagactgccaggaagtggtcacagttggagactctgggggactgacttgtccagagttgtcgctgggcaggatgtaaatgtcattgctatcttctgcagtgattccagggtattcctcctcctctgactcaagactaaacacagtgccctagaaacgaaggacaagcgtcaataataaagaatggtaactatttaaaacataaacatcaatctggaaagcaaattctttcctaaactgaagttctaggaatgaaacactgtttaaacctacatagtttccgaatggaatgcatgtatttgtaggccaatgcagagaaagaatttttgacagtcttctgagcagtctccttgaaactaaaaaatcctaagttaatatacattcagtgtaattcacacacaggctgagagcatcctaatctgaaaacctgaaatctgaaatgatccaaaatctgaggttttttttttttttttttaagatggagtcttgctctgtctcccaggctagagtgcagtggcacaatctcagctcactgcaacctccgcgtcccaggttcaagcgattctcctgcttcggccttcccagtagctgcaattataggcacctgccaccacgcccagttaacttttgtattgttagtagagatggggtttcaccatgttggccaggctggtctggaactcctgaccttcagtgatccacccgccttggcctcccaaaagtgctgggattacaggcgtgagccactgtgcccggcccaaaatccgaaactttttgagtgctgaaatgacatcacaagtggaaaattccacacttgacctcatgtgatgggttgcaggcaaaacacagtcaaaaatctgcttcatgcacacaaaatattatatatatttatgttataaatattgtatatttgtaaattaatatattaatattatataaaattaccttcatgctatatgtataaggtgcatacaaaaagaagtaaatgtcatgtttgggctttcccatccccaagacatctcatcacatacacacaaacattccaaaatcaaaaaaaaaaaaattaaaatccaaaacacttctgatcccaagcactttggataagggatactcaccctgtatgttcaatgcagtaattaatgcaaaacagcagagaaaacaaaggcaagaccttgtgctcaaggaatttatcacttagtagggtatacaaataatgctatgtcatagtccaagtgccattaagagttcatatggcagtgttgctttccttagaagaagaagaaaaaaagttcagatgggaaaaagacctctttgggtagaggtcagagaaagcagggagatcacagaaagcctcacggagggactagcatttctatcagacatctgaagaatgggtaagattttggcaggcgaagggtacacagaagacacaatgcaggcaaaagcacagagacagaaaaaaaagaagataaggacagagccctgtttaattaatgcagagtgcccatgaagaatagaaggtcagtgaggacaggaccatggaggaacctgaatgacagctaagaaatatggactttatccaacaggcgatggtttgtcactgacatctctgaggtacaaaattataatcagagctttgctttaaaattcctctgatggcagagccagaatggagaaatgctgcagacacggagactcttgcttcttttgtcaggaagtctgagtgaaagcaataaagccctacagcacaggccttgtgtccatgtctattaataacaggccaccgtgtgcctactgcttatcagggttgtgtcaggcacaagggctacgagaaagaatgggtctattcttacagaatttactaggcagctgtgaagcctgacatatgaataactaacttcaatatgatacagaaagctttatgacaggtgtatgcacaaggggctaggccaacccagagggtaaggcgcaataaaaggacaggaagagaaccaatggaatggaatgtcacagagatgtacagaaattgtcatacaaaggctagacaacactcgtaaaagctacagggaatctgaatggaatatgtaaagcaaattaatttctacttcattttatgattatggttgctattcaactgaagtaggataatttcattcttcaaccaaaaccaaaaactttctacatacatcaaggatctaacataaatcaaaagtctatcagccccataaaaaaggaaataagaaatacaaataaatcacacgaccatgatgtcggcatcatactgcaccactttctacctcgacccttgctccagccacttcagaggccctggtaagcatcaaggatgttctatgagtatggaataatcagggggttaaaataatacagtatgaccacaaaattcacagtcaaaaacaactggcttgtatcccagctccaactgtgtaccagctgtgcgaatctggataccttgcttaaacttttagacttcaatttcttcacaaataaaatggggatgactgactagataagattgtttttgttgtatttttagagttggggtctcgctctgtcacacaggctgaagtgcagtggcaggatcacagctcactgcagcctcaaccttctggtcccaagggatcctctagcctcagcctcctgagtagctgggaataacagcatgggccactgcactcagctaagtttttttatt

SEQ ID NO: 1850 - DNA, 2368 bp, Homo sapiens
taagggtggaaagcctggttctcactgcgctgccggctccccgccccgctccacagccccgcgccggcgcgggctccccgggtccccgcaagccgccgggggcgggccggggcgggccggggcgggcccgggcgtggggggccgaaggaggaagcgcgcggggcgccataaggaggaagcgggtagtcgaccgtgtccgcgcgcctgggagacgctgcctcggcccggacgcgcccgcgcccccgcggctggagggtggtcgccactgggacactgtgaaccaggagtgagtcggagctgccgcgctgcccaggccatggactgtgaggtcaacaacggttccagcctcagggatgagtgcatcacaaacctactggtgtttggcttcctccaaagctgttctgacaacagcttccgcagagagctggacgcactgggccacgagctgccagtgctggctccccagtgggagggctacgatgagctgcagactgatggcaaccgcagcagccactcccgcttgggaagaatagaggcagattctgaaagtcaagaagacatcatccggaatattgccaggcacctcgcccaggtcggggacagcatggaccgtagcatccctccgggcctggtgaacggcctggccctgcagctcaggaacaccagccggtcggaggaggaccggaacagggacctggccactgccctggagcagctgctgcaggcctaccctagagacatggagaaggagaagaccatgctggtgctggccctgctgctggccaagaaggtggccagtcacacgccgtccttgctccgtgatgtctttcacacaacagtgaattttattaaccagaacctacgcacctacgtgaggagcttagccagaaatgggatggactgaacggacagttccagaagtgtgactggctaaagctcgatgtggtcacagctgtatagctgcttccagtgtagacggagccctggcatgtcaacagcgttcctagagaagacaggctggaagatagctgtgacttctattttaaagacaatgttaaacttataacccactttaaaatatctacattaatatacttgaatgaaaatgtccatttacacgtatttgaatggccttcatatcatccacacatgaatctgcacatctgtaaatctacacacggtgcctttatttccactgtgcaggttcccacttaaaaattaaattggaaagcaggtttcaaggaagtagaaacaaaatacaatttttttggtaaaaaaaaattactgtttattaaagtacaaccatagaggatggtcttacagcaggcagtatcctgtttgaggaaagcaagaatcagagaaggaacataccccttacaaatgaaaaattccactcaaaatagggactatctatcttaatactaaggaaccaacaatcttcctgtttaaaaaaccacatggcacagagattctgaactaaagtgctgcactcaaatgatgggaagtccggccccagtacacaggggcttgactttttcaacttcgtttcctttgttggagtcaaaaagaaccacttgtggttctaaaaggtgtgaaggtgatttaagggcccaggtcagccactgtttgtttacaaaatcaggtaactaactgcatacactttttctctttccatgacatcaagactttgctaaagacatgaagccacgggtgccagaagctactgcgatgccccgggagttagccccctggtaatagctgtaaacttccaatttctagccatacgctcagctcatccatgcctcagaagtgcatctggagagaacaggtttctaagcataaaagatgaaagagcagttggactttttaaaaattcagcaaagtggttccctctcttagggacagtcaaaaccaagtcacttaggtagtaccaaaataaataaggaaaagcttagctttagaaacagtgcaacactggtctgctgttccagtggtaagctatgtcccaggaatcagtttaaaagcacgacagtggatgctgggtccatatcacacacattgctgtgaacaggaaactcctgtgaccacaacatgaggccactggagacgcatatgagtaagggcactgacggactcatgatttcttcttaccagatgctttcctgttctttgagtttaaaatcatcagaaaggaaaaacaaactctatattgttcagcatgcaatacataccacgctagggctggctcaattgaaagtgggcaaaagcttacaaatactaaaaagaagtgctgccgcgcagtgtggaggccactgtttggaaataaatcttcctaacactacgacttttcatgttttggagtggactt

SEQ ID NO: 1851 - protein, 195 aa, Homo sapiens
MDCEVNNGSSLRDECITNLLVFGFLQSCSDNSFRRELDALGHELPVLAPQWEGYDELQTDGNRSSHSRLGRIEADSESQEDIIRNIARHLAQVGDSMDRSIPPGLVNGLALQLRNTSRSEEDRNRDLATALEQLLQAYPRDMEKEKTMLVLALLLAKKVASHTPSLLRDVFHTTVNFINQNLRTYVRSLARNGMD

SEQ ID NO: 1852 - DNA, 197399 bp, Mus musculus
  misc_feature (1)...(197399): n = A, C, G or T/U
cagacagaggcagaccccgggttcttcgttccttcttcgctgctccgatgaaagaagtgtgcctcggggcttctgagtgagaacctttgatgggattctagctggaaggtggagtcaccacactcaggatgcatgcagccacaacagcagcacctgtgtcctgaggaccagccaatctggggaggcaagctctcaccggcgaggaagatgcgggtgtgaagccccaagtccgtaagtaccaccaaatctccccttgggtgagcaaaccccttaaagaaaaaggttctgtgtcttgattgacgcctttaaaaatatttatcacatctttcaattgtttatgccttgctttgcctttctgacatatgtgggattcttggaacaattctgtctgcctttaaacgcatggctctcttaagcagtgggagctacacccgggtatccttgtctcctttaccgcacaacgccccatcagcggataccgtgcaccataagcacacgccccaaagactgagaaacacagcgctcagtttcttagccgataccgtccaattttctttattctttaacacccccccacaacccccaccaaagaaataacatccctaggcaagccagtggtatgccagtcggaggactgcccggggatcctcacgacaccgtgtccttcctgcaagctcaatgtgaatccattagctcatccacaggcgacaattgttacactcggagggacattcatttcggtccagtagagggcgccggcgctcgcctccacaaccgggtaaacaggccagagatgccatccccacaagcacaggcatgcacgtgcccctggctgcggaggactcggcgcaagtcagcctctgtcgagcgttaacaaagggatggttatgttggttcccctctggaagtcaatggaagggcgaaaagagactttcggagcactgcgtttgtttcagaaccgagggagcatgtttccagggcaaagtactttctgtatattcggcaggtcctctcccccccccacccccacccccgtcaacccctcctctcccacctcccacccccaatctattcttgcctagccatggcactaggacgaagtgtttagaatgtatcgcgttggaaagacaggagaaaagggggagagacctagatggaatgagcgataaagggacggctgcactgctggcccctgcagtagtccgccctagctactggggtcttcccaagtgattctaaagcaccgaggttgcccgccaccattctaatcaggatgacgtatacaggtgaactccgtacgctgctgctggagggcggggtatattgtttttgtgatgcgcgactagccgctgtgtggaagaaagcatgcaggagccgaggctggacctcggcaggcaggacctctgactacctgaagcagctgagggcgagagggatgtttcgaagcagagagggcgcgcctctctcagaatgggctccttctctgaagaaatgttctgacctatattccagaccaaggagaaaaggaaatgtgagcctctgcgggactgcagagggaaaactgcgggttcctgtagaaatggggtccgtgtctgtgtgcttagcagagtcacacataactgtcccactcttcagccgcaagaagcatggctgctggaaagaggtggatggaacacggtgattcacgcctggaaccccagcatttgggaggtggtcacaaaggatcacaggttgaaggccacacagctatagagcaagtttgaggctagcctggtctatattagatcttgaggaaagaagagagtgaaagaaagagaaggcaagaatatggtaggcattagaacaaaggaaaaaaagcaaacaatttgacctagaaattatagtcttaatccttttcaagactgaattcattatggctttaaagccctcctacaccgaaagggaaatagtaaaaatttccattttccgagaactggataactagggtagcattctcttcacaaatacactcatagaccaggaagcaaagggcttctaaactttgcattctaaagctatctcataaatattcataagtcataaatgctgggaagcaggtgggaggcagaaactgcgcagcaagttccccaaaggctgctgtgctcacagaaattaggtaaggcctcacactccaggcctgagaagtcagagccagcctacaaggtcagggcagcgggtggggcatgcccataagcccagcacttgaggggtagtggcgggaagatctggagccattctccactctatgttgggttctgggccagcctaggctacataagattctcataaactaaaaactaaaactatgacgtgtgagctggtgctaggacttttttcccccatcacagctttctagggcattctcattaattttgattagattgagaaagggttaaagtcttgggggtaggggcggaaaatgacagacagtgctgcctattccgaaagcctggctcccgtcattcacttcataaattggaaagagaattaagtgaccacataaagagcacccacccacccggctgggatcacaaggcctcctatgccaggctaaggggggtggggcaggaggatactcacacagaatggccacagctctcccacgtactgtaccatattactctgtctccacattcccagtgagtgacttggacaaacttctccttgtgcttgcttaccaagcaaccccagacttaaaaccacctccatcattctgttacttactgttcttctagtcttgttaaggcacgtcatatgcacgcgcgagtgcggacacacacacacacacacacacacacacacacacacacacacacgagcgcgcaattatattgtctcctggttgaattgccctgctctctggagacaatgcctccacttaccctggggctcctacagggtttctccagcactcaaccagcacaggggccgtggacatcttttgtcttcctcagtgaccttgagctctctgacaagctctgccaggcaggaggctcagggtagcttctgctatccagcccccatgccccttttttgaccggtcaccacagagtggacccaactcacagggcaggatgccaacactacaaaggctgcctatccactagccagctaagccaaggacagtgtatctgggtctcatctctcatcacccctacccaccacaaccacaaggactattccctgaaaaggacaacttaactccacagcccaggaggaagtgtccaggagcctggctccatgcacaccccaacacaccctcagaaagggctgaccagactcagaggggaggccccaggagactcgagcactttactaaagcagaagctaacattttggcagagtagattgtgacccctcagtgggccaggaaatcaacttggcggcttataaccagcatttttaaaagaaaaaaaaaatccaagtgtgccatatatcctgaggtgtgagggtgttattacctgaagtctggccttggttttgtgtgtatatatgtatatgtgtgtgtgtttgctgtgcactgagctgtgaagcatctgtttcatttattttgtggagttagggaccaagtccagacacctgcccatgctaactacacaccccaggcatcaagattcaattctttacacaggtcacaatcagacaatcattacaatcattcccctgcagtgaactctgagggaagctagaacggaatcatgataaaatagtaaggagtcaaattccaaaagagctgacaaagaatagaatctatttttgtattgttttagggctaggaactggacccagggccgtgcgcacgcagagcgtttccctctgagtacgtctgacttgggactttagaaagtccagttctgagaggcctttgtcctgagcatgctgacacgaggggtgtgagctgcaagtaccatggcccgtctgggcactactcttttgatattgaaccaacccatttgttttacttgcttagttttgtgtggaacagctgagacttgaaccagggtcttgaattgctaagtgtgggctgtacacgtgtcgactcctaggccggaatatgatatggcatgttgaagagtgcagcaaagaaaaccaagcatttcactgtatttttacatttccatcctttagtagggaggaacgcacgtcttccgcagagcttgtccagagctcagcggacagcctttaggagtccgttctctctcctaccacatgtgggcggggcttgagattgaacataggttgtctagcttggcagcaaccacctttactcacttagccatcttgtggacccatttcagtatacccttttttaaaaaaaaaaaaagatttatttatttattttgtgtatatgactacacttgtagctgtttaaatggttgtgagccttcatgtagttgttggaaattgaatttaggacttctgctcacttctgtcaacctcactcactctggtcggcgctctggtcggcccagctcgctccattcctgctcacgccatctcaaagatttatttattattatagataagtacactatagctgtcttcagatgcaccagaagagggcatcagatcttattttgggtggttgtgagccaccatgtggttgcagggaattgaactcaagaccttcagaagagcagtcagtgctcttacctgctgagccatctctccagctctcaatatactcttaaattacaattctatgcgaatattctcactgtgtattctacttatatgacattctgcaaatgactaaattttgatggaagaaaacattaataattgcctggggttgaagctctagagaatttaatagtaaggaggcatatggagactttgtaagacattagaacttctcttgattgttctttaggcaaggtttctctgtgtagctttggctgtcctggaattttctgtgtacaccaggctagccttaaactcacagagatccttctgcctctgcctcatgagtgctgggactaaacatgtgtgccaccatacctggctgattaagattctttttttagtgattaagatttaacaaacaaacaaaaaacattaacaggaggttgaaataggagtattgccacaagtttgagaccagcctaggctacagactgaaagcctgtctcaaaaacaaaaaaataatatcaaaacaacaaaaaccttaacatggtatttgagagtaaaactatctcatctattctgggttgctttcttcactggcatagtttgaagatgatgcaatatgataacatatggggatagcctgggctacatccagagacaatatttcaaaaaacaagcatgatgccaaagctgggtggttgttggctcagttgtataactccagtccttggggggctgaaataggaaaattgctctgaattcagacagtgtgagatacatagtgaattcaaggctagcctaggctacagagtaagacctagtctaagaaagaaagaaagaaaggaagaaagaaagaaagaaagaaagaaagaaagaaagaaagaaagaaagaaagaaagagagacagagagagagaaggaggaggaggaagaggaagaaggaaggaaggaaggaaggaaggaaagaaggaaggaaagagaaaaagacaaaaaaataacaagaggaagaaagggggataactaggctgagagtggaggtaagtggttagaacacttgactataaagccccagtgacctgtatttcatgggaaatgtgtgcctctctctctctctctctctctccctctctctctctctctctctctctctctctctgtgtgtgtgtgtgtgtgtgtgtgtgtgtgtgtgtgtgtgtgtgtgtgtgtgtgtgatattttaagttaaggcaatgagctctgggagagcctatcttgtaattctaacatggatagtggtgtaatcaagtgggaaagccagaggaggaagaagttggtggaatgagaataaaggctgcctggaaacctgttctcttttcctggcttctaaagtctcccaccaatgcctcccagactctgcttaacctatgacctgcaacacaacctcagccgagcctcagatagagtgcctctgggccctattttttttttttttattttaacatgcaaagtagcaaatttccttttgccattttcagacatacttagttttggttgacccttcttcccctatccagttctctttcccatcccaaagagggtggacatccgggctctgttccttctccgaaggcagcagaggagagttaaagtgagtgcatatttacatatgctccatgctctccccatctccaggggcatctggacttcctagtaggcattccatagactagacactgagagatgtccaggttttaaaatctagtgtggggaccattgaaacgacttgttgggtaaaggcgcccactgctaagcctgacagcctgagtttgattcctgggacctacacggtgaaaggggagaaccaactcctagaagttgtcctttaaccttcatatgcatgagagtgtgtgtgtgtgcgtatacatgtgtgatgtgtgtacatatgtatgtgtgcatatatgtgtctatgtatgtgtgtgcatttttgcatgtgtgtttgtgtatatatgtatatgtatgtgtgtaggtatgtattgtgtatgtgtatgtttgtgtgtgtatgtgtatgtatgtgtgtatgtgtctatgtgtgtgtatgtatgtattgtatatgtgtgtatttgtgtgtatatgtgtatgtatgtgtgtgtatatgtgtatgtatgtgtgtatgtgtctatgtgtatgtatatatatatatgtgtgtgtacatatgtatgtgtgtatatatgtgtctatgtgtgtctatgtatgtgtnnnnnnnnnnnnnnnnnnnntatgtgtctatgtgtatgtatatatatgtatgtatatatgtgtgcacatatgtatgtgtatatatgtgtctatgtatgtgtatttttgcatgtgtgtttgtgtgaatatgtgtatgtttgtgtatatatgtgtctgtgtgtgtatgtatgttttgagtttgtgtgtatttgtgtgtgtatgtgtgtgtatgcgtgtgtatatgtatgtgtgtgtattatgtgtgagtgtatgtatgtatctatgtgtgtgtatatgtatgtgtgtatattgtgtgtgttgtgatagagatgggcagaaagagagagagagagatttttgagattctatctggatctacttagaggcagtagatctacatagatctttggactagacccggcctcagttactgtgtttactcactaggtggctgtaatttgcacttttagggcagccaatctaaccagtgcataccccaggccggacacttatatatgcagcatttccggcagccctagagaacacagaaaggtggcattgctgtagctgtttctctcacttagagtcaatgcagttctgatagtgacatgacttgggttttcatgtggcggcctacaggaaggcaagcatttgaactcatcttggctgtgtgtcatatcactcccctcatgcctttataccaaaatgtgacttcaaattctggccatgatctccttagttgtgtgaccttgggaaaaataccctagtgtctctacagagttccacggctcaatgatttttagtactttgtagacaaatagaggtggcaatgacatgggtgaggtgaaggaggggcaggagggtggcagttgttgggggtgcattgcaaacaacagaaataggctcttgggctgacttttggaaggggaaggaaagttagagagagggggggggtggctatgaattagcttcatgaaaaggtagttcccaggtgtcaggaaggactggaaccaggcagccagccaaggggatctaaacagaaaggtaactagcttgtccctgcagggtgttcttggctggaaaaactcttgctcatctttctgtggctttgtgcttcccactcaaattccaggaagaaaggtcagagctcctgggtggagccgggctccctgccaccagctggtagatgggatgacaggaccttgggtgaaatgctcaccttgtagccttcagatcccattcccatgtgtggggatgctgggtgggcaaaagccacagacgtccagcaggaagccagccaatgccagcaagtgtcccggcccaggagccccgggtgcatggccttgtgaaatcctaggtccatgtgtcatgtgtcagcacacatggacgatgatgtttgcacagcattctgggtgaactggcagggtgatccaagaggaggagcctggcagggaagttctggccacctcttgccctactgccccaggaggcctggggggtgaagcaatgctgtatggaacccgttggtaaccaacctcgtggacgcttgagcttctgtagtaaaccttcagcccttttcaatcctgcttttcttctcccaagtgttggagggggggcagattgttttgttgttgtgattttggctttgtgtttgtttgtttgtttgtttgtttgtttgtttgtttcgagacagggtttctctgtatagccctggctgtcctggaactcactttgtatgccagagctggccttgaactcacagagatccacctgcctctgcctcttgaatgctggaattaaagatgcctggcctacagtggttttttttttgtgtgtgtgtgtgtgtgttttggtttttggtttgttttttttttttttgagttgttgttttaaattgtttttaaattgtagagccaagtgttggtgttgaactgcctaattctagcaccaggaaggcagaggcaggagaatctttgtgagtatgagttcagcctggtctacaagttctaggacagccaacactacgcagagaaaccttgtcttgaaaaacaaacttgttgttattgttttatgctgcatgttttctcaattctagggagcgaacctgtggtgcttatttatttatttatttatttatttatttatttattgtgtctgtttatgcttctgagccatgatacacaataagaagtcagaggacaacttgtaagaatttgttctcgggtctggagagatggctctgcagttaagagcactgactgctcttctgaaggctctgagttcaaatcccagcaaccacatggtggcttacaaccatctgtaatgggatctgatgccctcttctgttgtgtcttaagacagctagctacagtgtacacatatgcataagataaatacgttgtgttttgttttgtttttttttttaaaagaattagttctctccctccaccgtatggctcagagattgaacacaggtcccaagcttggtaacaagtgcgttggtcctttcattggacctgacctcaccttttaaaaggggccttccttgggccaggcacagagtcagcaggggtgagcggtcttgcctgagctgacagaattgatcacctgcagactctgcccttgggctttcagagtcagggttcccttttcagaaaatttaggcaaattctatggattctatggtgcctggccccagacaccaggtgggctgatatactcctgacttcattttcctaaggaggttggtacaagggtgaaggtctgtagtctggctgcttcgtgcagggtattggggtggacattgatgctctccatgcacacagagggctctctaagcaaggggacagaacttactgaggacttccaaccagtgatgtggtttaaggacctaaaaggccataaattctggacagatgggacattttttcctcaatccttctctgtcccatctttttctgggactaagaggtggttgctttgaaattgtaactggttcattttattataaaagtatgctcagtactcaaacctctccccaaatgaaaaggcacaataaaaggagccgatttccttaactacagccccaccacccacccccacccccgtgctagggatgaaatttaggactcctggcacggctggcactcactgtatgaagaagccacgcacccccagcccaagaagatggtttctggacactcagttcccacccactccactgtttacccagccgttcctacattcacattcttcctttgaaccagtctccctgaccacctctggcctgccccgccccaggtcacatccctgcttctcttgaaaggctttggtcacagagtatgagcccagctcttctctccccactttgcagattacctcctctacctactttggcggggggggggaggagggcgggggtggtggtggtggtgagggaggggtatattcaaatcccccctcctccacaaaattctttagatctcaggtaaggtttctcagttttgggagcagcaccccacccagaagttagacctctatcccattatccttgccacgactgtcatcccagacaagtgccttggccaaccggacactcagggaggatggctgaaaactagtcagcggctttgatcaaacttcagtgtttgtgatctcagagagaagcaagggggagcggagcattagtggcacacgcctttaatcccagcacttgggaggcagaggcaggtggatttctgagttcgaggccagcctggtctacagagtaagttccaagacagccagggctacacagagaaaccctgtctcaaaaaactgaaaaaaaaaaaaaaaagcaaggaggacctgggagcctgtagagattccttggtctttttgtcttttcatagttactgaatttcttatggggtctagacaagataaatattttgggactggagaattggatcaggagttaagagcaactgacagctcttcaagaggacctgggttcaacttctatcacccacatggcagttcacagcagtctgtcactccaggtccagggtagcagactccctcttttggattcttcagtcaccaggtgtgcatgcagtgcactgacagatgcaagcaaaacacccgtacacataaaataataaatgttcttatcttatatgagtacactgtaactgtcctcacacatagcagaagaaggcttcagatcccactacaggtggttgtgagccaccatgtggttgctgggaattgaactcaggaaccctctggaagagcagtcagtgctcctaaccactgagccatctctccaacacaatacattatttttttttaaagaaatgtttctgcactcactggatctgctcccttgagaaacacatctgctcaaatagtgggtcctgcagatgttctcagagacagaaacatttctgactcacaaaggaaacctcactgacatagagcgtaacttcaaaatgatacctgaaaaatattggaggatcaaaacttaccacccttggatggtttgtaatctgatttaataagtcaaggaattttactgatcgtgctgcgctctttcttctcctgtctggtagaatacctccagcgtaaaaatataaatattgtgatgaagtgggcctgtgacttcagagaaaatctaagcaccatagacaccggatgggaatcaatacagtattaagaaacagaccatggctagagagatggcttggcgggtaaaacccaggcccacaccaaaatataagagatggaagcaacacagagagtacagtgagatattttgtttatttaaacatcactggaaagaaaagagaataaaaataaataaataaataaataaataaataaataaataaataaataaaaataaacatcactggatacttaaatagcttttagtaattttctttagcttcctagtaagtcttgcaagagcatcttaattctcatcaaatctactctaagtttgtaacagtgagagagaagacatacagacactcagaatacggacactcagaagtttctcacatttattaccgattgtctccttcgttctgtcagcaggcttccattttcataactttttttttttattttatgtggatgctttgcttgtacagatgttaatgtaccacgcacgcgcctggtgcctgccgaggctggaagagttgttgggtcctcagaactgtagttagggatggtagtgacctgtcatactgggacttgaacctgagtcctctggaagaacaaccagtgcttattcatgtgttccttaggaacaacagtaagttctcttaactgctgggccatttctccagaccaagttgacttcatttttatattttgttattatataaaatatatcttttagtgatttgattttttttctttttaaaatagagttttgttgttttttttttttttagctgacttagttttatttcattttatttttaggtttgaacctgttttaaagaaatcattctgagttctgtcaaatggcacaaaaatgtttactgtgacaaattccttgtgatttaaaaaagaacccacattatcttgaagtttaatatgtcaaaggacaagcttaggcccagtgagagggcccagtggggaaagggtgctggcttgctgacctgccttgatggcaatgccaagaatccacatagaagaggggagagaactgactcccacagactgtcctctgatctccactcgagcgccatggcgtgcattccctctccctgttgaaataaatagatgtaaaagcattttaaaaggacaaatccagtccagccagcctatattttaatatgacttatatcagactgaagacctggctagccttgaactcacagagagccacctgtgcctctgcctgcccggtgtggagattaaaggtgtgtgtcactccgtccagccttgaaagccttttagatcaggaacttggctacttaattataaacacagtcacccccacaggaagcaagactgtcctccagctctcggagctcgtggggtgtgatgttcacctttgccaggtcacattcttcactggtttgacagctctgaagaatgtccctgctgaggttcttcagaacctcgtacaaagcaaggctctggagcgtgagccaaggacaacacgtcttcatgctgccacgtctgtgcttggaattctgctctgggagcatcggcatatttttcacaatggtaaagcacacggattagatttgaggcataagatacagcgtgccggggctggagagatggctcagcggttagagcaccaattgctcttccagaggtcatgagttcaattcccagcaaccacatggtggctcacaaccatctgtaatgggatctgatgccctcttctggtgtgtctgaagacagcaatgatgtactcatatacacaaaataaataaataaataaatctttaaaaaaaaaaaagatacagtgtgcccacgctggaacttgaatcagattgctcctcaaagttataagctgtgagggtctccttgtcactgaaatagctcaagagagaaagcagtggatggagggtctctgcatgaccaaactggaggataactgcaaaaggaaccaactgagacctttccacctgctcaactgctatgtccaagtgctacaaagtattccgagacaaaggctattaatattacacccgtaacttctttccaaatactgcttcagatcactcaactattccaatacctttgcattgttttgtcaaaatagcattccaaggaatatttttaaagtttattatttcttctcaaaaggtttactaatttttttatgatatatgtatatgaccgcttgctctacaggtaggtatgtgcgtcagtgtaagtgcagtgccagtggagaccagcagagggcgttggagctcctaaaattgaagttacaggttgttgtgagctgcctggtgagtgctagaaactgaatgaatcccaggtcttctggaagagtagcaaatgccactgagccgtctctccagccctagccaacaagatttaccacctttaattgccaggtcaaatgaacaggtggaaaagaaaactacttaagttaaatctgcatttaatgtttactggcatttgggaataacagtgatgatgatgatgatgatgatgatgatataattatatcatcaccattatcatcccattttaaaaagtgctttgagttttggattcagttttgaaagcttataggtgctaaagagccatatgaaattccttcccacttcagttataaatgtcccgcaatgaccaaagaatcccattaaattgtcaatcactgttggaaggtcacgctctttgtgtctgctacctcagaggcagcagccccaggtggcagtgaggtcacagccctgtaggaagggggtgctgctgtccacacagcagcgcttggagctgatgctggggaaggcgaccttctccctcagctgcggtccacagggctagcgctgctcccaggtcatcgcagtcggcaggcctgcagcttcctctgcaaacagatcctcccagtcgcagggtagctggggttgaggtacaggaaagtatctgtcaccccgggttgaacggttgcctccctagagagttcctgttgagccccgaggtcacagggtatgaagcaagagagcagcacagcagcctgggtcacagtggacactgtggaaccccctaatgtatttctgttgttgttattttaatttttgttggaatgtatttctgttgttgttatttcaatttttgtttgaatgtatttctgttgttgttattttcatttttgttggtttgtttctgaggcagggtctatggcggcccaggctagctttgactcttatcctcctgcctcagtgtcaagattactggtctgtgccactacacttccctaatgcatttagactttgcacttgattttatctaaaaggtggacaggcaatgtgtttatttatgttcttattacacgtattattttgtatatatgtgcagccatgcttgtggaggtcagaagacaacttgtgagacttggttttctccttccaccatgtgtgttcaggggatcaagtcctcaggctcattgagccacccctcccacccttaatattcttaatatagaaagaacactaccctaagcaagaagaaatggaaacaaacccttagtcgattcttgtcctcttcgctagggtaggtaggtatacttgtggtttctacaagatacagcattgagtctggacagagactgagagaatccaggcacatgtgcccctatgaacctgtgttcgtacacagctatagaatggctttctgttgtgcaactgtaatgaagagatacatctgggactaaggttgtatgtaactcactgtctagcatgtgaaaaacccaggtcctgttctcaccaccactaaaaacagatgtaagcccaagaaaaccaaaacccctgttggcaaaagtcactgagtttctagagaccatcagaagcccctggagctggcttggggaagtctttctctgaggccagtggattctgcagtggtaagtgaggtggtggctctagtgagaggtaggatgatggctttagattgctcaggggctttggcaactaatgtttccccctagtcattgcatcttggttttacccactattgctatatggaactccggttgttgcaaggcatacacagtccagtgaatttaagaaaacctttctcagcttcggggttattgtgctgtgagaggatctgatgcagacatagacatgtggttttgtcaagttgtattttaatttcctttctgccagcagggtaaaaagacttgtggattgggaattggaaagtaaaaggtgtgtgtgtgtgtgtgtgtgtgtgtgtgtgtgtgtgtgtgtgtgtatgtgtgcgtgtatatgtgtatgtatgtgtgtgtgtatatgtgtgtgtgtgttaaagtcttgtgagataatccagtgatcaactcagagcccaggagtgtctccagtatggggacactgctctttgtgcaccccttaggtgtcttccaacagtctagtctagttcaaagctaggactttggtatagaagagaaaggcaaggacttttaaaaaggatacatggtgatgatgatggtgatgatgatgtgggttattttgcctgcatgtaagactgtgtcccatgtgcatgcctgatgctactggagaccagaagaaaggacttcagccccactagtactaaagttacaaatggctgttagcctccatatggtactgggaaccaaacctgggtccttttaactgagtcatctctccagccccagaggcaaggacttgaagcatgccatccttgtctctgctaggtccctgttcaagaacgttcaagaatgaactttgtgccgggcgtggtggcacacgcctttaatcccagcacttgggaggcagaggcaggcagatttctgagttcaaggccagcctggtctacagagtgagttccaggacagccaggactacacagagaaaccctgtctcgaaaaacaaacaaacaaacaaacaaacaagaatgaactatgttctaagccaccctgcacttgctttttgcttttcctatctcacatctgcacctgtccaaggcatcctgggagtttctaagtcaatggagccttgagaattctctgggggagggggacattaaggttgaaaccctagcagccgggagtgagagagccagacggctcagtgggtaaaaggccaacaagcctgaccacccaagttctgtcactgggactgagatgttggaaggagagaaccacttcctacaggttgtcttttgacctccacacacataaataaatgaataaatatgattttaaaaactttaagacagggtttcactctatagcccttgggtattctaggactcagtatgaagttggtctcaaactcacagagatccccctgcctctgcctcccatgtgtgagtgctgggattaagttaggcaagcacctcagcgtctgaccccttaggttaaaaaacaaaacaagccgggagtagtagcgcacgccttcaatcccagcactcgggaggcagaggcaggcggatttctgagttcgaggccaacctggtctacaaagtgagttccagggcagccagggctcacagagaaaccctgtctcgaaaacaacaacaacaacaacaacaaaaacaaaaacaaaaaaagaaaaaagaaaaaaaccaaaacaataattattcatacaagtgtggtagccagacggcaacctagatcaattggttcattctctctaccatgcaggtcccagtgacagaactcaggtcctcgggcttagaggcaggcctctttatccactgagctgtctcaccagcccacctccacacaatcttactaggattttaacagcttaaaaagaatgaaatagttagcccaacctctattttcaggtttgtattctgccagtggggcgggttattttaccaaacatctggttcagaggcagtgcacaccgcccttcctcatggacgcagggctcattccagcctgagcactcaggtggtaggaactttgcctctcctctgctattgaaccaaccaatgcggcagagacccaagctcactgtaagttaggcttcttacaccgcagcccctgaactctccagcacacactttgctattctgtatttctttcctctgttgctttggactgctgcctacttgttacatgttgtaaaaggattgtgagggagtgtgagattgcagtggacaggatgtacaggttggaaagccctgctccatttctttatttttggaggtctcggggacagaacccgaggcaattaatatgttatgtgactactctacagctgagtgacagcccaaagttctggtttttctctgacaggatctcggaacgtacaccagtctgacctgggacttacaatcctcctgcctctgcctcccaagttcaggcaacgttatttagcagctttcttaactttggctaagttagtgtgctttgcaagctgtagtttctttcctttcttgtggagtcaaacttttgccagtcctccacacagtcttgtttagatgttcatatgacattgcaagcatagaaactgagttttgaaattatctcttcctcctcccttcccttccnnnnnnnnnnnnnnnnnnnnnnnnnnnnnnnnnnnnnnnnnnnnnnnnnnnnnnnnnnnnnnnnnnnnnnnnnnnnnnnnnnnnnnnnnnnnnnnnnnnnnnnnnnnnnnnnnnnnnnnnnnnnnnnnnnnnnnnnnnnnnnnnnnnnnnntctgctctgctctcccctcccctccccttccctccccaatccctccccttctctccctcccccttgcttccttttctctttttcctttctccccctttccctcccttttgctggagaccaaacctgggggcttcaagcaagctaaaattcactctaccatggagtccccagcttggcatcatcttttattgaccatgaagtagatttatgaacaataggagacagcacttgtcacagttcacttttgatctctgtgataaaacatcatggccaaaagcaactttgaggcaagcatttatctcagcttctagatgtggtccgccatgaagggaagtcaggacaggagctgatgcagaggccatggagggtgctgcttaccagcttgttccctgtgctgctcagcctgctttcttaagagagcccagaggtggcactgcccacagttggctgggccctcttagatcaattgttaatcaagaaaatgccgtacaaagttgcctacaggccaacatgacagtaattccttagttgagacaccctcttcccaaataccccccaccccccacccccagcacatgtcaggttaacaaacagaacaaaaatcctccccacccccagcacagtgctgtcccgcaggattatgagggtggtcatcagagtcaggcctctctgtctgtgcccctgtacagattagcttcttcattgccccccacccccacccccaggaggaataacgaacggtatgaatagaaataacacccttcatagcattggtgtgaggttggaatgaaaagacacatataaacctctcctaacattactgatatactgtgtttagtcagtttcttcacagttatgagaaacatccctgacttaaacagtttaagggaggaattcttttaattcgagatttccatctttggtccctgactctgttgacgatggtgcccctgcttgcaggaagagctgcatggcaggaggaacccgtggacctcatggcgaatgggaagaggccagaggacaagataactcctaatgatctacttcagccagttaggccccgcctcctaaagtttccagcacctcccaaaatagcaagccagctggggccccagcatccaatacacgagcctttctgaaggacactacttatctaaaccataacagttaataaacaccagcaggagcagctgctgggtactagcatgacgtttgggggcagaaaacacggaaaattagggtcacagggacacaaggtagaaatgggagttcttagatgtcagtagctacaattagtccattccaggggctacctagcagattcggactttctccgtgtctttggacaatagttggaagatgggttgtctggctgcaagagaaactctcaggaaaagcatcctggctatcttacagtttggaagctgaggagtgcaggctgaaaacttctgaaataaagcagagggcctgtgaatttgatccccagaacccacggcaggagagaactgattcttaaaagctgtcctctgaccttcacacgcgccctccagagccacaggacactttatgcaaaccgagtggaattggtctgaaccagtcgagcttcctggagtaaagtgggggggggggggggaggatctttagggatgtttgtaggtcttcagctagacatggagggtgactgaaacaaaacaaaacaaaacagaaaacaaggggacccttgcataattgagtagtgtgctgtacagacttcggccaggaacaaactattcagctggtgggatttgtggctgaagatcggaatcctgcacagtccagcaggccagtgaagaagaatcaactaaaacttcattaaactctaggagcgctagactctaatctatctatctatctatctatctatctatctatctatctatctatctatctatctatcccctggtaggaaaaatgctccttaacgtatgaaaagaccttgaaagaatagtcaatctgtctccctgtaatgtttgtacagaagtggtgttagaaagtctacccactttcaaccacacttctttaagatgcccggaattgaagagattaataatctcttgaaagagatgaggaaataagagaaaggcttcctagaggtcaagtgtgatctaacagtctcatctgattgaaaaaggaaactgaggtagggagttggagttatccactcaaagtcaaatagattcaatatagattcaattctctgaagttttctatagctattactccgaaaatcggagacttcccctctttgtctcatctggatgagatcaggaagaaaattctagctttgtttttgtggcagcttctgagggcaacaaacaagtcccctttaagggcgtcctcccatccccagtctggccggctttgatatgcccctggtgttatcccgttggctcttttgtgtagcttctcgccccttccaagattcccagccaatcacctcgttcctctcctactccgttgggctttcaggaatgtaccatatggtccatgccgaagggggtagagagcaaggaggagggactggcagctatgcatttctttacctgcttgtgatccgtgagacttcttcaggaccgaccctggaggtgacaaccgggcctctgagtatgaggagcaggagtgagctgcgggagcactgagcacccgcacccccgttggggtcggtggtccagcctgaagggccgcagcccccgccctcccatgtgctggccccgccccggcggcgccgctcctgccgccgctactgctgctgctgccgcgccggacgctgcgggctagcgcgcgggggctgcggctgcgtgtcccggcgcgcggctgggtggcctcgccggccacgaggacacagcagcatgaagcagaggtgagcgccgtgctcctggggagcaaccacaatcccgcccacgctgcgcctcggtgtgccggtcggcggctggcccacgggcggctttggcgcgggtggccgcggcgccccgatgcgtggctggacacgtcccgcccgggcagccccgggatcccaacccgcccggtgccttgtgcctccctctggcggacgcgtgcgtccggagcgctggcggagctgcggctcaggcgaggaagcccctctgcgcttcccgctctgccgggcccgtgtccgggtccctgacctccagaaatcgggtgctaggtcaggtcgcgccctgggaggacataagagagccatctcgctagtaggaatgggactgagtgacttgggctgggtgtgcccaaggaggctttgtagggtagaagacccagcctggggagtgggactgtgctccgcgatgtccctagtctggagagcccagcaggcgcagtgtgtaggttgctgaggacgtttatggcaggtggccatgagagagaactcttgacgtttccgtctggtggtagactgagtgggctacaggcagccaccgaggcctcttatctcgtcgccgttcccctccctaactgccttagaaagtgacaacactgttggaggtccccattggcacactagacatcactagcttaagaataaccttggagagagccctacccagatatgggcttgtctggtgttttcagacagccggtgtgatggccgattgcaggtttctggcgtctctacttggcaggcttcgtatcatcaagctctttcacaattgttgctgggaagaagggggtcctttaggagcctcagcgcagttgggatcgtgggtcagccttgtatcttggctgattcccctcacaccccccgagtcagaagacagaaagttatttccaagaatgcacaccacatccgtattgctttgattttggtgcttaactcaggcattaattatgacttgtgtgaaacggatgaatgcagcgcagtggagatcattatagatagtgggtttttgttgttgttttgttttgctttgtttatttaaagcgtgcagtggatggttggagagagtagcgtttagataccaggacatccgtgtgtgtttgacacagtcgtttaggttgatggtgagagagtgagattttatgatgagaaaggcatcttacagattgttgttgccggcaggagttaagttcactatgaccgggccacaaaggatgctgttcttcacttctgtgagcgcatctcccaagggccttgaagaggatatcataaattccgtatttgattgccacatgcactcgagtcagttattctagccttccagtgagcatttcttatgctcgaggttgtaaaagtctagcctgccttttagtggtatactaatagcacgtgttgatttcagaattatacctaagacagtttggttggttctgcaaagaatcgtttataacttggacccagttcctcagctagagtgctaacttttgaaaagtctaaaacttgactgctaactggttggggctttcaccctaccagggcatttgtattgtgtggtttgtaggtgtgggagagaaaatgggctttggaaataatgtaggaaaagtgctttgcacagtgcttcccacatagtaggtcttaagtaaaaaaaaaaaaaaatctatctatctatctatatctttcctctttgattggaagaactgggtgggggatggagttgggcctcttgcaccccccagccccccaactaggaaatcagtcctccccttcccacttttagctttctagactaaagtaagaggctataagtgaaacacttctggactgggaagaattaatcaagaaaaatcgaggttttccagctgtctcatgcattttcttgtttttggtttggtttggtttttttttttttaagacaagttttctttgtgtagcccttcttgtcctagaacccattttgtagatcaagctggcctcgaactcaaggagatccactcacctctgcctcccgagtgctggaattaaaggcttgtgccaccactgactggcttgttttccttagagacagggtttctttatgtgtattccagtctggcctgaacttgctaagtaacccaggctggctccttttttttttttttggacatagggtcttgtatattttggaccttggactccctattatagccaaggatggccaacctgatcatgctttgtggcaggcgagctcctgatcctcctgcgtctacttcatgactgcagagatggcaggtgtgaccagtctacccagcagtatgttgcattttacatattcatttttacttaaaggtatgtatgtgtgtctgtgtgtgtccacatgtgtgtgcaggtgcccttgggagccagaaggggtcattagacccctggagctggagctacaggtggttgtgagctgtctgacatgggtgctgggagttgaacatcaggctcctggaagaacagtcagtgctcttagctgctgagccatatctccagatctagggttgcactgtgaaagagaggatggcacctgtactagaagagatcctgtcgcctgctcaccttgttccactcggtaggagagttgaccctttctttgatctgttgattactcttggaggtgaggattgtactccgcggattgacatgtccaagtggagctagaatcctgacttaatttttccaggcattgacatctgagaagaggccagaatggcagaagctggaccagcaggcaggagtagccagcaggcaggagtagccgcttagctttcgtggactctgctctgggctcggcaaggagccaccgtttgcctcctcccttcttgcagctggtcctatgagcagattaaaaggctatcagagctaatgtacttggaaaaataagaaccatcattggtttgtttacgctgcgtgatattgggcgtgacatttttacagaagcaggctctggattcagttactgctgtttctttgaggaggtgaacttccttttcttcactgattgattctctttggaggcaggtgcctgggcctctctcagctgggccagcgctcaccactgagccacgcccccaaattcgtgacattgattctcagcgcctgggctaggtgcacatcatctgtttcctcctcataggtgtgtttaacttattctaggtattaaccctgtttcatacatgacacactagggcatggtgagttcccagggcaaggacgtggcagaaagccctcggctgaaagcaagtaagacctagggtcttattctggggagtgtcgtggcttagtgggcagggtttggagtcctgacacctgttagtctctctgcccctcccccaccctctgcagtggacagtcgttacttggggggggggttgggggggcggacagaactgaataaaaatttaaatttggagagtatgaataattaaatagataaaaccccactggactgttaggaccagagagaatggaagtggctcagggattggggaagtgattctcccacctacagcctgtccttagcgctcaggcttcttgttgttgttgtttgttttttaagacagggtttctttgtttaaccctgactgtcctggaactccatctatagaccaggctggccttgaatttagagatccgcctgcctctgcctcccaagccctgggattaaaggcgtgcgccgacactcccagctagtgccagggttttctccttgacgagctggcgctttcgctgaagtctgcaggaaggctgcttttctgctctagctggaaagttggacacctgcttctttcttggtgtttagctcccaaagataattagagcacagtctgggagttatgtggggattagaggggacattgtgtggaaattcacctaaattcatctagtggactttccctagatggatttaggtgaattttccagccaatccctctgtcagtctttggctccgtttctcagagtcctctgccacctaggtgcttggatacactattgggcaggatgacgttgctgtcctggtgaggctcagtcatgttttcttaagggtggttcagctgtctgaaggcgtgcagaggcaactgttcaagacaggaaagcagtattctccagcatagaatgacttttcttcattggctgcttagacttgcacaagaggacgagagactgctgcatcattaaaaagaatgaaagaaaggaatccccaggggaaagatgggaggagggagactgtggaagggatcaccagggcaaagatgggaggaggtggacttttcctcagtaaaaggtgggagtattgaagtttctgctgagcagtaggagcttgtccccatccccacccccccacccccctcccccgcccccagcatctgtcagacactgcttccctctttggtctgcctgcttctatggttgagactggctgtgaagttgaggagaggggatgatggccagtagagggggctttctgcactggagggtctgctggggcggttacatcatagttggtgctgaaaggctcattctggtgaactctgggaaggagacatcacagccagtggctaaccagacactgcaattggcttcccttacagctttaaaataaatgtgcagggctgtgggtgtggccctgaggaggaccctggagccccagcaccatttaaactgacagagctccattttatttggtccagcctgcctctgtctctgaagcgtgagaagcccctccaccttgggagcctggggaggaggaggagagaggagaacgccgcccctcgtccctggctgccctatgattggggatttcagggttctggaatagaagaatgttgcagagagcagcctgctagagctttcggactcataacagtcctgatcatatgaccatagtggcagacactgaagagccctgactgaccctctgagtggacactgtgttgtgagtgttctgcagagtcctaagccagcctggggcagccaattggggcaggaagttgtgctgttatcatcgatctttctactaagagggtggtggtctcaggattcccaggctgtgcctgtaccctcacacacgcctgtgactcctaaaaaccataatcacacttctccctttcatttatagaaacggactgaaccagcctcaggagttctgtgtgtgtgtgtgtgtgtgtgtgtgtgtgtttgttttcttccaggaagtctctctttgtcaccctgggcctggaagtagctacgtagacagggttggccttgaactcagagatcctcctgcctctgccttctgattctgggattaaaggtgtgttcccgtgtgtctggcctgatttctcttcagtgttccactctggagcatctggaggcctggtgtagcctgtgtgcttctcagagggcagtgcagggcagtaggaaggtcttccggggtcatggagctgggctgtgggattgagtacagccatgtctgtccatatctcttctttcctctactttgtgacttaggtgagtttctctctcttaaattttccatgattttagtttctgttactttgtgtgtgtgtatatagtggttagcggtgtgcagcgtgctgtgtgcatgtgtgtatacgtgtacatgtgtcatggcccacgagtgaaggtaagaggcagtgtttgggagttggctttttcctttccctgtggatcccagggatcaaatttgtgatcaggcttttctgcaacaagcaatttttttactcattgagccatctctctggctctgccgtgggtctgtcattcccaaggctgaagtccagatcagttgtcattgccttggtttctttatggataagaagtagtctggggaagacaccactgtgtataattaattggcaatcgagtttttatagcagagccttttacccagttaggcctggaccagctgaactcatttatttccctgtgaaaatggaaaaaggaagtatttaaccagaggcttgaattctgtcacatcatttccaacacagataggctattctccaaaccagtcttgcagaggttgggtggatgggggtgaggagtagcagacaagtttatgtctttggtatttgcctgtgagcaagtggacctgatgggtcagagatgaacactgtgtgcccagccttcctagagaaggtggactaaggagagagctctgggcctcgtcacactccgggagcccaagaggagcagggacagtccctaagggcttcaggtgttgacacactcacccttgacatgtttattgaagaacttctccggagcctgcaggaagttaccgtatttgtaggtgacaacgtgagagcagtaagcctcgctgtatggtgatctgtgatttaattggtcaggagtgccgaacttggagtggtgcgcaggtgcgattggtcaggagcgtggaacttgggagtggtgcgcaagtgcgcactgctgaggcgcagtacccatccaagactgcttgcttgtctcttgcacattacagggagccttcctaggctttacctaacccctgtgctgtggctgggatgtttgtattttgccaacagggttgggttgttttgtagctcttcctcctcaggaccatggctgcaggaagggctgggttacctccacttcctgcaggcggccattgggcccatcaccactggggaatctgctggctggtgtccttgtccttgcccagccactgcttgccaagaagagagacaggtactctagtggccgagcacgcctagaggacatgctgccggccacaccctctcccaggtgttctgactgtcctggtcacgagggcctccactggtcacttgtgggtttagaactgttgttagaactgccagggcttctttgcagcaccgttccagctatgactcggagcctgggtggagccttgcggtgccgtttcaggctctcccaagcccccaccttctgctcatctttcgaggtcacttgctatatttggaggctgatgaaggcctccttggacttcttactgccgagtgtactcagtggaatacagttttgcttgtgtttagtcttgtattttcaaagacctttgggtcgctttagatccactctagtggaaatttgcttttatatcctggaaacaagtcaagcattctgatcccatgtggtgagcatgttcgggtcatactgcttatgaagagttctctgtggacagcgatcccagagaagtgttggtgggcttaaaggcgatggtatggaaatgtgcccctcctcgtgcctgtctatatttcttggctgaagtggactttatcacaataaaggaattttgtgacataattctttctctaggaaggtgacattttgtttgtatgtgactttcaagcattctgatcttccactgttggtacaaatgatggcctatctctgttttggttatggcttttgaaacagggtcttgctgtgtggctaggctggccttgaactcagctcccagaggcctgggatcacagtgggagccacctctcctacttgcctgtcactttcgcttgcttttacttctttatgctatgcctataagcagcctcagagacaaagaggcccctggacttggcctctgtagcttccctgccttgctggtgtggcagagctaggtgctgtcatggactgtcagtcagggtggatgctgtgttggcaggggctggctggcctgccttgtgctcatgcactattcattggcacaccagaagttgtctgtaccggcttctccaatggtgctcacacacagttgcctgccttttctcttcccaggctattttgcaagctcttgtggtctctaaaacacttgaatgtatgcagcaggcagggcaaccaagagtggcatagataggtcccccacagtaaaggagaccaagggatttggctgaaaagaaaaaaaaagttaggctgtgggttggaaagggaacccatctcctggtgtctacttagaagtgtttatgttatgatctttttttctccttacactaactatacatagccgtgtgatgtccactgaatgggttgggaagaagggcctgaagaagctaggtgacctgcctgaggactctcagctgatgcatagtggttctaactcaggagtagaggtgccagcttacgtggtggtaaagagcgtgccttctggaatcagactggagcatgtgacctcatgtgtgttctgtagcctccctggactcggtttccttgtcaggatcattggggcaggaaggtgcctgagagtcctgcttcgaggttacaggcagacacaatcccaccaggtacgtggcaagcacacagtggtcttcttgcctgtgcctttgaaacttggagtgtaggcctggggctgtgggtttcctctcggttcgggaacagcatgtgtgggttcaggctgtgcagtgagccaggaatgggtttgtgtgcagaatcttgaataagaaacgtgcttgagcaaggaggagctcacctgtccctgggccatctatggctgtccttgggccatccctggctgtcccgtccaaggttgactaccacctgctcctgctaattgcctctcactcctgcttgctgtctgattactgtctgccttgttcctgtgactcagcattctctgtcctactagtaatcttttaaacttcctgaaatgatatattcattaacttatggatggcaccgcttggcctcgtcactgtactgggttgtgtgtccgtgtttgtgtgtgagtgtgtatgtatgtgtgtatgtgtctgtaagtgtgtgtgagttgagtgtgtgtgagtatgtgtatatctgggagtgtgtgtatgtgtgtgtgtatgagtgtgtgtgtgtgtgtgtgtgtgtgtgtgtgtaaatacaaaaatggtatgggccattgattgggaaaacaaagacaaaacagctctaactcgaggagagccagcttgggcccggtgttggtttagagtttacaggcatggtcagttctgcgtcatttgaacttcacaggtgaggacgtagaaataaccagcatccaccttaggacactcaggacataaaagagagatgcctccgtcttgaacctggtctacactgacccctagcctacaaaggtgtgattcctatgcatcctaggtcattgagaggagtatttaggtgagaagagagtacccacctcccttttaaaccttcagtcttctttatagaagtgtttgctcacttagtaatttcagctttttttcatactttttttttgagaattttgcacactgttttgaccataatcaccccacctcaactcttcccatatccctatccccttccctttccacccaaccatgaccccccacccccatctcccatcaagaacatctgtactgcaccatcttctcccagggctcagggatcattgctggagaaggggcagaaagagtgtaagagccagagaggctgtgaacaaatacaaggaatactgtcctgcagacacagcagggcagcagcccttccagacccacagcagctgtgacagcacgcgcacacgcacacgctccatgggagctcaagccagaccaagtcccggcatagcaaggggaggtggatgtgaaatcccacccctagctcaggagccattggatgtgatagctcctgggaagaaggacagttaagagtgttgcctctggtaggttgaccaggctccagcgtaaggccacattgccaagaatgtatgggcgacacagagaagagggtatgcgatgcaaagcagtggcttagagttgagagcgagcccaggacattataggcagtgaggggggcagccctcctcgctggttgctgagctcagtaccagtgagtctgaaccactgtggtaggctctgcctgggtgcttggaggtgagtaagatgcgtttctctccctgtggaatcttggtgtagccagggagacagacacacaaatagatgactcccttgcagtgtggtaagagcaagagccgtgatgagcgagtgtaaatgtaggtgccataggagctgaggaaagggagccaggagttcttcccagagccttgaaaggcaggctagtggccagctgagaagagctttctaaaagatgagagcagccatgagcaagcacacggagcccgtctgtccccagggcctgggtttgcctcatcgcactctatagacagtttatggaggtgggattcgccctgagtaacagcgtggaaatcatgttgaaagtcaggtaaagggggagagatgggagagcaagattgttgtggaaggagtcactttctgaagggagcattctcatttctgggagctgggtgctctctggtgcagctcctccactctgtctttgtgacactgtctgacagactctgactgtctccagatagagaggcaacgacccactcaagaaagctctctgtgtcgtcttgggagtacactgggtttactataggaatatgggtcatctcaaaacagtggcatcactatatagttccatttcagtgtgggtaatggcctctcaaaagctgtctcagtaaagcccccacccctgtcaaccttctgcttctgtactgaggtgatttcccaccacatgcagctggggcaggactgcatgtcactgggagtcccccactcccacacccatacccagagacagcctttcaggaatattgtgaaaggtgttggagataatgcagagccggtgggcatggctataggccattgacgctgtaatttatgaaataggaatttttatgtaactttcatcaattatagaatgagtcttgtctgggtttccctcaatccttgaaatatattttaaaaaaagcgtcttacttggaggttggatttggccactggttggagtttgtccacccccagcagttggtaataattcagatgtagcccagcagaggtggcgcacaccttcaatcccagcacttgggaggcagaggcagtccgatcgctgagttcaaggccagcctggtctatagagtgaattccagacagccaagactatacagagaaaccctgtctagggagtgggggttggggaatcagatgtaacatgacaaaggactgggccaggatgttggcattgaagataaagaggaagggacctgatgccagagaccctttggaaagaggattctgattagatagcagggaggagagggaggagcccaggcaaggcaggagctgctgagtaggtgcttccggacccaattggtaaagctggctctatttccatgtgccaagagcatgtgccactgctggggaaagcccagggggagcagagtcctgtctgtgctgccaggtgcctctctgacgtcaccctgcgcatgcctccttgcctgtcagcttcttttgctaccctggttttaggtgcactgcaaaataggacctgctgtaacttggttggggctgcccttggagttatttggggggcgggtcttttgtcaacgcttcccagtcaggagaagccacaagagcagcaagcagtagagagtcccactgcctgctatctagatgtatgtattagatctcattgttcccgtttgctccggttactttaccattcattgtgcctctctattcaaaatgcctcagtgcagatttatcaaaagataagacagtgctccttggccacggtacagagcgctagggcacttagcatggatgtggaactgtagtctgattgtttctgacgctactgtgcctcccgtagctgttcttgctagatggctgccatcctcggagagacgctcatcacaggagtgggtgctaacagtcctaatggcaggattgattctcctgtatcccacctactactcactggtcccgccatgacaagcagcagcctagagggagggtcacctgctatcactgtcttgaacttgagcggtggttccccatcttcctaatgctgcagagggagggtcacctgctattactgtcttgaacttgagcggtggttccccatcttcctaatgctgcaaccctttaatacacggccttttatagtggtgacccccagctataaaattatctttgctgctacttcataactaattttactactgtcgtgaataatgatgtagatttctgataatcgactccatggaggttgcgacacacagacacacaggttgagaactgctgagttctcacatggttcctgttgttgcttcatgcttcacggggatgccactccatagggaactatgtgcacctgagagctggcgtagttttctctgttctctttcattgcatctcagtatggaacatgatcttctctaagatgtgccctctccaggctttgtctgagaagcagaaactatcagtaagtgtcagtaatttgctttggaaataaagtatgtggggggcgggatcctaacattttggacttgggccaaaataattctctttctgctactttagatagaccaaacccaagctgggcagtggtgggcctttaatcccagttctctggaggtggaggcaggtggatctcttgagctcaaggccagcctggtctacacacacacacacacacacacacacacacacacacagagagagagagagagagagagagagagagagagagagagagagagagtgagttagttccaggacagccagggccacacagagaggggagaagaagactgaatggagaaatggggtgttgagctgcatgtccgtggttccttctgagttgcttgcacagctccatgggatgtgattctgcccaggtaagggacgcggaagggaagggaagtgtcctctgagtgtaaagtggatggcccaccgcagtgagtgagcaaaccccctccacttccctaaacactctctgccttccttgtaagtgttctgagcctttgtagatttgccccggggcccttctcggcttcgttattactgacctgcctcttcagagccaagccatccaggacctgtgaaacccaagtctggagtccctgtcagatgtagtcttgaggccttgccaggcattgagaggctggccagccaccgtctgtgggggggatgacgtggtgcctctgcatcttctgtaccctctcttcccatcccatgcccgatgagaaactctggggtctggtgcccggtggaaagttcagaagtcactgggtggttttgtcttatattcgaaaatttgtcagggaaggtgttggccaccggatgtgagagtcaaaccaggcaggggtgttctgacatagccacagggcccttcactcactgcttcctccacatagatggggccgtgctcgccgctcatgcaggggtacagctgctcgggctggccaagctgctgtagccagcctgcatgttcccctggacccgggagtccatggaatccacaaggccacacacatttaacttttgcagagacttagggtggtggggtggggaggtgtagaggtcatgggctctgttatcagagtttacagttcactttggaagtcaatataacatgaaagtagccagtgaccatcaggaaggacacagagtcaggtctaaggtcacgagcaatcccagcctcaaaggcagcagtggctgtttggatctgctcctggtatgcctgcgtcagggcctctgcacggtccctaccccttagcagaaacccctttgctaaggtaccacaaaccccgaacacctaaaaaccctaaaacccaggtcttgaggctctagtcctggctcctacaggaggctgaggccggaggattgcctgaactcaggaggctaagaccaggctgggctgttgtattgcagggaaaaataatcttagcatggctggacgtggtggctcatgcctttgggcagcagaggcaggcagatctctgtgagtttgaggccagcctggtctacagaggtgagttctaggacagcctgggctacacaaaacaaagttcagcgcctaatgtggaaggagtctgtgctacgtaggtgtttggtaaaaagagctttctctgtacttcttcctattaacgtagaggcttcatgaggtcggcctgtcacctgcttttgcagagtcttggcctgtccttgagaatggccataaagcaggcagagaggacacagagtgagtgaatgggctgtggggacacattggcctggtaaagtgtctgggagcatcagcacgcacagacagtgtgtggcctgcagatccctgtcactctgtggttgggtctgggtgagccgactgcagagcgggagagagaaatggccgcagcagtgtgatcagcagcctgcctggagccgcttccctgtgttgcttcctcagcacctctggataaatccattcaggcaagtccaggttcacagaggggcacaggacgacctgctgggtagacaggtgcgatgccacggaccaacctgcagcagctcttgaggcgctgaggattgttaaacttttaggctaagaggcaggttgggactttggtatttgtggtaacttaattttgttctaaatttagggacagtcagggctagaacaggggactcctgtttattacatactgagagacagattgacccattgtttttgcatgtgtgttgttttgagatttgaccctccccttcccccccagcttaacctgtaagttatatgttgtatccctgggcttccaagtgcttcagtgggtgttcctgaaaataggaatattttctatgatagctattcttggttgccaacctgactatatctggaattagttaaaacccaggcacctggatacagctgggagggttttgtttgtttgtttgtttgtttgtttttaattaaataattcaaagtgggaaggtccacctttaatccagatcttttgagatgtactattattttgtttttgttttcgtttttttcaagacagtgtttctctatgtggatctggctgtcctgcatctcgctctgtagaccaggctggcctcgaactcagagatctgtctgcctctctgccttccaactgttgggattaaaggcatgagccatcactgcccaggggaagacatagttttaatctggatcttttgaggtgggagggtctgtcttcaatctgggccacacctgctggcagcctatataaaaggacataaaagaaggaatctctccccctccctccctatccctggcaagtccgttccttcactgggattacagcctacttcttcaggattttttcataaactgaagagcagctaagtcttccgaccttgtggacagaacaactattggaatcttggaatcatacacacacacacacacacacacacacacacacacacacacaactattggaatcttggaatcatacacacacacacacacacacacacacacacacacgcacgcacacacacacatatatggactgcaaggcttcacgcttgctaagtaagcattctaataccaggccccactcagccctacagcgtgagaaagtcacagaatatgaagagttgggggaaggtgggccaggccaggaaggcagatgcagcatccctgtcaactggacctggggtgactgttgccttctgcagactgagactctagctaaagctggaccacttttggggattgcatacactgctttcttcccagaggacagtacagctttgaacagcatctgcatctccccctaccactcacacacccctgctgtctcaggttcatacctcctcccaggttttggttgctacctcacccctattgccttccagggatgtgatagttctgtgggcaagagannnnnnnnnnnnnnnnnnnnattttttcataaactgaagagcagctaagtcttccaacctgtggacagaacaactattagaatcttggaatcatatatatatatatatatatatatatatatatatatatacatacacacacacacacacacatatatatatggactgcaaggcttcacgcttgctaagtaagcattctaacaccaggccccactcagccctacagcgtgagaaagtcacagaatatgaagagttgggggaaggtgggccaggccaggaaggcagatgcagcatccctgtcaactggacctggggtgactgttgccttctgcagactgagactctagctaaagctggaccacttttgggattgcatacactgctttcttcccagaggacagtacagctttgaacagcatctgcatctccccctaccactcacacacccctgctgtctcaggttcatacctcctcccaggttttggttgctacctcacccctattgccttccagggatgtgatagttctgtgggcaagagagaaggttgcgtcggcagactgtgggcaaggctgggaggggtgctgtaggctgtagtccttccagcagcacgtatgacctgcagctaaacgataagggagcggaaaaaggaaggtgggtgtgaccagagctgtgggtgcttgtatgggtcatgtgacagtcccctttacaggcatgtggggtactcccaggggcattgaaggctaggtggggaggagggctatagtattcttttgggaagcaaaaacttatgccaacagataggagttgtccacttgtactggctttggtggcgggtcttaggtgtctgtcacctgttttacccttgtccctagatatgggttacaagggatgggggcaaccctgagttactgtaacagtgggtgtgacagaaggtagtggaggggggaactgtcacttctgataagggagggaggtcccacaggcaaacctgtgtctttatttccaaactgtccccttcatttgcctgccagtatgcaactgtcaattctgcctgtgggcagactcagggactagccaggcttccctctcaatcatcaagggcatcatgggtgccatccggggtggtggcaggcatctgtaatcctagcactaggcgagtggaggagaatctgctgtctgtgaaagagagcagcgagaaaggaaatacatggcaaatacttctcaaatcctccaggaagccacatgtttggttaagagagtggacctaagttttggggtgagctaggctgagggagtaagctgaagtagggctcctgactgtcttaggcaaaggttgtcttaggaaaagtccctgaatgggactgtggagatagctcagcacggaaaggtgaggaccaaagttaaatccccagagcctgtgcaaagctgagctccatagtgtgcatctgtagactcagtgcctatggcgagattggactcatccataggagcgcatggtccagccagcctggtgtacagagctgaggccaaccaagatgagactatggttgtgttctgacccacacatatgcgcacgtgcacacacacagtttcttttaatgaatccccagcaccaacatggcagctgacaagcttccatcactccagtgacaccttcttctgacctctgcaggcacctggcacacacggggaaatatatccacctaaaaagaaaaaagtagtggagctggagagatggctccgtggttaagagcactggctgccctttcacagaggacctgcaattcccagcacccacatggtagcgcacatattggttctgtctgtaactccagtacagggggtcagacatctgcacataagatacgtgcaggcaaagcacaaaatgtacacaaaataaagaagtaaactgttaaaagcccaatagctttataaaacaatacagatcatttaaattgtacagtctgggggggggggggcggggtgtgcatgccttcccgggaggcagaggcaggcagatctctgagttgaaggccagcctgcctggtctatagagtgagttctaggacagccagggctacacagggaaaccctgtctcagaaaacaaaacaaactgaacagtttagtggtttttagtgtatccagaactgtgagacatttactgcagccaacttaaggacatttttgtggtccctcaaagcagccctgtaccctgtttcccctggctcccttcttcctgtctatagatttgctgtcctgacacttcttataaagggaccatgcagtatatgtagttttgtactgttttcctggctgtggtttgtttgtttgtttgtttgtttgtttgtttgttttctctcagcctattttcaaggctgatccatgaagttgtgaacagcagaattctcttctcttttatagctggttaatattctgtagtatccacaatctagaccaggctggcgatgaacttgtagcagtccctgccccctttcacgggtgagtcttttatctgtccacatgacgggggctctgtcccctgactgtgttagtagggatgctcttgtttctgtgtgcctggggatttattttcctgggttgttcagatgtaggagtgaaattcctgggttgtagggtaagtgggtgcatagcatttggaagaactaccaaagtacttttccaaagcactaccaaagaggtccggtttctcggcatcatcgctaatcttatccttcccccttcttcccttcctcctgctggactctgggctcaagtcactttcccagtgggaccatgtacctgggacagtggagatgtgctcccatgcacagcttttgcctgcctgatgtctaactgtaggttgaccatttaaatcaattgcttatcattttatttttctttctttctctttctttttttttcgagacagggtttctctgtgtagctctggctgtcctggaactcactttgtagaccaggctggcctcaaactccagaaatccacctgcctctgccttccaagtgctgggattaaagtcgtgcaccaccactgcccggcgtttatcattttcttgttgaattgttggagctctttgtatactctgaatacaatttccttatgagacgtgtgatctgcaaatatttccttccaggtctttccaggttgtggttaggccatgaagcatgcagggttttttgttttggtaaagtccagcttgcctgtagttcttaaaaaagcctagacttttcaaactttatgtttgatttcagggctttcaagtgtttgctgaatcgaagtctggagagctgaattagcctacaagtttctggctttttcatctcaagaactaggtgactccgttttagattttggaaacctaaaatcctatgcacacagaacggaggtcatacagctttgcaaggcgttttctccagatgcctctgataacacgaaaggcgggtgtaaagtgattccgactaaactcactgactggggtctggggcctggggcttgggtttagccgggtttgaggtagatacaggagttctgaggggtgtgtgtgtgtgtgtgtgtgtgtgtgtgtgttgcacgtgcgcaaactctgagaacagaacgttgtcgttgcccaaggttcccttaacgctcccgtgtcacctaatgggattttcagtgttattttctccagtcaaatatacagcctagtagtccgtgcacctgagttatgtgcacagagtaccaggatgaaagtgtgaaaccatcgactgccctggtccctcccacagactctagcagctcagagaagacacatgacaatctgggcagtcatagtgacattctgctgacactcatatttgctgccccctttgtgtcacgtggccgtctccactcatacgtagatcgtgtgtcccatgcgaggtggggagaacggggcgctcaggagagcctgctccatagccagggtccttcttttggggacagcagttggactggcttttaaatgtgttatttcacagtctcttttctttcgtggccctcttagctctttatctccataactaaattggggtaagtgcgtgtgtcagatttttctctttgcatgtaatctgaacaaacagtataagtcacgtagctggggagttagagggtggagtgtgagaatgcaaatatataaggaacaggaggacctagtaaagaaaaggggtgagtgtgatgtctgtctgtctctgaatgcaaggaggttgtaagattggttctatagaaagctactcaagtagggcttgtgacagttgaaataagcccgaggggctgtggttttcggtagtagactgcttgtctaacatgcatgaggtcctaggtttccttcttagcacgaaacaaattagttaattaattaagaattagtcaaattagggcctggagagatggtcctgtggttagcagcacttctgttttttcagaggaccgagatttggttcccggcacccacgtggctgttcacaattccctgtaactccagctccagggcatttgatacccttctttggcctttttgggcaccaggcatctatgtggtgcatatatgtacttgtaggcaaacactcatacttgttaaaaaaaaaaatctttaaaagcgtttcctggcttattcatttagcattagcctgaggcggcggaattcgtgactgactgtcggcaagtatagttttgaagggaagcatggtctcatggccattcgtgttctgatgggagccgcgtcagtccagtgggggacactgggtagcagtggcatccgagatgccagagcttaggactttgcatacggttcttggatcacaaggttggcctgaatctgacaactctttctaagaatgttcttggaatgaccttggcctcttgtgttttggtgcctgctggggtcgtagtgtgatacattggagataaatgtgatgtggttaagattgtaggccctagagtcagaggatttgagctcattttctcttctaccaccaaccactgtatcctcaacacaaggtggctactgagagccaccctgtgaaattattgtaaagagtcagtcttgcgcgcgccggactggccagcagtaacgacgctgcaacaggatccttctgcacacgtttattgggagagcttgattgcagaggcgaagagaccccagcccagaattggtgctgcttatataggcctaggagaggcgtgtctcacacccggattggttatgcactaagcctcatttgcatgttcctcatctgattggctactctctctctctgtacctcacagagcctcattatcatacctcatttgcatgtctcacatctgattggttatactcccaaagcctcattatcatgcccgggccaggcagtgtctttgcaaaaaactttactgcattatgtacacattggttgtttgtccaaacttatgcgtggtggccagcagtagtcagtgccactctgcaatggcacatgtggcttcccacaagtcagtgccccaaagaagagcttacgagctggtgcttctcatggagtagatgccctcgaaacactggctgccctactgttaaaaagcagacagagcattaacatggacacagccctctccactgaagggcctctgctcctgtggcagtgccggccggtggtgacacagtatgatgacagcaacacacctgcagatgtttctggtttgttgggcaccgtcctgttaggcccctctctgtgggtgtccatgcgtgtgactttattttttgtagccatatgagaagcatgtctgtctcagcatccttgcggaggtgcgtgctcagagtagcatggctgctcgcacaccctgcactccacctgccttgaccgcgtttactcacctggagcttaggaatgggaaagctattctttgtccggatctgggaagccacaccgcttacctgagccttgccccaaagggaggagggattctgaatcctcagacttctctggtgacagttacacctttgggagaaggccctctgggtttgatcctttgaaaaggctcaggatcacctctccactttaactatcccacccagggtgggggtgagactggaggggtggcccctcggcccacctctgtgtgtccatcttgtgtctcggcataggtgcgggaatctggtgactgcctgtgtctagactcacttaattaggagttctctagagacaaggctttcagtagaccgtggctacagtcttctccctctcagtgagctgtgcctttgtctagtctttttttttttttaaatctttttgagacaaaggtcatgtgtagtccaggtgacctttcgaacttgcaatgtagagcatgactttaaagtcctaatcctcctgacctgcctcttcctcccacgtcatacgattttacaggtatgctcccatacttagtgagacaaggtcttgatactaggctgtccttgaactgcctctgcctccagagagcaggaattccaggtatgacccaccaagtgcgatttctattcacctttttttacatgtatgtgtatgcatgtggaggtcagaggtcatcttggaggagtttgttctctccttctaccaggtgggttctggagatgggctcatggtttccggcttagccgcaagccccttttcttctgccgagccatcttgcagccttcttttcatctatttgacaccatcctccgaagcatggcactgcctctggcactccccactttttccaggcctcgccacgggatgccaccggacgggagcgaagacgagtgtcaaaaacctttgactcacaggcacgcgctcccctgctccccctggtaccaggccggatggatatgctgtgcttatgttccccacaggcagttaggattaaaaacccacggtgggcaggtgtgggtggaggcaggatgagggtctgccaagaagagttggggctggcgcagcctggcgtgggcaccaggtgagcttcacacagcagggtgtggcctgctgggcatgtgcagacttagtgggggttgcctgcacagcaggtatgcggggctgacgggagctgctcagcgagcattggcatgatagggctgctttggctctggcaccgccaaaggctacatacgctgacgggtcaggttactgttgctgtgggaaccatgacctttgaatttcctggcttatgcctggaattttgcttgcataatgctgcaacaacttgagtttcccccttcccctttctcccttctcgttggcatctccttcttttttttttcttttttaaatatcagcaatcaaagctctctgctgttcctccttctcttgttgtagacagtcgtatgcactttcttcatgaggtgtgtgagcgggactgcagctcagtgccctgggctgcccagctgatgtttctggtctcctagtgagacctttgggaaggacgagttgggtgctgtgcatttttgggtgggaccagctgtgctcccacgtgtctcccgtgagcacctgctttcctcgtctctgtacttgctcgctgtgcgcctggaacacccagctggcttagacagttctctccagacctcagtttccgctggggtcgcaccttctctggggagcctgatgacagacacatcattacctgaagttgccctttccagtgagatgcatcatgggagagcagccaggcatagcctcaggatatgttttcttgtcccaggacccttttattattatttttggtttgggattccatgggtaacctggcttttcatatccataggctgagttatacaattgtttaaggctaagaattttagccattggttgagttatacgattgttaaaggctatgagttttagccgttggtttgcttgctaactggtgttctcatcagtttatatttgatgtgccgtgtcaaccacgccttgactgctcacttcctcgctttcttttgagaccaggactcatcttgcctagctggctttgagctccgtatcctcctgttgcagcctcctgagtgctggaatcataggtgtgtgtccctgtgctcagggttttctttctcccaccttcctcctgtcttctgtcctcccttagagacggggtcttaggatgtcccccggctggcctggaatcctgggttcgagcaggtctcccttccttggcctcctaagtgctgggatgatgggtgcccgccactgtgctcagtaagcaagtattagggtgtgtcagggaagacaaatgcttgtatcccaaccttggagatgtccagccaggccaccagtagcctgccctaccttgccgtcctcctcactgacctctaaacccattggcctctgttccgggaagggccgagtctgcgctcaccgggtaacctgtgcatgcagcgcttcctcctgcctcctgctcgcttcttccttcttggcctagccctgtctgtcaggcaaagcagcacttcccttactgaggccttgctgcaatgcctgagccttggaggaccgtccaggcccttcccttgccttttgctctttgcctcacagacctgtcagggtgcacagtaggagtgtgcttatggggaaaggtaggagttcactttgtgtgctcaaatccaacacagtacctcacacccagtggacgcagtagatgccgagcacagggacttcctgtatgacatgtagagtaacgtgaggcagtcagcagtctggggtcatttgaggcgcccctagagataaaactgaaatttcattgatttcggctccctacccccatccccacttcatccttcttttgtccgtttttggcttgtatgagaataacttgaggcaactcgggttcttgatgctcaaagagggcgaggcagattatgagtctagcctgtggaatcctagacacttgttttgggactcacttttgggacactcagtttttcctaaacttgtagagtcgtttgtgagagacagcctgggtgtctggcaaagcacagagaagtcagcccagctcctcccctgcgttctcccgctttctggcagcttgggcagtcagtcatgcaccattctggtctcctgaaggctgcccctgggctcagccttctcctctaccacttaagacctacctgcctgtgagaacctgtcagcaaagaacccgagggtgtggtgaagtaatgtctgtgaaggtgggaagaaagaaagactctgtgtggccagcgcccgaatcactcattagactttcctgggttcactcctggatcttcctgctgcctccatgttgcaataactgctacaaggaagtggagtggcctcctcacccgtgctggctcgggacctccaaacctacagtcctcagaccccagtcttgcatgcgtagggccaccgagtggcatatagcagtgtctcctgaaaagtggccgtctgcatcgccccttctgttgcctccagtttactcttagagccatttacacccacttttccgagcccagggagggggctggtgagttttttcatagtaggtccccgcccctcattattgaccaggaaccaagtatggatgccagagttgggtttctatatgagccctctccatccattgttcaacaagcccttcaccagttgtggagtcaacctggggtgtcttctccattccccagctcccacaggctggaggtcctttggggggtctctgtggtcggaagtgtgtctattacagtgtcagaccgtcttatttgctgttagtaaactcacaccatttgctggtcttgtgtgctgggggaatggcacctgggcctggtgtttactatggagatactctaccgcagatgacattccgcctccctctgcttcaccgcaaggaagtgtagggttgtctgacctggggagggagatgcaacagtctggagcctccacaagtctacagtgcctcctggtttcccctgcctggtcccggagaactgtattcttttggtttttcaatatagggttttgaacaagccttagctattcctggacttgctttgtagaccaggctgctggcatgagactcacagagatccccctgcctctgcctccctagtgctgggattaaaggcatgtgccaccatgccccatgagaactgtatttttttcaattcacacacaggtcctagcgatcaaactcagtcaggtttggcaacaagcacctttacccatggagccatcttgctagcgccctgtgtgtctgaaactgttgtcaagaggtgtccgtccagggctcctcatgctgtggctgcttagaatgcttgtgttgtgtgcaggggataggcctgggggtccacgggccaggtcatcatgcgttccagcttcagtgaacggcgtcctaaacatatgcgtcctgctctcctctgtgtgtggacaggctgtgagccacagacaaggggcccagggggaaatgttgaattcatagcttttgattctcaggcattcttccagtcagcgggctgtaaggaatagtctgtcccagaaagataagaaactgctgatggcaaagagaagctcttctgccaaaaaaggctggattctgttgtggttatgtccgtcttccctacatggtgggtttcgaaccctgcaatgtgaccctttcctaggggagtgaagtcccccctgagttctgtatgtagcaatgcctagtagtcacagaagggccctccttcaggccctacttcctcattccactgggagatttttttttcctgtctcaactcattgttcttctgtacagttctgtacagtttttacagataacgcctaacccccatccttcctcgagctagtcaaatttgggatcagaatgtctcggggaaggtgggagacgttgagaatcggagctagagaatcacaccagacagactcaggaaggcagcacatctttgaggtgtcagcattaggatgagcctcctccacgggagacaggctggtgcagagagcaggctcgtggcatccagttcacccttttccatgtcctccttgggaaggcagtgtcacctgctctgtactgaagtcccacactggctgattgaacctccgagtatgccaccaattgagaaaatgcaaactacaggggtcagacggcttgttggactcctggccctgaagctgcctcgctggacaaaatcatcttgcgcactttcttctcatctgtaatttgcagacaactgtaactgctcattacatggtttctggattaagatagcagcagacataattacagaaggctgttgagtgtattggttgtagacttcctggggtcagattccatcgtgtccatccctgtgtgactttggcaagttactgggtctctctgggtctccttttccttttatatagattcatgttggcagtggtaccttgcagtgaacgttttgtaaagccctgatgaactgggacacacacactcatcttactgcctgtcccatgtaatgtatgattactaagtgacagttcttttttaaaagctttatgtcagtcagagagggcctcatgcaatgcatgctggtctcaaactctattctcagctgacaatgtccttgaactccagctcctgagggctgagattgaaagctgggattataagtgtgtgctaccatgtctggcttgacagctgctctcttgttactgctggcatctttcatgaccttcaccctccttgtacttaaggacaggagatcaaggcatagcgcaccccagaggtatagtagggagctttctcgagtcagggtagaagtgaccttccagaagtgcttctcctaatgctgaaattataagcacattgtgctgatttcagaatcttaaaaaaaaaaaaatcccaagttattcctgggcatagtggttcaggcctttaattccagtattccctgaggcagaggcaggcacatctgtggattcttggtcagcctgatctatatagtgagctccaggccaaccatggctacacagttagacctcatcttaaaaaaaaaaaaaaaaaaaaaaaaaaccaccaccaaaaccccaggtcctgtgaaggctcagtgccccagtgtaggggaatgctagggtggtgaggcaggagtaggtgggtgggtgggtgggggagcaccctcatagaagcaaggggagaagggatggcagaggggaaactgggaaggggatagcatttgaaatgtaaataaaataaccaataaaatatttttaaaaaaacaggaataattgaaatccataatgtcacacctaagccaggcatggtggacctgactaaggctaagagttcaagacccacttgggctacgcgaggagatcctatctcagaacaaaacatgaggcagtcatatcttctcccaggcacacatgagaggagatctctatgagagagcgtgctgccccgggatgtgggaacaggctaagccactggacttgccccaggcctgccccacgctgagccgtccgtcccctcctctgcctgctagctaaggcggctctcctgtaggcttgttcaccttgtgtcccatccagattcaggctggccaccttcagctctaacattgtggacatactcaggctctgcagccaaagccagagcctatggccgctctttccaaaggccgctgtggctccttgttcttggacgagcagtcatgtctgcgtctggaatttgtgtagagcaattttttttttttttttttttaagaaactcaaatcattgaaccttgtcctttgtggatgaagtgatagttacattctgaggactggctcagacgagaaaccagctgttgttcagttctgtgaaggaaaatctccatgaagcatgtcgccactcacacagccatgttgtctgggaccgtcgtgtgtacggtagctggtccagctgggtgacagctggcacgggctcaggaggtattatctcacagagggtcgaagtttccccgggctgatgcgtctggcgcccttttccatacaaccacggggcagggggcagggggcggggtgggggcagcgcctgtgaatgtgagctttgcgtgggggatggggaacaaaacccaaacatgtggccaagccagactcacgccttagttaccagagacaggttgtcatctggtgacctggtgctgcctgtcctgccctgtgtagtgtgatgtcctcagttggcggctatgtcacaaatgactacagtcctgggctgagggctgtattgcccaccctgagcaggatggagacaaaaacgccagctggacatgatgggaggatggtcctgaggggcacagagtgacaacccagcgcagcaagcaagctgccttgcctggctttgccgttccaggatttcctgctcaaaccaaggaggagaggctggggttggcaccgttaccagccttgtcctcgtgagacacagactccagccccggggggtaatgtcactttgcttattccatttaggtggcgtctggcctgggaccggagagccggctccctcacctctgtcggccagagtatgtgagagtctcaggattttaattgtgtattgtaaatatggtacagtggagagtatgtccttaaattatgtccctgggaacctatgtgagtgtgagccatttgcctggttggttgagaggctctcatctggagccaggagcacctatcttgaacggtgttttctaccttgggtctgggtttaggtgaatggcgtagagacggcttttctgttcctcagtgcttcaaagtggctcagtgaagcctggcttccccaaggcaccatccctggggtgacgctggtcggcactgcactggagaagtgggcaggctcaggagagtgaaaggtcttacctgagcacctcggggtgtctgaggtctacctgttgtcctcatctcttggaggtcccacagaggaagggcagtacctgactgcgagttgtatctcagatttttgagtgttaaccccagtgttaaaccgcaaatgttaaaaggcttcatcactgacttgaggtggaacttggaggtgggggtgtcagtcttggtagtaggaaattagatgccactggggacatgctgggtcccctttgctttctatccaccatgagctagataggattcatctactcacgctcggactttgatgtcttgaggccctacaggcccagagtgatggggccgagtgattgtaaacacagaccttggaaaccgtgagctaaagaagcgtttccttcctttaggttggtttttctcaagtcctctgtcacagtgaaagaaggctaataccatggtagggtaaggaatgggtaaaatgggcccagcgcactaatggttacccccccttactgcttgggtggggaggtgaaggttgccgttcttcctatgtatgcataggagaaggagatgatgtcactaatacccagctgccttctcaagtgaggtgtccccagcagagtcctctctaaaccttgagcccttgggaatgtcagtagctagaagaccgagtgcctgcttttctgctgcctgagcaggctgcagacagtgagtgcagttgtgtggtgtgccctgggccgccgaatccactggtaattctttcagaatctgttgtcattggtgatcagaatttgttagattcccaacacagccttggctgtgctggaacttactgcatagaccaggctggccccaagctcacagagatctgcctgcctctgcctctgcctctgcctctaccccctaagtgctgggattaaaggcgagcgccaccattgcttggctgaaggtattccctctttagctttgcttttcccttgctgtggttctgatctgacccaaccttcatcccagccactgctcacaccttctgggtatcatctggccagcttcatgttcctgggtaacaattctctcggctgggctctggccatgctgctatgaagaccactgtacccccactggctccaacagcccagtgcaatgacccgtcctgtcctgtcctgtcctgtccttggggtccggactcaggcttgccacactatcggcgcagtgctcgggagaaggggatgctgctgctgtgccaccttgtgctgctgagcgttgagtagtgcagacacatggttgtcgtgattgtcagtggcagagcgcttctggtttgcctcacgtcgatcgagttcctttccctgaaggtctttcagtcagtctcaatttgaatgttcatgaacacggttgtgtgggtctgagcagtgaatctcgtgggcgaccagtggctggctccctttgctcggtggaagggtaccgaggaatggccgggcgtggcacagcagggtgaaggggccaccgatttagacgtaactggtgaggtgtggctggggcacagacccttctggcttgctttcttctcctccgctcccggagttggggccaccatctgttatgtgcaggcaggcttgacccctcaggagcacccaggtgcccatatagggaggagtggtaggtgcaggctgtgtgctgagaataaggcttttccctttagaactctgttcagctgtccgggaatttggggtgggggatggggttgtggggtgggaattgaggcagggtttctctgtgtagcacggggtggcttagaactcactgtgtagaccaggctcagagatccacctgcctctgatgtgctagggttaaaggcatgtgccctcactcccggctagctatcttggctagggcagataagggatggatttggggttaacagccatgcgaggagacagggaacccagtgggttggaggctggctaggtctgtcccaagtggagccggacgactgccctgctgacccgggactgagctactcctccgcaccctgggagtgccagggctggccagcccattctcacctctagccggccccgacaggataagatgcatgtgtatgctcttggtttgttcttccctttctcaggtacgtgctccgacctggccatccctcatatcctgccacacacagcttctgtccacttcacccccatgctttcctcactgtggcttcttcatggaggcaagcccctgggtttggccagagctctgacccacctgcctgccctcagagccaccttctgccgcctccgttctgtctccatggtcctcttcagggagggaggccctctgtactggaccaaaactaacgtattcaaagaatcggaatcccttccagcctggccgccattctcgctcaccccgttctctgcggtgggcacactttcccttgtcctgctagcctcatagcttgccccttccctcctctgtgttccaacactcctgtgtgccctcaccttggccttctctgcagcatggaaacttcctgctaggtccccgggtgtgcttacgtgtgtctcaacccctgagaaccgaagcttcaggcgggcagggcatccactgttaatgccccagcacctggcacacagtcaggagtggggggggggggcgtggacagcaaatgtctgttgagtccttttgtatgtgttgtatagtatacatgggtgcgtggaagccagacggagacataaggtgttctgctctgacactgtgacttactctgttgagacaggatgattctttcactaggctggtagccagtaaaccccagcagccccctgtctctacccctcctcccccttgtgttgaggtttctggtatatgtttagcttttactgtggatgctagagatttgaactctgaacctcatgcttgtgtagcgaccgatcttaattgctggaccgtctacccacctctgttagcttctttcatcgactctgttgatcacgtcctaagctctggagcacacactggtgtatatacccgtacgtatgcagagtcaatcaaagcctagtgcggagcagtgttggagatggaggacttcggggaggaatagcagcaggcgtgaagggactgaagagaccagtcctgctgggatgacacagtcccttaccacagccctggaccagaacacacatttgaaccctaagtgtctcaccactcctgttattcttcctgctactcctggggaaatagagggaaatgggagaatgcagcttccttggctaatgctgggccttgccccgaggcctgtgggtactctctccttttccatctctcttgagggtttttcctcccttagatttatctttagttctctattccacgaggatcctgttcacacacgtgttggcttccataatctatccccctgtggtgatggtaaggtggtggagggactcagggcctagcacactctaggcaattgctccatcatagaagcacagcccttccttgacatctctaatgcctgctgcccctcctccactagcagacagttaccgcaggcacttgcccctcgagtgcccacccttgtgactagtcctgcctccccgctgctgtattcttgagttgtgacctgctccaccaaagcttggccagagtcacttctgcttttgcatcaaagaagaagatgtgttccagctttagccggtgaggccaagggcgccgagcctcattggaaaggaaggctgccaagctggggcctcagctttcttttctttctcatataatagcttccagttattactggtcattgtctctcctaggagtgagttcaacctgatctttgagagcattgccttttaaggaacaatgtatggaccacatggtctgaggccctggagtaaccttggctgggtggagtctcagctgctgagttcaggaacctcaggctggaggagcttcctggtggaagggcttttctacaggtggcatggcgactggagaaggtcgccgtctggcagcacttgcagccacagaccgagtatcccttatctagatgctctgggacctgacgtgtcagatgtcagtttctggcctgttgggtgctttgcgtccacaaaacacctgggtctttgtactttggagcgtgtcagcttcagatagtcagcagggacgcataatagtgttccagagttggagttgttgaaaatcccctggaagtttccatcacccagagccccctcaggaggacatgtcgtgtgctcttggtttagtctcctttggttgcagttgtgaattgtatgtaatgtttaatgacttggtgactctcacaaagcttgggttcctcatcatttgcggattgtcacttgaggacctccagggaatgggtgccattgacgagtggtcctttcatccttcagggctctaataacagagctgtcttgtcgggattagcatcactgggaatgacagagtcatcatagtgttgttgtcttttatggaatagaagtctagaaaggactagcacgtgccatcccccaggtcaccagaactctggctcttgtctgtccaggaagatgagtattctggccctagtagccactgcaaggtagttataggctccaatccctctggtagacaggtcaaagtttaagttgccctaatttcatatatccttcagatacatagaatattcttcaggttaccttacggccagtcaggtgtggatgctggatcgccaactgtcttgtttttgtctttaaggaaaacaaaatgagatgccttagtccatatttggtcatttatgaagagaagtttaataagctgcttgtggtagtacacagtcaagaatcaggagttgaaggttatcttttggtacatagtaagatcaaggacttactatggactataggaggtcacccctcccctacccccccccccaattttttattttggttcttgtttctggagttcaggaaccctgaaagtggtgtggctatcttttcagcatctggtgttggcttcctgccctgtcataatgtgacagaagccattgggtaagacagagcaggcccactagcaggggtctgtcttctagaaagccactaataccaccatggagacactaggttgttgggcttatctagcctcaactaccaccaccctccagttgcccatggctctgccttagcgcacatgagcttcagtgttacaaagcaggaagactgagttctctgggagacatggatggcccacaacttgtttgtttgtttgtttgtttgtttgtttgtttgtttttgcttgattggtttggtttttcgagacagggtttctctgtatagccctggctgtcctggaactcactttgtagaccaggctggcctggaactcagaaatccgcctgcctctgcctcctgagtgcagagattaaaggtgtgcaccaccacgcctggctggcccacaactttttttttttttttttttttttaaagatgaaatgttctttctattgatctgtagcacagtctcaatgcttttttttttaagatttatttatttattatatgtaaatacactgtagacacaccagaagagggagtcagatcttgttatggatggttgtgagccaccatgtggttgctgggatttgaactctggaccttcggaagagcagtcgggtgctcttacccactgagccatctcaccagccctggcccacaacttttaaaggatctttctggaagacatgtctttctcccacatcttctatctcatagaacagtctacctatagaacagtcaggctagcctctaggaaggctgggaagtgccttctttgcctcgggtttgtaacagagcgggttggtgagttggaattctgtagtgcctactgcacttcctggttgaggttggagggttgaacattgttatttcctgccccgtgggagtctagttcttcctccccgtgtcctggagacctagagaggacgtaagcacaaggtccatggagacccactgaggctagatggccttaccctctcctttgtccttcttatgagctagagtacaaaggccgttgaagctgtaagtgaggtcttcttggccagcagtgacagtgtccctctgtgtcacttccacagctgcattctgacctgtgagaccaggtagcactaaaaactctggagcccctcttcctgctccttttattctgatttgcaggtaaactgtttccaaataccacttaatggtttaaaatacagatttatgactgaaactgaaattactccctagaccccaggtcttaggaaacttgggtcctgcacctactcagtgaacaagccagagacctcaccagtctcagtgcaagccttctgtgaccccatcctggggcatgcaagcctgaggtctagttctacttcctacctcaacacttgaggtgcacagaaatagagctgtcaagagaaacttggggttctggtttgccttcctgaacagtagtaccttggagagctgtaagagcactcaactgacatgctggggagcactcatcctgagacatagcatgctcgggtgagtaggatgactgctggggagcactcatcctgagacttagcatgctagggtgagtgagtgggatgactgctggggagcactcatcattagacttatgctagtgtgagggagatgacttctgggtgtgggcaggagtgtgggtgagtgccagttatttgtggagacctggggcacactgtcccatgcttcagtttcctcagtgagtggagaggaggttgggcttgtctgtgcttgacagcatggataggattgggctagactagcaagtgacagccgctcctgattctttgctgtggccactttcttaccctttgttagggagaatttgacggcgctggcaggggaaagcccagagtgttcatttctcagagattaccatgtgctagatagtctgacgattaaatcactgccatttatcctaacaagaaccagagaggctgagtggtttattatagtcacacagcttctacagagctgcacaaaaagatccaaatccaattctgcttgactcaaagtgtttggcctgaatcatatggggtttgatcccttttcattcaatcgagtgttccaggcacagtttcaggagctaaagacaacatcaagaagcaaggcagacaaaaattcccacccccatggagcatgcggcttaacaaaagagactttctcagcttctaccatcagatccttccactgcgtcttctaaccccatagctgagataaatatcacagccattctgtagctccttagggggtctctgtccatgtccacttgtcccagaggtcgccttatccatccacagctcacacatcctgggctgtcctggggagtgtggctcgttctcagccatcaagggagctgcttggccatcccagcatcccactggggccctgtggatgggggagaaggtcagggatgtttttgtcggtgttggggtaagtcaatgtctggagaccagtgctttcctttgattctggacagaggaagggatgggccaggagaatgcttcctgccatcctgtgttcgaggccagttgaatgagaactctaggtttgatgttgccacccgtgttctgatgttgggggggctgatgggatttgtcactgctgtcatctctagccgtgtgtcaggcagtggcccaggcggttcacacgccgtcgctgccttcctctgagggtttgtctagttttttgttttatgtgtgtgggtgttttgccagaattggttggtgtctgggctctatgtgcttgcaatacctgtagaggccagaaaagggttttacatctcctggaactggagttacaaccccaacttgtcttatgtcttagtttcttttctactgtgtacttggggctggtgagatggctcagcagttaagagcactgactgctcttccaaaggtccagagttcaaatcccagcaaccacatggtggctcacaaccatctgtaatgagatctgacgccctcttgtggtgtgtctgaagacatctactgtgtattaaactccacagactggcccagttctggaggccaggaagtcccaaagtgtggaacccaatcagagggccatcctgctcctgtatcatgtgacaggagggtgagctggcaggtaccagtcagaggaagccagcccagtctcttctcaggagtccagtcactcacaagggcggatctcttaaagcctttagctagtatgatggtttggatatgctagggccaggaagtggcactgttaggaggtgtggccttgttggaggaagtgtatcactcacagggtgggctttgagaccctcctcctcctccctgcctggaagacagtcttctggctgcctttgaatcaagatgtaaaacttgcagcttctccagcaccatgtctgcctgcacattgccgtgcttccccccatgatgataatggactgaatctctgaagctgtaagccagccttaactaaatgctttttttaaaaagttgccttttatcatggtgtctcttcacagcagtgaaaccccaactgagacacctagccttcagctttcgcttgtgtttaagatagttagtgctggtctgaagctgatgatcctcctgcctcagcacatcagtgggctggcattgcaccacacccggcccctaatccactcctctactcttacagtgacccgctaaacttccaagatgtcagaagggactcacagcaccgtccctggttcagagctaataagtgtgggcagggaggcttgcctagtgagccctcagaggaaggaaggcacaagtgtggagagagtgtggcgagaaggggcagcaggggctggtctgaagctgatgatcctcctgcctcagcacatcagtgggctggcattgcaccacacccggcccctaatccactcctctactcttacagtgacccgctaaacttccaagatgtcagaagggactcacagcaccgtccctggttcagagctaataagtgtgggcagggaggcttgcctagtgagccctcagaggaaggaaggcacaagtgtggagagagtgtggcgagaaggggcagcaggggccctgggctatccccccactcagcggcttgtcctgggttggagggactggctgcctatgaaatgtcaaagatcggcaagggtcctgtgcctttacacagtgctcctcagcattcatgatgctgggacccttttatatgtctcctcctgttgtagtgacccccacccgtaaaactgttttgtcgctactttataactctaatttttattactgttatgactggtagtgtaaatatttggtatgcaggatatctgatatgtgatcccccccccccccccgcaaagggttctgacccacaagttgagagccattgccttataggaaggagagtgtcttcattcagtcccagcacaggctgtatggatgattgtgggttctgtgagccctgggattcccagccttccagttggctccaccttgggactgcatatgtcacctaactctttttgactcaggccgggcacccctagggaacatttctaatgaatgtctgttttactataccataacagaaaagcatttgactttatgacgacctgtagcaattgtttcttccctccggtagacttgaggttgatcttggacaagtaggtagttgccctgtgccgaggttctcctcctgttgaatagaggaagtctcagaccctcatcggggaccccaagggaggggctgatgtagttccccacgttctgcagcttgctgggcccttctcatggctcacctctgtccccacctcagatgtgcagctggatatggagtaggctggcccactttcaatgacagtgcccctgcctcagatctgcctctgattctgagtacagtactctgtcaccatgccacctcacctctttgtgaactgtgggttgtgggctgtggtgctctgagcacttgtttctgtcactgaggaaccagctgagtgagggtaatgccacgcatggtctgagacagtgaaggaagtggcccagccaggaagcccagagcatctctggatggtgaggccgctgttttattccttctcctgggagacttgacccagggtggagccgccgatggggtttccttttctgttcattgtggggagggagggtttaagggcagatagctcacagaataatctggctagtggcctggtgtgtgtggagttcatggctttaagcctctgtgccaatgggtggtggagtggttgatgttctctgagacactttggtttggcctgtagacacgatgcactgaagtgggactaaccaatcagagaaacccgctggcctcgaggtgtctgggaagcagagatgggaaggggctacggtcccagtgtcccctccaaggatgtgccttcagtgacctaacattccaaaaggtccctcctcctataggtcccacctcttcctaaaagtgcataggctagtgatcaggccttcgacccacggacacccaagatcgcaactctaataagcagggtgacagtaggtgcatcggcatctttcccaatgtgcatggccatgtcccagatgttgtgcatttgtgtttcctgttcccaaggtgtcttctctccctcctcgcttcccagtgacgctctgccttgtggcttgtctgcattcgcttggtcctcctaacttccctgttcccatctctcctttatctttttttccccacctcttaggtaggagtttgaagcacctgagctccttgtcaggtggtggcaggagtgctgcccacaggcttgctggaccgcagcattgcatctcctcccctcagacctctgaaccaagctgcaccgtgcaaggcacactagtgagtgtggcctgcacagcagccttgggcttcgctcatttttcatcttttatactgactgagttagatgcaatttcttcaatttcttcttgtatagattccttttgtttgggtctctgtatctggggcagtcttggtacagagcaggcacccaatcaatacctgcagattagcaatcactgtttatttttttaaaaagatctaaagaagcgtggagggaattgaatgacagttgatgacatgagggaattgaatgacagttgatgacatgtgtgctcataagaagcaccacagaggtcacagtgcattgagtttactgagtgaggctgtgttggaagggacagccagcccttaagtctccatgacatcatgaccctgggaggtaatggtcttctctgaactgtaatttaattgctgggcttccaaagtgagggtaaccctataattagagtgttattctgaagacagaaatgagctaatgcaggtcgagaatgcagcagtgtttggcacggaagtgctccgtaagtggtagctgatgaacacattcatgcgcttggccataactggtattttcaggtacttcaattggaccctcgtcgatctttgtgatagcttctgctttatggaggaaacaaaacagagacggcctctgaggtcacgcttgtcacgctttacccctctcctggtattgtgtcatagtttccaggttgggtcatcagcttcagaggagcagggtcccagactttcgtggtcatgtgtcgtggggagaagtgcattctgggtagtagtgaatgcagtctgtctgctgggtgaagattagggagagctgaggtgtgactgagagagaacatccctagcttgccaagctctcccatctcccctcggtatgttggcaggtccttccctctcctgcctccctcttcccccccccccccactcctcccctctctcccctctgagaactggcacacaagtggtgctgttgttctcaggttgtggacaccagaacaaaactgaccaaatcatctaagagtgatgccgtcccagaggcgagtggaggaggatgggctagaactgccttccagtagatcactccagagggctgtggctcagagaaccaggactggagagttgatgtctcctaggtgcgcactgatgatttccgagcaacaggctgtgagtggcagaagtcctggtgtccgtgttgatgaactcacacctgcgttgcatggtgcttgagagaagaaatcgttacagcattcatgtcctttgccagggttaaaaaaaaaatcgcacattatttgcatgggatccatcttctatgctgtgtctaaaccttgttaggtcatgttaaagtcttctgattctcttcaggggtcgaggtgcctgtacatccaggttttaggcaggtcagtctgtcaccgccagcatgaacagacctactgtagtctactgtggtgattctgcaacagctgcacgtgcgtcgtactgagagctttagcacaaggagcacagcagggtaggagtctagagcagctggtctcaaccttcctgacgctgccacctttaatgcagttttctcatgtggtggtgaccctcaccataaaattatgtcattgctacttcacaactatagttttgctaccattatgagttgtcacgtaaatatcggatatgcaggatacctgatatgtgacccctgtgaaagggtagtttgctctctgaaggggtcacaacccacaggtcgagaacccctggtctagagcaaggcaacaccaagtgtcctccctcctcagacaaccatgcccatagaaagtggcaccactgtcacgtggctggaattacagccatctgggctggtgagtcactgctgtcttggtgggcagaacctcacctgcgaaatgcaaggtgtagtgtcaatcaacatgggcagtgatgggggcaggccagactccaagctttgaaccttgatggacagacagcaggcatcacccgcactgtttctcgtccacacccaccttgcccttgtcatgagacattaaagtatttcttccctctgctttgggtctggcttctccacctgtactctgaagtgtgaggcatagggaggccttgctgaggctcctgcagccccaccttcccgctcagggtcaggatcctgctggtgagcagtgggctggaaagcagagggaggagccttccctggggaagaaggcaggaaagaccagaggctaaaaataggcagttgtgagaacctgggagtgctccctgaggccagccgcgcacctcccacgatggctgggctctgtgcacagggtgtttagaggtccttgtcaaacaaatatcattgacaccctaaatgtcagcttttactgtgcaccccatatatgatagtctgctgaccgtctgatgtgtgttacccagtcatctagggatgcaggtgtgtgttccatccctgtgcatgtgcccacatgtgctcacacgtgcatgtaatgggtgtgtctgcatgtgtgtggcgctcggaggccttgccaagttctccatttatctacttaacagtgcttcacagcaagcctctttgggtcaaatcaaagcatctcccaggactgggtttgggccagtgaatgggcagcctgggtcatgggctgcacagggggcctcgtgctgcggaacacaggatggaaggcgtgctgtgttagctgttctcgaaaggtcttgacctccagctgcctcatttttccacttttcctccaagaagtagggctgttttcccactaaggtaaaatccgatctcccttacctgaccacgcaagcaagtcagtaggcttgccctggttaaagtggcaaaagttccctctgtgccttctgggcatctagagggttctctaaggagaatccattacagctcttgctggcaactatttcacactctatgttgtgtggagtgtccccacaacaataggtctccagatgatgctgagtcccgtctcctgtcctaacttctcttccatgtctgcttttgtgtccctctatgagtctgtctgtcgttcccacaagctgggaaaggtctgctcttctgcagactgcccctggctaggctctggtcctccctgtcttgacttctgattagccaacccccacggtgagcaatagtgcctgggcttgggtgactcattccattcctgttgtctcggcccgctcactaaatatagcctcccctttctcccatcccttcatcttcccatctctgggcagaaaagttacccagcttgtggtcttcgatgtggtgggctaggcaggcagcaccctgggtgaggtggggggcttctgcttgctgccaccaggctggtgtggaggacacctcagttctcaggaccctgtttggagtagtgggtctgtgttaccagggcaaccagatctcagggtacagctcctcgcagtgccagtcctttgtgagaccgttgttttatttgggaggatctgggggtcagtaagaatcgatggtctaatgtgggttcttcattatccttttagggaaactggtcacacagccccagggggttaaggagcagagagctcaccagcaggtgttggtcctgtctgtcaacgaaggagccccaccccagccagccagagtcacagtgaacttcagcttgggcttagagcctgaggtgtcccttttttttcagtttcatgtgcctgggtacatggggcaaagtgaactcaggcctttattatggttttcaggcaggacgggtctgccgtagtcttgccacatcactggtccagtcgagcttggggaaggaacttcccctgcagggaccaccttgagaaatggtagcccacagagctaggagtgggaaagggaaccaggtctttgtttttgggagctgtggagaataatagtccatagcagttggcccctgaagtgtgtcacctacctctgtctagcctagactatatttgttgtcattgtcattgtcttttttttttttttttttttagagacagggtcttaattacacagccctggctggcctggatcttgctatgcaatccaggcctcaaattctgagacctgcccttttctgcttcccaaaagctggggttaaaggcgtgcaccacacccagctacgctggtgttgtcttagttttgctcctactccctaattttatctttgtctgtttatttgcttgtattaagttagtctggcttcggctggcagggaatgcattgtttagtccaaggtgacctcagacctgggattcccctgcctcagcaccctaaatactgggactacaggcgtagaccaccacactcagctagcctcgctgtgtcataaagaaagagttacaccgtgtatgatggagatattttacctgattattatatatttaatctatgtatcagttgcatagagaaggttgtaggagcacagaggtggactgtgttgtctatgacacaagcaatgatatccgtgtatccatgtagttgtgttgagatctctgttcttgtccggccctcgcccatctcccgtcactatggggtgctgtgtaaaaaaaaaacggcccttatcatgctcaactgcaccttccgttaaaaatgcagttgcccagggccgagggtgcaaaccttgcctaacttccatgcttcttggggttggttccacagcactgtaaaaaactgtaactaaaaacctagacaaaacccaagtcaaaggaaagtatttatcctgtaggtttgcgtgtctggtggccagcatgggcccatgtcttggagcttgttcccttcagcctggtcgctgtttcacattcaggagtccggctgcgtggctgcgtggctgcatggctgcatggctgctgggctgcagagagtgctttgcagagcagagggtgggtcgctctgtgccctctgcctccagttttattgttagggcttcttgtaataatatggcttgtggatacacacacacacatacacacacacacacacacacacacacacacacccctcctttctgattctaaccttggccatatagcttcattcataagattgctaatattggctggaggaaagtacatcgccaaggcccaggaacctccagccctgatgccccagcggaaaccggatctgtggattgtccacattctcttcttgtctgccctgctctctctgacgcttggaacccctggaaacacacctgcacacacaagctttcctggaacgctggctccttgcctggcaaggagagctgggaaagatgtcaccggccgcctcttggaacaaaggcttccactgtcagctggagcgggggaggggacaggtacgctccccggtggtctgggacacacagccagccggagcattttagatttcacatttttctttttccttagcaagctcttccctggcgcttctcggcttgcttctacagtttcacacagaaacggggagaagaaaatacctacctcatacctttgccgtttgcagagccttgttcacagacaaaacctgctccaccttgactgtggtgattggtggttgatgatgtcatggcgtaacactctgtctgtgagaaggccccagaagaggcagcagagctcctgctcctttgttcccttcaatggacgcctcagctgaggtgggaaaggtgggggcggagccaaagagcctgtacctcaattcaggcctgcctcagatggggaaggagctcagaagatattgcttatagtaagagttcctctgttacacccaggggattttgatctgtctgctgaagaggaggcaggccttttgagagaagccacagtccccgggcccaagaaaataggaagagatgtttaagaaaataaataatgatcagtaaagtgttttttcctgggggtgcaggggaaagatatcggggcttgggtagaaggccttgtgtatgcccaggccggcgctgtattgccgaggtacacccctaagccctcttgcattctgtttggagactgagtcaccctcgggctttgaatttgtgaggcttcctgtacctctaggtcctacggaacattctcatgtagttccttgtacgggctgggaggttcttgcactgtcagtgtccacagaggtgaactttagcacagtactgaggacactatacgcctcccacttaaagggcctcagctgcagtctgctcagccccactggcctgctgtggcatagaaggaagagttgggctctggtgacctgcagggcaggcctgtcctgagtctctcagagcagtgagactggtgggtgggtggcctgggttggtgctgtcgaattactacccctcatccccagactctgttcttctcatctggaaaccaagttgggggccaggtctcctcatcattttctgaagcagaatagcatgaaaccatggtgtgctgtccacagtctcggtgaggtctctgatcgttgtgccttcatgattgtgagttagcactcattcctcagtgccatctccatagggcgattggcaaagccaccggctccggttcgtccagtagaagattgaagtatttctgatagacgactctgctgtcagggtagaggacagggcaggagtccctcccaaccctcagggctgaccttggtgggacttggttatatttgtccttccttgggtacccacaactttgatttgttttgtggaaggcggtccagaggtggcccggcggccatggtcactccgtgcgtgatcctcccccacccacgtggctcatgttggtgctgccctcccttgcaaacatacaatcactggctatctttggatgtgttgtggtatagcttcacctcagaagagacaggatggtgcagccagtttacttcctcctgaacaaaaaccacccaaacccaaatcatgcacacgtcattttcttgaactctttggcttactgcgcagctgtcatcgttgggcagttctgtgtcgccgctgtcctctgcctggagaaaccagagctttgctgggggtgtgggggtgggtgccctatttgctgctggaagtcaccgaagggtgcatgcgctgagcccccagccactcagccgaatgtgtgctgtatcccctgtccccagcttctaagctgttagaaccagttggggtgaagagagacacagaccgcgtcaccaccgagatccggatctggctggggcctgatcactggagtgtttctgcagtttatgattctagcaaactccatgtccaggtggctgagcagccatgattgttccttcactcctcacagtgggctaagccagcacagtggccatttggaagagtcgctcagtcaggggagggggggagcacattgctcagtggggggggagcacggctagcccgtgagagatcttgggttccatccccagcataaatcaaataaggaagcatgcaagagcatggtgagtcttttgcaaattgacaattgtttctgtgttataaacagtgaccactggggcctatggtgacactcggatcttaacttctgtctttgctggagagccccacctcctggggagaacccagctgagggctccactaagggcctttctaaccagcaggaccttcctccaagtctcagacccactgctccagaaaacaggaaggaggatgcactgaaggccttggtcagtaccttgctggcggttggctaccagctgatggacgggcaggctcccacatcctgcagctggtttccactatagctgatgttgatggctttgcttctgattgcagagtctgcctgggactcagtcttcggggactcgaggcagatgcaggccagggaaaagtggtgtggaacagccgtgagcctttgtctcccccaaggacacaaaatgagaatgagaattgtgtgggactggggtcccctcgtgttgagtgagcacacggtgtgctgtggtgcagcgggcgatagcagtctcagatttgcccgcttgtccttcacccctggggctttggtgagggatggaggacagtgggctgtcatcctatcatggggtcagctggctcgggagtggacagggccttcggcttgcattgcatagctcacctgtttggattaaatagtcctggtgggcatctggcaccagtctgccctgtgatgcaggactcacggcctctcctgcaggtacttcccacacagatgtaggaaatgttcgtcgttgatgaggaccctgcctgggtcctgttttgattcctggctcaagctgccattgctttcatgcttgtacatcctggggtttaggtcatcgccgtctttctttatgatgggttttcttttattcctttaccctccttcttatcttcctcctttgaatgatcatggagccagtctctccttgttcccttggaggacatctcggagaatcagctctctttgctgtgctgcacaaattctttccaggcactggaaatcatgctttcaaagctgtgtccaattcgcccaggaagagcaggcattaaagtggaagctgattggtacattggaaaaatcaggcttcagcactccaccacctggaattataaagccccgagccgttactgagtgcctgaggcgtatctgacctgacagccacactggacaggcggctatagtactgtgccggtagggacacatctggcctgcatgagggactcatgtgtgtggtcactgtgtgttgttggtcctagtgccttctgaattgggtgtctcttgtggcttgaatagagcagcctcctgcagtagactggctgtcttgggtaggcccatctgtcacagaggaccacgatcaccttaggttactacaaagataggagctgtccttcccaagttccttcccagactagaaaggcctttcagttttgagcgtgaaaagaagtgttgtctggctcctttaggcgtggttgaggtcatcctgcagaaggagacagatgagttctttatatgatgctgaagttagatccttgtctcatgcctatatgatgtcatcactcagacttgttctgcccatgtggagaccctgaccctaacctgtagtcaggtccacactggagtttggtgactctggccccctactggaaaaggagccttcctctaaactatagaatgtgtcacagggatggagacctcagtaggctgggagcatggaccctgcttgctgttaatcagcctcacacccctggctctggtcagaagcccattgggctcccagctgtctgtcagatcatatgcgaggtagtgctgggtgggttctgtcttagtgtggatccattcatgcatgctgtggctgtcccttagttgtgtttgagacacttagaaggtgcccaccttttatgtggttgtgtaatatgtgttctgtaaggtatgcaattcatgactttaagaaatgttttaagttacgtgtgtcttgatgtgggtgcacacacgcaggtgcccatagagatcagaagaaggatatggtcccccagagctggaattacaggtgagccaacaagtggggttgcttagaacagaacccaggcttttaaccaatgaatgagccatcattcccgtaacaaatgagatcgatcggtcaggggagccaagcctgtgaaatcttaggtatctgcagtatcggcccttccgtagctgtggggggagttgggaaactgggtctttagatggagaggttagaggaggacttagtctgtgggagacatcaccctggatatcgatttgaagttttgtttgtgtttagtctttgataaatggagttatgcagttcgatccttttgtatctgtctgctctgactcatgggacatacatgagtctgtgcacttcatttgcattgctatgttgcagtccaatgggccctctgtacctgtacccatgagctctgcctcagtactgatatgcatagacatagtccttattccataaataatgcagtaaggtaccaaatatgcacggacttagtcatcattccttaaacaatacgctatagcagctatttgcataatataaacattgtgtggtgctacaagttgtctagagatgatttaaaatatatttggtatagttgaggatgtagctcattggatagagtacttgtccagcatgcaggcagtcatttgttcaaaacttaccaccacataaactgactgtggtggtgcctcaggaggtggaggcaggagaatgacaagttccagggttagctcatctacacagtcagtgtgtggtcagcctgggctatgttagccttgcctcaaattgaacaaatgaatggatggataaatgaataataggtgaatgaatgaatgaatgaatgaatgaatgaaaagttgaaggctttgcatagatgatctgcatctgttgtttcacagggcagaggagttcaggctttggcatgggcaggtatccttgttaccatcctatgtgactacggaaagagaagtatggttaatcttggttttcctttttcttttctttctttttttctttctttctttctttctttctttctttcttttttttctgtataatactctgttgcatggtatagttgcatttgttgcattgtccctaatcatttgggttgctgttgacatttgggttatttctagtttgggggcaaagccgatatgagcattcctgtgctagcctcttagcatagacctaactttcttctctctgtttctgctccatggtacaatatttgccctctcttaggtgtttttttttttttttttggttgttgtttggttgttttgttgttgtttttgttattggtgtttttacattttgttttgtttttgagacaatgttttgttaatgtgaccacgggccacatattatgagctcctgtctcagccacctaagtgctgggatcacaggcccgtaccaccatgcctgcctcatgttcacctctgctgcctgtatggacaagaatggaattgcattttaaggtgcatcaagagccagtgtttagcagtttcccaaagtggttctagcatagttgtctgggttccggttgtcccctgtccttacctgctcttggtattgccagtcttgaactttagtcagtctcacagatatgtaatagtgtctcatatttctgattgacatttcctgatgactaattaattgttgatattgattgttcatgtgttttgaggtttaacattttcacatctttctacttgtacagacataaccataacagcttttattcagctaccaaaaggtgctcattggtgggtgaatgaatgcgtaaacaggatacactgttggccgtggtgaaataatatttagtcacaaaaagggaagggatgcaagaaaacctgccaagtcagaggaaccatgaaacagtatctatataggagctgtgaaagactgcccatcagttaagaacatccactgaccttgcagaggacccgagtttggttccttgtatccagttctggtggctcacagccacctctaagtctaggaagatttgatgcacatctatacctagatgcatacaagtactcataatttaaaagaatactaattttaaaggacagatgatacattcaaaggacaagtagagaggagaggggaatagaagccattgtttcttgggataataggttctggtggggattatgaaaagttctagaaataggtgtagtcagacatacaacatggccccagatgtgcacttaaaactggttaaaatggtagctttcatgttacatcattcttatcacaaaaggcaaaccacccacaggaaaaagcctgcatttaggagcctgtgccagagtccggaaggtggttcaaggtagtgaggctaggaggtgggaggagtctgggagagatgcaggaagagtgacaggagtgtgtctgcctcctcacagtgcacctcccttgtcctctgccactgtggtggcagctgtgaaagcttccttttcctcctgctcttcttctcactcacccttttaaattttatttatttattttatgcatatggatgttttgccggcatgtatttctgtgtaccatgtgcacccagtgtccatggagaccagaaggaggcatcagctcccctggaactggagttacagatgtttttaaggcgtggaagcactgggaatcgatccctggtcctccggtagagccgtcagtgtccttaaccactgagccatctctctactccccacggtggcctcttgcttgacattagtggagtcgaacggcccctctgaggaacacacaggagagcacaggcctcctcaagtgagggggctgatggatgaggctctgtgactcggtcctcacgtcttagccgttggctgtgccttgggtctgtcagtccagctgtgcgttgggtctgtcagtctgttcagggtttttgatgtcaccgcccttgctgcttttgcttacactcggtttgtacatgaagtcaaaccgaggacttggaccaaagtcagtctcaagaagcaagacgtccggagggccctgcagctgtgtgggtgcctcagctaagatgcctgtgcctcatgctagagttcaaagcatcttccccataaatctcattgtgtttctttgatcagctatttagcaaattacagggttggggattcacagcctgttgctctctgccgtgccagtgaaagtgtccagctgtcgggaggaaggtcgctgcccactgaggccttaactgactgccacgtgtttggtaccttggctctcagactaaaagtctctggcaatggagagatttgtgcaacactcacattgcggaggaagggtgcaggaaggccgaagcagacagaattgtgtttcctgtttttccttttgagagaaggtcgcactgtatagcccaggctgttcttgaattcatgatagttctgcctcagccttcccagtgctgggttacaggtactagcacttagcccaaactaaggaattctttctttttgtctgagaaggccttttttttttttttaaaccagtattaactcagatgaggtaacttggtggtaaaggctgcaaagcccgatgaaagaactgattcctgcaacgtgtccctgatctttcctgtggcctaaaagtcaggcactctggtgctgtgggactggaggccagttacctggtttgtagtttgtttagatcccacaactcttttatcgctgttgtctctattcagagccatcactctgtggataccaagcaggcggcgtaagcaggtggcgtaagcaggacatttggttaaactgaattctcaccggtaggcctctctctgggtgcagtgatctgggctgtcttacatgttcctggtgtccggtcctcctctactgcttgtccagatgattgtcaccaaagtgacatcttttttcctgctaacccccagaggtctcaggagctcacggggtgagaacaacaatgctggtgtttgcttgacattgactctgaggaggtgtaactctctcgatggcacactcctgtcacttgcaggatgtcagggtggacgctagaatgaggagaggcaggcagagtctgacaggctgcgctttcccctctgtcaacccatggtgatgactcctgtcccacaccactggatcctctgcgggttctagaggtgtcttttgactcaagacctttgacaataacgcccgatgacagtagttcctgtatgtgggtcaagtgtcttgtggggcagaatgtgcctgccttcttttccccaggtgagcagtacttctgagggcgcctgttaaaccgcacctgaactgggttaggcacactggggtccgctgctctattcccagatcagttttctagctgtggtccttggtgcaggcgatgatgctgtccgagagctcatgggagagcaagtggggaggatggcttgttaggagtaagacttgcacaagctgccgggcggtggtggcgcacacctttgatcccagcacttgggaggcagagcaggcggatttctgagtttgaggccagcctggtatacagagtgagttccaggacagcttgggctatacagagaaaccctgtctcgggaaaaaaaaaaaaaaaaaaaaaagacttgcacaggccacagcagctgtgtgtgtgtgacagcaataagtgacacttcctgacatccccaccctgacccccagaacacatgtgttctcctagactttacaagttcgtggggcaagagccggcagtgatcctgctacaggaagctggaattttagaagaacaggtgggaggggggtcacctcaagcagcctcacgccatctgcattgcattttaggacatggcagacacagaatgtaacctgttggctcttcagggtctatgctgtctaatctcattggtagtgaaaagaaatcttctgtagaaacttgaggtatctggctttgagcccagaagggttggaatcttagaactaaaagagcccgtggtggttgtctgttggcaactggattgtaagggaaaggaaataaaagtttaggctgaacttcagtgttgtcctagggggctcatcctctagtagggtccctggcaggaagggaaaggttgtgggctgtgcatttgacagaactggccacggcaagcaaggtttttgctggtgtgtgtgtgtgtgtgtgtgtgtgtatgtggtgtgatcagcagtattagagccacctaggagtgaggcgaatgggagacagttggcccagacaagcacttggtgcaaaggaaaccagcttcactggtgaaattgtgtctaaatctttcatctaaacctttcatctaattggaagggagaaagggattggattgaataggattcaggggggccctccagctctaacctgtgcattgggaagaacaactgagcgtttctttatgcagacagagtgtgtgtgtgtgtgtgtgtgtgtgtgtgtacatggcatcaatggcagaagactgggaaccccggtcgttactagagccggaactgggttaattcggcttgccagccacgcgtgtcacagaagacgcatgtgacctggctgaggagcagaggttggcttccttgctagctgcctgtccttccttcccagcagtttgcttgactggctttttcttgtttcatcctctgcatctctaagaagcccatagagcacctggccaggcctctctatagccccagaaggcagatatggtccagaaccgccagtggcaaacagtagtcattttcatagttaggggacatccagagatgcctcgaggagttcggctttgaccacttccctgtcctcttgtcccctaaatcaagttaatagcaaattgatcaccattcgaattctcttcctcctttccatagttgtgacatttgacatcgtctcctagaaagcctttcactttcctcttcctcccttgtggtatcactctggacagcatcagttttcctactagaatccatgctaagtgtaggtaggtgtacatagccccttcctgctagcaagaggtgtggtcactgtggcgggtgttgaaagtgtggcctaccccaccagagaggagactggctgcctggcagggggcggggccaggggagggggtgtgtcttagtaaagtcttggtccctaagcagggtctctagtgagcaaggaagagagtgcatttggctgaggacagccagcccagatgtgaggtgtatcctaaagaaatctgtactcttggaagcacaggacatagcactggtcctgggcctcgacagagctttgaattttgctaagaatcgaaactgtttcctgaggtccatgcagacagagatgcagacagagtgaacactggcattatgcggttttggattggagaaggttagggctaaggtgttgttccagcgatccacagtagcagtcttgagtgtctcaccaacaagagggtagggagaacctgcaaagtggaggtcctggagacctctagcaggtcaggttgatagtgggaagagcagaagccaggtaactctgtttcctcccagtgggcagtggcatttggctctgtcaagaggaagctgtgtatgactgagagtagacgggacattggagtacaggggacttttggagtagtagagacgctttgggacttccccgtgtgggtgcctgctgtaggatgtctgcatagccgcgcatgaaagcattggttctcaggagcatagacagaaggctgaaactcaaggtcatgcggttttatgaagagcagcagatggaggaatttgggccatccgagactctgggccatgggaacaggacagcagcagggagaggcaggaggcattcctgggctcagaacaggggcgggagtttccaggaaaagccatagagagggcaccagggagataatggctgagcctttctcagaaagccactgtgggcctcagtggagtggcagagacagaagccagattgcagaggcaatgatgacatgaacaggaaaggatccttggggggttgtgggtgcaggaggtgctgacaggagcaactttggtagcctaatctcaggaggcccaggatttgggagggagagaccagtggcccagtaggataggagatgaagggaacccagcctgccactttagtagctgagaagaaaaccgggatgagaggaggtttagagtgtgtaatgggtgggtggtagtgatggttgcacgttacttgaatgttcataatcagaggaggttgaggggatgaaaccacattttcaggagactagataggatgaactatccattttagtgtattctctgaggcaggagtggggtctggagggctggaagccctgtgctcactttcccagagagaagaccacaatacttgtgtataagacatgagctcactggacggtgggggtggggatgaagtggactatttgagaactagaagccaagtcaggagaagccggggaccttgggaaggcctactaggtagcatcgaggccacacgagggatcagagatggtggacctgtggcctcttcactcagcactgccgggagatggagacactgcatgtaggttgttttgtcttgtgtctgtccgctttggaagctgatgacccaagtattagttttctgtctcattttccaccatactagaagctgaattttgagatgcacgctaaccctcctgatgcgccatcttagtggagaaacaattcagatacccctggctgatggcagtgtagtgcagtggtttctgacagaggttttaaacacgtaacttaaaattagaaatatcatgggtccttcccttatcacgtgggaaggtggctggcgcttcacaaccctgataccgctattcttttctggaagtagggtcgttctatgggcaatcattctggggtgatttggctattggagtagcttagctcctggctctctttcttccccgaaagccttaaatttcaggctggaacaggtctgagccaggtaaggggttctgctagacggaatccttccttctccttaggggattcccagttctctgcatattcctcccaacctggcctgaaaacatgccacccactttcatttaacatcgtgcctgccctgtgacctcatggattcctgccttagaccccggcaccttggtaccaggctggagaagtttgtctattcaagcgctggttactgggtacagcttaagccagcagctgttccaggcatgatgacagggcctgcatgggggcggggggaggaaggttgggagctgcagaacagcgaacaagcaacatttgtagcatttcaaatcagaatgtgttctttggagaaaaccagggaaatgacaccaaaagcgtggtatctgtggtggtggtggtggcggcggcggtggtggtggtggcaacagctgtggcggaggtattggtgataatggtcacatgtgctagccattggctcttccactgagcgacatccccagcccagcccaggataagaagctgtaatcagtggttggagcaggctgtttactagggtatctgctgtgtaaggtgttcacaccctgagagggagagagtcctctttctctgttcaccgctatatgatctctagagccttgagaagtactgggctgataacaagtgatgtataagtatacatttcatatacctatacatcacatactcacatatatattacatatacagtacataaacataacataacatatattcaaatatgtatttgatgacataaatggatctgggaaggctgtcatcttcagacagaagagcaacaaaacccctgggctgctgtgtgtggagtagcaggaaggcctgtgaggcggcagcagggaggactggggctcatcaggagggggtgaggatctgggtgggctcccggtgactttcctgagggcctatcgggtaacgctgagattgggttgcttgctttccccactctggttgccagccagcagcacacagcagagcgttctagaggctgctgattgacgtgtggcgttgtagcaggtgacatggggcagcagattgggaatgcagctgtcctccttgacccacattaagagatttgcaaaaaggtcaaagttacttttctgttttagaaagtagattcccacagagataagatattcctgctctaaagggggttggcgagtattcacttgtcagttgcagattcatgaatagcagatatcgatcaccatcggatgagaaaaagctaggctggagacctggctgttgagtttgatagtgtgaaagtcagtcaggaccactgcactgttcctgtgcagtcgtggggatgtcggttcagaagagagtgggagaagaaagctttggttgtaggcacagacaccttgatgggggtgctgtagagagtgagcaagttatatgggatgggggcagggctgagttttgaagacagaagagctttcgtggatgggagtagtcctgctggtgtgaaggaattgatgcaggaggcagtgtgagatgctcaagtgtccaggtggagcatagcttcagacaaagaacagacatggtcccccttcgtaggaatgggaaggcagaggagacaggcatcactataatgataggaacccataaagaacattaagaaggtacagaaactgaggaccaccgaggaaagtgtataggtagctgtcacgtaacagtaactcacactgctctggaggcctgcagataaagtctagattgtggagtaaaatttctggagttttctgcataagaacagcatccttgagacgttaatgtttcccagtgctcagcgatggcagactgctttataaggaagaatcgctgtcacttggggctattgtgtgtcttgggtggttataatgaagcatgggtttatctactagactaaatatctctcagaggcctcccagccttgaccatggtatgtttgaagattctgtagtgatcttattaggcagctaaaccactgagaacctctagattttgttccagttcattccagttgtatgcaggaatatattctaagcctttttttgctgcaagagagagagaggtattttaaggcagcccctctcagagtcgcaccatcttgcagagctcctcgatggccttcaggaggtatttgtagctctgaactgctggaccatggcaactctggtccttgaagtctccttatcaactgccagcctcggtgtagttacagccatttgaaagcccatcattccacaggacttaataaagtacctactgtgtgcctagaacaagatgattagtacataggagccagctatgtggagagggaaacacttggaattctctattgcctgtgctccctacccactgccccctagccccctcagtgatactttgtccccagtcagacccttccacttctcccagcctgggtgattcctctctgtgtatttgatagaagcggggctgaagttcacccgtcccgcctgcctactgttcctacggtgaatggggctgtacatgctggtgcttgctgaaaagtgcggacagattagtaccattttaactgcctagccttcccatagccaggagaaagcattcctaggaaacgagccttctctttcttcctcttacgaaaggctccatttctaaagagcaggtgccgtgataaaccgatataaagaggtatcctggattacatagccttgctaaatgtacttgaaagctcgaacccacagatatgcagtttgatatgcagatatgcagatactgtagccatgcgttcgtcttctagcagatgcggctacccactgtctgaaggatccttagcacacactgggccgagctttcatttctaaaactgcattttcaagtggttttcagatggctaaggccataggttctaggcagttccagctcgagctgtgcttggaattgtttaacttttctttttaaaagacttgcttatttttattttatgtgtatatacgagtgcctgcatatagtgtactagaagaggggtcagatctcctgtgattggagtcagaggtaaaagtcatttcctgtgtgactgctgggagctcagcctgggtccactgcaagaaccagcactttgagctgctggatgatacagctctggggttggctgtgatttgctgtgcaccttgtataccaaacattttacattcatttccttgatttcgtcaaagctcggattctttccactttgcagacaagaagctgcaaggcacagaacttgcagacatactcttctcgattccttgcttttggagggttactttggtcggcgttgactatgttcctgatggttgtgtgttttgggtgtttgcctcgtgtgtgtgtgtgtgtgtgtgtgtgtgtgtgtgtgtgtgtgtgtgtgtgtgttggttggggcagcagaacccgaggcagaggtcagctggtttctggctcattccatttctgttgcttaagtattctttgtttttacaataaagtagtttgcgggcagagaagcaaccaaaacaaaaaaaaaaaaaaaagaaagaaagaaaaaaagaaaagttgtaacagttgtaacagacaactctgttgtctcagactcagagttagagactttgaggagaagccagaggtcacgtgctctcagctttagcggaacccctctaggacagtccacagtcctaaccatgttctctgtaaggtctcccagtcctgaggcccaggtgtgtgctttaccgtagggtcactccttcaagaaggaggctgcttggctcctgtccgacacgcaccagctccacagaaacagcgtgtcctcattacaggtcaagctctgcttactgaggctctgctgcagttgtgagaaagctcgctgttagttaagagagatagttaatgatttgtttgcagaataacagggcaaacgaaggccaccacagtctgaataggatgcactaagaggaaggggcagcaggggggcaaggccgacttcacgtttctcctcagttcggttagtcgtgagtttgatgctaacccacgtgaaaggtcaggagagatcgtaggatagaatgcattagaaacaaacaggtgtgggattgatatctctgtgaaagcacttaaactaagagcagaaaccatatcagcttcaaagacagcatacgtggaaaatctcacaataaatatgcccactagcaaggacacagtacacaacatgctcactagtgaaggacaggacacgtggtgaacactagtgaggacacggtgcacgctgagcttggtagtgaggacacagtacacactgagcttggtagtgaggacacagtacacactgagcttggtagtgaggacacagtacacactgagcttggtagtgaggacacagtacacactgagcttggtagtgaggacacagtacacactgagcttggtagtgaggacacagtacacactgagcttggtagtgaggacacagtacacactgagcttggtagtgaggacacagtacacactgagcttggtagtgaggacacagtacacactgagcttggtagtgaggacactgtacacactgagcttggtagtgaggacacagtacacactgttgctcggtagtgagaacatggtgcacactgttgcttggtagtttgctgctgaagtcaggatccgggctcagctgcccacctcccctgcttctgtttagttaacgttagaagttcgccagagcagttgggcaagaaaaggcgcccacactgagaggccatctctgttggtaggtgctagactcttctgctcaggaaacccccagagattccctccgcacatgccaggagaagtgatgagagattcagaaacgtagcagggccaggccagctaaaccctacagggaaggacctgagaaaattatagaagcagttctctttacagtagtttcaaagagaacgaaatacttgagaattaacccagaaaacaaatgcaacatttaatgaaaaccacaaaatattaactgaaggtcagtaaacagaaatgagactacacccttcttttgttgaaggagttagaatgtcagcgttattcggatagttgcaaacaaaaacctaacattttcatcaaattcctaagggccctaaatatccaaaacagtatttgaaagaagtacaaagcttgtttcccgatttcagaaattaaggcagagctacagtcatcaagccaggcctggcgacacactagtcatcttcatacgttgaagacagaggcaggggcatcaggagtgtaaggccagtgagtttgagatcggcccaagctaagtgagatactaactacctcaagaaaccaagtgtgcttgccttgtaggcatgaggagctgagtttagatcctcagggcccacgacgtgaaggccggcgcagtcgtggttcttggctgtaacccgcgcactggggttctctggcgagtctatctagccaaagctgtgtaactaccagctccgtacatccccataactctgcctcctcccctgtaggcccggcagccaccattctactctctgtctctgattttcactcccttaaatagctcacttaagtgggatcagagagcatttgcctttggtcatggtagtggttatgcgaagggtatcacttagagcccaggctagccttgacctcctaacccaagtgtcagattataggcatgctccaccacacctagcagtatatctctctttctgtttggtttaatttgctttatccatgttatagtatattccagaatttacttttcaagaccaataataataataatgtgtgtgtgtgcacatataacttccttatctagtcacctgttgatggatattggatttgcttccatatcctacccatgtaactagtacagtaagagtattcagatcttcaagatcttttttttcagttctagagtggggattgtcatgtcataaaatatttctgtttctaattctccgaagaccctccatactgttgagtttgagcttgcctccatctaagagctggagctacagagctgagtgcagttacagggaacccagcccagaggtctccgggtctatctgtcccccgcagcccagcccctcagctgcagacagaccatctgagagcgcagccatcctggtgatttggatgctatttcaggggcaagccgcagagacactgagtaatcagaaatgcatcccttgtgcgtttcctccgaactctccaagggaggcactcctggtcgcctgcttccaggatctgtcctgacacattagtgcccgtggagtgggtctgggagaggagcgcctcttccgtggccttttggggtcaacatttgtgcacctgctggcagaggtgcatgaggtggcctctgttcttagaaggtgattttttttttcccccatgccctcgagcccctgggttattttttagacaatgtttctctgtgtagctcaggctgacctagaactcactctgtagaccaaactgaccttgaactcagagatccacctgcctctgcctcgcaagtgctaggattaaaggcatgtggccacccctatcactcccaccaggttagagtgtggttcttatttttattcttatacttctgactcccccatcccaccccctttctgtttttatcgctcactctcccctgccttcgctaccatctgttctaagaactgggcgtcagggcagcctttcctgttgttggagccgcacagtgctgttcccagtgctcttccaggttgccctctccccagcactctcccccacagcccagatgtgtgtaaacgtgaatcagcagtcagctgagacaaaacacccagggtgttggtttgcagagccacacggatgctctggaaacctggcctcgctgtttcttccacctcggactcctagcttcccttgtttctttctggcacacctcggcttttccatccccaggagttctggcactttctagccaggtttcctggtctctgggttcctgtgattatgagtgtaggcttttcccagaatgctaggatgggtggcacgctgggtgaggagacggcaggaagactgatgactttcagggcggatgggggggggggacgtgacgcctggcaggatgggcccatctgccattcttcctggccattctcggtgtgagtcacaatgccggacaaatggcgctggagcagacagtccccgtgcagccgagcataggcgagtgggatgggcccagcagtgctggccgccctgggctgccctcctgctttgctcacctggctcacagaggtggaaagggaaggcagcccaagggactttgtctcaggtagtcttaccccggatgcctgttgcattgttctgagaaccagcctacctctgtttatctggtgtcattagtgccctgcagatcatgatcccttagccacggcacctaatacttgcctgccactcctgagctgccttttagcaaccctttggggaactgggctgacacaactcagactaacattttacactctccaaagaggggccaggatggttgtcgatgacagtgttcagccatgatgagatttgatttgggagtacccatctcagagtgagcaatactcagcccaggggctgtcagctcagtggttagagctgttgtttggaaagtcatatccaagatgatcttcaaggtgtaagtgtgagcacaaggccgtgctacaactaaagccttagaaatacgtggtgtgagtggcacatgcccctggggagcagaggaaggcgggtctttgtgagttcatatgagttccaaaagagcctgagatacatagtgagaccctatcttggaaacaaacaaactaactaaaacaaaaaacaaacaaacaaatatgttgtgtagaatcttgactatgctggattcagagcgagtttctgagtatactgaattctgccaaaaggtagtcattggctgccgattaggaacggagaaaaaccattttccttcttggcacaggtaatcagtccaggtgtgttcagaactcccggaatgttgctctgtaactccagtagcattacggtggctgtgaacataggtggggtgggggtcgggatcagaaggcgcagggcaatgccctccttccccaagatctgtttgcagccaccagctgttcctagccaccctttcttgtgtctggatttttccgctcttacaagccgtcttttgactggctaccatttctaagataagtctgggcttgtcagaaaagaatagactctttttatggccgtcaaaatatttttgcttgctgccatgacctaaagtaaacctttatttaggggagactgggggttggttctaattaattccaggatttctcttatttgtctttgtaattttttttttatatgtggggctaggggtggagcccagagcctctcctagttaggagatgcgctgcctctgagccacgcccccagaaaattcattagtattctttttttttttttttttttttttttttttaaatcctgtactcttggccaagatccacatcatggatatcgagacaggccatgtttattagcaatgtggcttttaatatccagagccaggagggttgttgagtaagtcacagttttgtggtaaaaagccaagtcaatgtgtgtggtaaggatcaccatcttgcactcttgggcctgtcttcttgcctgggaaaccggaggggaaacgccagtgcctgaacttcccaccccctcttatgaaacctgagacgtgtcctcaggtgctgtggcttaatcctgtgaggttttagtaggatataagcaaagcaaaaatgttccttcctgtttcactgagagcattctgttgcccagtaatttgtccaaagcaacagctcctctcagttgtgaggtcatccgtgtcatagaatttagggcctgtctcttgaggatcggttcccgtcagcacccacagcctggtggctcccaccggcttgaggccacccactggctagctggctgcttcttgcttgccagcactaagtgcgatgcctctcccgagctccttccctcaccccatcccagagtgaagcttcttcaccgcaaagctccacccactgtcacttacgccagaggcaactaaggatgtggtgggcctttctacctggagcaccacaggaacgctgtggccagaattgtcctagcagtagactcagaggactcagggcctccatgagtttacaggtcatgctccaagtctggagaccctcctcaagacaatccaaaataggaattcaaagctgcctgaggaagaccgacttctgagggtcacgcaaccccctgcgcagactccaggctggggctccctgtcctatgtctctaaatagtagttcaaataaaacatggcaccaaagggatcaggggaggccccggtaaggaagtacacaaggccgctgtttcccacctgttcaaatgtctgtctgcatccataagcggagactggtggagaccatttctgagatagcatcgttgttattgtaaaattcgaatgtgggaaaacaggatggccgtaaacccatcctgcatgtaccacgtggaaagcttcatgagtcttgcatgccaagtgactctagtgtctcctgtttcttagtcatctctgacacggccctttggcttccttcagccctatctgtattaattcttatggtagtcttttaagggggcttgtcctcctcctggcctcggacagattggtgaagctagagtcttgtgcagcccttttgtctcatggtctctcaggtacctggatagtttccattcctgctatactacactgatggcttctaaacctggtccctctcaccagccactcagtaacctcaaagtcattcgtactaagtacccccatctagtggggtcaggacagtgaactcgccagccatccccacaagtgagtgctcatggttttaatctctcgacttgctctagtttcctagtggcctccatcagaaaactgggactcactgttggctgacgtgtaggagacccttgtggaacagccagaacgacttccctgcccagtattgcgtgcctttcttgcctagctgaaagccacagcaggccgtgaattgcccactgtaactctgtgatcatgtcacccactagactgtcagctccccgacacccggatggtgcctggagtgtttgagtgcacacctgtcagggatgtgactgtcaccgctctatgggcaggagcgtgtctcgtgggaaatgaacagagatgttgacagtttccttttcttccgtgttttctcttagattaaggtgacagtgccaggtggatcagcaccattccaccgcccctccgtggagctgtgccaagagtaggggaacatggaggagaggaagcaggagacaacgaaccaagctcacgtcctctttgaccgctttgtccaggccaccacctgcaaggggaccctcagggccttccaagagctctgtgaccacctggagctgaagcccaaggactaccggtccttctaccacaagctcaagtccaagctcaactactggaaggccaaagccctctgggccaaattggacaagcggggcagtcacaaagactacaaaaagggcaaagcctgcaccaacacaaaggtagggattctgggaggagagccaggctcagctgggctgaaggggttccttccacccaccagactcctttctgagcgtatttcacgtagtcagttattgaatgttcaacgtttgagggtaggtgggtaataactttttatttttttgacgcctcgtcctagcctcacactggtaggagaaggcaggttgcttatcagggacagagccaggcctctatgagcatctgtgatttaatggttcctggcctgtcatcttttccatgtcatcgttccgtattcagcacctggtaaggctctgtcacgaggcctgctgtaattcacagacaaggaccctgggaactgaagtatttctagctgccttcctagcgtggaaaaagctagtttccatgaaatagctttggactgagtcctgagagatgcactcacctgagttggggtaggagtgaggaagtgaaggagagagaggcgtgtcctgccgccttctctgaggaaatccttttgggagaagtttggggaaagttagtaaacaaatttccagagacttcagggttgttattttggcttttcacgagttttagtttaccctgtggggcgcccagagagccatcctatagagcaatgtaaagatctgaaggcctggtatcacgaacgactacactttaacttaaaataaaataaggggagctcggaggtagaccacttgcttcacaggccccgggtccccagcttcagcactccccctccccaaaatcacacatgcacagcactctacatgtattttaaaacaagatagaacacagctccactgtcagaggctcctctgatgcctccaacctctgctgaaggagttaaacagatggtgtatatacatatgctcaggcttacacacattagatagatagatacatagacagggatggatagatagatagataggtaggtagatagatagatagatagatagaatctttgaaagacaaaaaaaaatctttcctgtacatgaacttttgagtcttgaaagttgcctcctgggcatcatttccgtggtagccccaggcttgattgcctggctgaggctactaatctaccctttggcagcaacctagagacttcctaagggtccctgtcttgataaaagacaagatgtgattttcatgctgttggttgagatgatgccccatttaagttttgccgatctacgggttctctaagctgcttgaggtagacatgccaggggttcagtcttcccagcccaccaagcatgagctagtccttcaagcctctgcaaggactcagtggtccgagtcaggcttccagcgtcttggtcctggagtttggacataggggtgaatgtgggacttgagaggcgtggccttggccctgagagcacctgtatctttcagtgtctcatcattggagctggcccctgtgggctgcgcacagccatcgacttgtccttgttgggagccaaggtggttgttattgaaaagcgagatgccttctcccgcaacaatgtcttacatctctggcccttcaccatacacgatctccgaggcctgggtgccaagaaattctatggcaagttctgtgccggagccatcgaccatatcagtgagtaacactggctcttcttgctttccttcttcggtgggttaagtgaggacttcctcctcacccagcatttgcacccgccaccctggtctataacctgccttcttaaccaagtggggctcttgtacaaaaggagttaaagtttgctttaaagatccttaattgggggccaggtttggtggtgcgcacttttaatcccagcactcagacagattgtgagttcaagaccagcctgttctacagagagaattctaggacagccagtactacaacagagaaaccatgtctccacaaatttttggttgggtcttggactcttcctgagtacccatggtatatgcagttcagttgaagggaagggtgggcattgagaataaggtagacaggttggatttgaaccctctggtggttcttagttcagtgggagaagtgcatagctttgatgctgcactgtgatcctgcacgccctctacagggccatggggacagacctggggaaccatacacacgcaagttagagtagaggcttggacacatatatcaggtccactgtgagagcgtctgtgttaggtgatgagtgaactcagggccttgtgtttgtctaagatggtcctgttttcatgactgtaaatgctcaaactgaaaccagtttggaacagcatctatctcaccaagctagagaaatctttttcctgtcattaattagtcggggaaatgttagtaaggagcagttgtgctgagcccctccatatgtgacctggaaagacactcagccattagacctttttttgctgtttgaaatggttataccaatttattcaacactagctggcggctgccacattccactggcaagaggaagtgctcagcccatctgccaggctgtaatttgtaaagcatctcagagcccacagttgtctacaaaaataacgtgtgtgctagctcgcctctcagcgcgtctttgggggtgtgactcagaagggcgaggatatggtcagctgaggagaggaacaatcaggatgacttagcaggggatttgcgagtcctctagctcgttagtcacaggctgcaggtaaatttggccttaagagaggaccaagggttgactgattggatttgtgatcctcatctgtggccagatttattttaggacagacagtatcttagatcaaggacaggatttctgtctctgttacctggtgttggttccagatctgatggggaccctttagacatcatacatgtttattactgtgatgatgagcaggattgtcagtccttttggacctcagtttgcaccaactgtaagtcactggtggtggggataggatggggttgtgatttcttttgtgcatctggtaggaatgtgtgaggtcagcaggggttcagggtagaggcagatgcaatggcatcttaacccatgggcacacctctcctgtggctccctctgaagactctggatgccgccgataacagtggctctccctggacccaggaaatagaagagtgattctccttggccactgttctgtgatgtctcggtagtcatgtcagaccgttcggaacacccagctcccgaagcgggtggcctagtttatccagaatgtttctttcactctttgatgtttcctttacgatgcggagaaagaaatgagagctcgtgaaacacatctctgctgtgatagcctttgggaacctgagctaagatggatgggcctgagggtatgtgccacggggctctcgcctccccattcccttgccctgtcaagatgtctgtgttcttctaggtatccgtcagctccagctaatcctcttgaaggtagccttgatcttgggcattgagatccatgtcaacgtggaattccaaggacttgttcagcctcctgaggaccaagagaatgaacgtgagtcccactggtcagaggaggaaggcatgagggcacttagtgggtgagcacagctgagatcatgggagaagccagaacaacttgcaggcagtttcagccgtgactaaaggggctttgttcatgcagcctgggcttttctggactttcgcggtacctaagaggcctttggcacaatagtaggtgtggcgaacattcatattataaaaaatttgaaggtaaagaaaatctttgtgagctctcgtcaaggtttcctgcctgaggccaccccttgttgtatttcatgtggttctgtggattgggatctttgtgtgggcctatgacttagtctgtgttttgaccttcattttgcttttggccctcagggataggatggcgagcattggtgcaccccaaaactcatcctgtatcagaatatgaatttgaagttatcatcggtggagatgggcgtaggaacaccttggaaggtactggctttcgcatatgctcctttgcctggcttttcacagattgggggctggcctgtccccgagaccacacccctgagagattgcaagtgtgttgtccagtcagtgcctgcaagggtctttctcacaggacactaggacatgaactgtgctcaaagatattcataccacagcttttagtccatgcacagatgagacgggcacaccgtgccccttcacattaagggtaacctttagtactgagtaacgatccggttgtttggatctcaagttgtcagtgatgatgggcgggacttcctgcatgtgttctttcgtttctgttaggtgagcagcctactttccctgactctggccccccatcttctctcaatggaagacccaaccccttctctctctctctctccctctaggatttcgtcgaaaagaatttcgtggcaagctagccattgccattacagcaaattttatcaaccgcaacacaaccgcagaggccaaagtggaggagattagtggcgtggcttttatattcaaccaaaaatttttccaggagctgagagaagccacaggttggtgccagtgcctccagagctcagggctcatgggagtggtggccttggatgccactgctgtgtctttggtcagctgttctttagtcacacctgtccttgcttttaacacacttccacactactgccgtcccgtgtcagtcctcagcacagtgacccggctgctctggggttggctttgtagttgtgccttctgccagctcctccccagcccctccccctcccgtacaagctaggtttgctgttgcatgggcagggtttggttgacaccctgacctttggtgtcactgttggccttccctgaggtcatctgagatcaccagcaaccattgctagtcaggaatgggcttgtgtgtgactgttttctgatggattgagttaggcatagatatagatattttgctgtagtaaaacaaaacaaaacaaaagtatcttcattgtgttttctagagcttggtttctttccattctgtatacttttcaggttaactgaataaacattcagtatttgtctgtctgcagttaggcatctgtcctgttagaaatctaggcgattcctcaagcatccatggttatcacagaggttttacctggtaaacaacccatcccctctcgtagactggcctctccttttcccattctggtgtctttgtttactattggtcattgttggcgtgtagtgagttgtagggcagcacaaaagaaaacaaacctcctggcttccatgcactgtgcaggaagggagggtctgcacctggacagctttcctgcccggtgctctgcagccctttcctcgagactcaggccccgccttgtggatcccctcatggcccagtcccgtgaattctcacatctgtcttctgcttgcaggtattgacttagagaacatcgtctactacaaagatgacacacactactttgtcatgacggccaaaaagcagagtttgctggacaagggggtgatcctgcatgtgagcaatggcttcctttcaggcaacagtttttgttgagctgcttgatagaatcactgggaagaattttatattctgatggggttgttttttcttccctgtaagggaagaaaaatgacactgaacacatctggaaaccgatgctacttattagtttaacttaaaaagtattcttattatttagaaaagtgcaactataaacaggaggaggaggagaggagaaagggcctttgcagccatgattatgactagccctgacacggccaacacggccaatattgtttggataagcccaacctcttcctctctcccctcttctgcttggtgactattttagagcagctgtcagctttcacatcatatataattagccagtttaactttaggtagcctgatttacagttatagcaaattgcataaccgaaggccttgcacattgctagccaagagctctgccatgagctacctccctagactttttttttttttaaagaagtatttctttttgaaacaggctcttactaagtagcttggtctggccttgaaatagctccatagcccaggcaagccttgaacatggaggcctcatcttttggagggcctggggacaagtgttgagccaagaagctgcacttggagtttacagtggcttgatggagactcaggttttgtcacaaatgtggttgctgaggagacagttatttgaggctttttctaattgacaacagaggcctggtgtctctccttagccagttccagctcagtcctttgtctgagtgactaattgcatgatataccctgagctgaagacttgaaatctaaatcacaggctggctccttaaggatcgtggctgtctctctgttgctctcacagatcgggatgtgagaaattactgtctccatgcgatgaatggatagaagaggcctcacacgcgctgacctggccctgtgcagtccccccctagcctcagcactgactcttagggagccctttgtgtctgcaggacggtagcacgtcaggcctcttagaatgagtcacaacactgctttatctagagcagactggagagagagccgacaagcacgtgcttgcgacacaaagtctcctttccacggtgaacttcgggtctgcatctcagcatggcagccccgtggtgtggagggagcagcaagacaaagcccttggtacagagtacccttccaaacaaaggccaggcgtggttggctgagtgctttctacagctggctagttcattgtctggggctcttctgttgccattattacaacaggtgggatgctgaggactgagtgaagactcaaaccaaccatccacgcagagctgagttttcagttaaagttgattaagaaccatctgggctgcagaggtctgatttacactgcctatatttttgtagtgtaaggggctcatcctgctaaatactaaagtcatggtggccacataacattgaacaaacaatatccatggccatcttcattctctgtgttttggcctttgacagcttattgttgtagctgggtcctgctaggggcatttggaacctatcagcccctctttaggggagcagacttgacttgacatggagagcccgttttgtgttgctggtggatttccatagagcctctcggagtcctctgttctgtataaattggaaatctccggtttgctttgagcgtggtccttctcatcttctggacctgttcttgctccacactgtacttctctgtgcactaaagctttcaggtttccttttgggtgtgataagtccgaatttcttgctgccaaaagccatcaggcccccagattaaagtgatcatgggaagcaccctaaactttaaagctgccttttctgattccgagctgctgttacgtggctagttcatttgatttcataacaactctgaaatagatgggttaggattacagtagatttcctcctagtgagtggaaaagccaggtcggtttaggcagcaaagctgattcactaccaaccaacacacccactccccagccccttttccttttaattggtataaaagattctgtttaggactgaagaccacattgggggaggaacactacgagacagggctgcggttgatgtttattgtggggttctaaccagccaaaggggcatccatcttgactttccctcttcccggacaggactacacagacacggagctgttgctttcccgggagaacgtggaccaggaggccctgctgaactatgcccgggaggccgcagacttctctacccagcagcagctgccttctctggatttcgccatcaatcactacgggcagccagacgtggccatgtttgactttacctgcatgtacgcctctgaaaatgccgccttggtccgggaacagaacggacaccagttactagtagctttggttggagacagcctcctggaggtgagtactgaaggctgaagagaactaagtggtagataagagaccgaggtaaagaggcaatagtggggaggagtgcggccaggtgtccaggcctcactgagcagatgcacgcttatgggagttgtaccagcaaggagaaaagatctttgggatgctgaattacttccctcctgtaacagctgagttacttgaactctgtgtctctttcctttgcagcctttctggccaatggggacaggaatagcccggggctttctggctgctatggactctgcctggatggtacgaagctggtctctgggcaccagccccttggaagtcctggcagaaaggtaatgggaagaagccatgggtgcctctttacaggactggggagttggcctcatgcaagttcttcctcttgtttttttgttctgtctttaaagatgcttccatgtctgagtagaggaaaggcaaggtattgttttataaaatcacaggaacctcaaggtggtctgcccactggctggccctggattctttccagtaatcatgtgagcagaagcacagcagcagcagcagctggcagctgtgtctcagaagccagcagggcagtgggcgtggccagctggaagggaaactccagcatgcttgtgaatgtctcctgaaccccaatgtcaggtgtttggaagcagatgattgtgaatgaggctaggacacaagggcttacttgatggttaccttgcccaggagaaatagatggcgtgagacttcccggatgaaactgatcattgctaggattctgtcttagatacttttatattactgtgacaaaacataatgaccaaggcaacttagagaagagaaagcttatttgggggcttacagagaccatcatggcagggaacatggcagcaggcaggcaggcgtggcactggagcaatagctgagacctcacctctgggccagaaacacgaagcacagagagggagctaaatagaaatctcaagggcttttgaaacctcaaagtccactcccagtgacacacctcctctaaagaggctcctgatccttcccaaacagttccaccagctgggaacaaagggttcagacatacgagcctttgaagaccacccccatttaaaccacatttctctccccgggcccccatagttttgtggccatatcataatgcaaaatgcatttagtcctactataatatcctacctatccaaaaatgcccatggctcaagactgtttataagtcacagtctcttctgagactcaaggtaatctcttaattgtaagcttctataacatcaaaaagcaaattacatacttcgaatacaatggcacagaatatacactaccactcacaggtggcaaaatggggacataatgtggaattactgggccaaagcaagacagaaacccatgggggaagctccaaatcctgtagttccatgtctgacgtccaaaggtctggaaggctctgtcctgccagttgtgctgcctgcagcacacagtgggccagtcacgctcctgtgagccgctctcccggggagacatcccaagggtccgtcccttccattatcctgggtttcagcacagtgagcttcacactcacagcttcacactgcagccccttggcgcctccatgcagggactcccctgcagtatgcctggacttggcgtctttccttaaccacacagcacctgcactcacacacgcttcgtgactccagagcctgaacccggagactgctgtttccacgtccagctgcccacctgggctggagcctggcccctgcttgagtgacatttgcagcagctttggctggttgctgctctttagaaggagaaccgaaggccttttcctctcaccagctgcagggtagccgtgtggacctcaccaccctttctcctcctcttcatctctttcagcacaagccttagtgccaacattgaatttccttgtgcctgaattctcctcaaactgtacttttttttttttttgccccacttgctctctttcattgtggacctgcataaaaatgtgtgctagtaatcatgtgacagagtcactattaggctgtcttgaaatctctctgccaacaaaatgtttcaaactcttcagccttaagacaaaggcaaaaagcggctacttcttttccctcccaaagtatctcaagaatggcttttagcccagttgttaatgttgttcccttccaaaaccccttgggcagggcctccatagtacacattgctctaagtgctattgtcttctaagctcctaccaagatggcctgttaggccgtgctgacagtgttcagaggtttccctagtccagagtcccaaagtcttccatacttcccccctaagtgctagaattaaatgtgtgagctacgacatctaccacttcaccagcaccatgccgagggcctgacttccagcatatgacctttgggcaagtaaccacagccctgacagactcctcgaggcgtaaacagtcctctgtgcaaacagaaggcattttcgaaatgtccttcgtacttcagatttaatattctactattgaggggaaggttcagcaaagataagagactctgcatccctgtaaccctacagagctggccacaatgttccctttaatttcttaaaacccataataaatactggcacactacataccagccttctaaattagcagtattcggcgctgcccactacactgcccctgctcttccttccggccctttccccgatctgggaccatggaatcactgagaactggggatttgattagatagattcatctgtgatgactgactgtttggctgacctgtccagtgacgtgtttcttgttactgctatgaacacacagttatatgtcattgcatgtgagcacacggttgtatgtcattgcagggaaagcatttataggttgctgcctcagaccacccctgagaacgtgagcaaaaacttcagccaatatagcatcgaccctgtcactaggtatcccaatatcaacatcaacttcctcaggccaagccaggtaagagccgtcttgtgagttttgtacaccgaggcccacgttcaggatgctcgtaactggtcagtagatcagataggaatgtgtataagtgtttgttattctacagtatgtattccagtaggaatgagtgtagctgtgtttgctgttatacagcacacactaagtaatccatgttgacgtctctgtgttgttaaaagcaggtattatttcccatgaacacactcatcacagagggtcagtccgcccttctttttctttattggttggtcatttgttttgagtttggggttagggtggggatgacttgtgctgtaacccaggctcaggtggaacttacttactccaaagcccaggctggctctgacgtgggacttatcctcttgaaccagctctgagtgctggttgtgggccaccatgcttgactaagcagagggtttttttttaatgacgtgtagaagatcagaagtcacgaagacaatagacctagaacttcacccttgcctcttgattcaagccacgaggtgagagggaaaggacgccggctggctcagtagttgggaagggtgatgtcactgtggcatcaccacccttcacctggcactcagccaggcggtttggcgttctctgaacctgtttttcacctgagaagtgtaggtgctgacccctgcccacccacagcatcactgttaggcaaatgagctttaaaggctcagacacgctctgccaggagaaggcgttagcctagaccttgcaccgtgttatccagagtctgttaagctgccttcttgtcgagagtggcgcacttgagagcacagcagcccggagcagcagactcttcaggaagcagcctgcttcacacattcatctttattccagaggctttccttctttgccttctgcccggtgtctcgggcttcttgtatgtgtttgcatagtgctgaacaatgtgaaggtgggcagccccggatcagagccagctggcttactctcagcacagcccgcctacggccaggttccatgagcctccagtaacttcattccattaaagctctaaggtggtcagatagattctgccaaagctttaccatggcgtacagctctgcttagccatgcaagaccctaacctcaacccaggtctaccagaaagtaaacataatagactttaccagctggcctctggtcattctccttttaagtggggagttgttgttcagggtttgcgtttccgtcccaacctttcaactttctgccaggtgcgccatttatacgatagcggagaaacaaaagatatccacctggaaatggagaacatggtgaatccccgaaccactcccaagctgactcgcaacggtgagttccataatgggctaacctgtttgaaagaagtctccactcatccgtcgagcgttgcatgaccatagtgctatcaaaggcccagggctgccgccagtgatgtcaccctctggggttattagatggctgccagggtgtgttttgactgtcgtgactggggtaggtttgctagtagcacctagtggataggacttgggaacattgcttacgtgttctgggatacacagaacagtcctcaaacacagagaaaagtgctgtggtctcatgtagtgtaagagtagaggtaaattattgtcgtatgaactcttgctggggagataataacaaatgaatgtctgtttgccccacatagggaaccaacaatagacaaaagtagtgagtccactcaagggcagctctgtgcaccagtgagttaataagcttgcctgcaggaacacaggtgacctccagacatccacatcactgaaagtccctctctcacagagacaatgcctctccatagcggagaggtggagtcctcccttcagttaaccgcctgccttctgtctgtctgcctggcacctcctaagactgtgctcagccgaggcagagttttgaaaaggtgggagggaggtgtctccctcctctgagggagcatccacagcttaagggtttcttggcattaatgatggctgctttgatgacgatagtaatggctgtcacgcgtggaggtcagtgtcccacgatgatcagttacagatcctggagagagtgagagagaacaggtgacaaagtgtccccagtgcacacaagctcctggtcagccatacacacaaccacgttttgggagaggcctcgtagaaatgtggtcagtagccatctagctgggtcctgagccagcagcaccatgccggggccaacgtgaaggccattctgtatttcgtgtgtattggagggttgttggagattatccttggagagcggccttgagtacgacgggttgggtgcattaggacagactgagtagggaaatacacttggtgcagggaggctgtttaggaaacagttccatagtctgtgtgtgagaaaagccagactctggggctgatcacagaagaacctaactttgggtcagatacaaacagctctcaggcctacctgtgccatgtgtaaatcgggtggccgtgggcataggacttagcgcctcagaacttgaggttccttgcctgtgatctggaaacaatcctgctctcagttgtggtcgggaggtctctggcacattgctcaccacagcgcttggcgcacagtgggtgggaacagcaacaggtctgccgttgttgttaatattaaaagtctgaagataccacagtggatcggcacagacagttaattgtcctgagagataccaggtaggtggttgtggtttattggtttatgctgcgtcagtccagacaagaaggtggaggaggccggagaggtttgaggtctctcttaaacggtttgatttaatgtggtcatgagatgtgacggtagaggtgaaaacctgcaggcagccggaaacctcttctttctcctctggggtgtcaaccccttgagaacagagacggcatcgctcaaccattcctgtgtccacctgtggttctgaggtggcctgatgtgcatggataggtatacagacacgggcaacgcctaagtagatcagtgtcagagccaggggttgtctcagtctacgtggtcactgtgaaaggccactgtgcaaggtgcacagtcatttttgatctgctcgcaagtctccaggtgacttagtgtaaagctaaatatccactgcctcaggggccaggagcagacgtctcaaacgcaggtcagtgctcacaggttctcttaagtgtgagcagaactcctcatgatgaagacacgtcagcgaggcagaaaaacatgtgtgtctttgccttgtagtggtctccacatgtggctatttataacacaggttgccagccagggcccggttgtggtctgattggccttgccccgcagtctcttcacttggctctcagtcaagaccttagcaagcaagactaaggttttgtttgcttgggtttaaggtactacaggagaaaccttttctaatctaatctcctgggtgttgctggggaggaaccagcttcctcagcctgttgccaggcaactctcctgggagatcttgactctgttgccaatgaggtatcaactccgcaggtggcactttgccatccgcttgtctccaggagtgctgctgggacatggcttcagagtggcaggtccttgtcaccctgctcagaggtatctgtctggggcattgacccaggaatcggataggtggtacctaaaattgtatcatcatgaaactgtcatgatgccggtgacagacatcaacttgggctttactgtcttctgctgaaaataggactgacattttgtccctaccctcggtaatttttttttttaaactgcatatttgtactgcagagcaaacatgaggtaagcacacttcagtaattatttttattgttttagagtctgtagctcgttcaagcaaactgctggggtggtgccaaaggcagacagaaggctattcaggagtcaatgtgacagatctcactatgtcttggaaaagtggcctggccctgtgtgcgatcatccacagataccgccccgatctaatgtaagtcgtgaccagtttaattttatatttaccgaggagtctggagccccttatgcaaattttacactttttcttggtatgaatgatatgctgaaatgttctctcgagaaggcccagattttgccttccttatatttaaaactcaaccccccaaaaaattagctttaaaaaaagtcaagcattcagaagagcaacaactagttttaacacccacctgggcctgttaactttgaacaaaagaaaactgtttattggccccgggttgaactctccatttttggctagctctctcccagatgctgttggtcacaagggaaacctggcttgaacactcggctggctcatccccacagaaaacaatagattcgtacctgatttacgatggtcttgggcattttctctcttagagatgatactctctgcaagcgttcgcccctgcacttcatgcaacgtcacctcacctgctgtccctctgataagccatctcttactcatccacctacagagtcagtacagagtggcctcaggtcagctgcgtgaaccaagggctcagatccccccaccccacaggcattagttactatggaagccaaacagagtcggagacagaagcacagcatggtggattatcttggctgccttttttatcattaggtccaggttttgcctgttgttttaatgactggttaaggactcctaaaaggcatagcccctgttttgggacgttagcaagctaatgatgcaagagctaataaaaccagccttgcatggtatggattaacaacgaggaccacatgtaaggctctaggcttgagccctagtaccacaagacaaaacagctgcagcaggcctaacctgccatcccagcattgagagggttaattaagcgggcgagttaagagcctcagactgaaactgtcttctagaaagaattaaataaatatggagaggtgcgaatgtagcctttgcctagtagacaacaggcttttggggtttgattcccaggcaaaattaaacgactggggacatatttgacgtaaaggactctgatgcacatcgcactggggaagggcgaggagggagaacagctgagtggcaggacagagtttctgaagctgaggtgtgtgtggggaggtgtgtgtgctgttctgtctgaaagggaaggcaaggaagaaaaaggagtagtggggtgggtgggtgggtagggtggagccaagggtcctgctgggacacccgagtgtagcctgaagaaggcttgagacgaggtcagaaggccctcagtgggtgattcagcaccgtcaaaactgtattcaagatgaacgttcaaccagccttgcatggtatggattaacaacgaggaccacgttcaggccttaataggcttaatctaagagaaaagtaatttgttttaaatgggggaaaaaaaaattccctgaggtcagtgggttaacacaaactgagagctgccaggatagtgtgatgtcagctgaggaaaaacctcgccatcacttccttagcagcaagagcttaaaacctagtggtgggaggtggggtgctgattagtggagatggttgggaaagctcaggagattcggcagtggaaaaccctgaggaaggttttagaattccccacaggaagaaagctgagtagaacttaccagcactgttagggcaagtgacggccccaggacatggagtgctctctgcagacagcgtcatatcactctcggacgttagtttcctttgtacttgtggacaggcgtgcgtgcgggaagacttacgaagggagttcctgtcctcagcttacgttatagtaagaagttggtgtccccggaagatgcaagattctctacccatcacatcttctccctccaccgcccccccccagcccctttcttttcttcgagggagacctatagtcatttctcccaaagttgttgtgcgtttccttagtcaggaggaagcctgggggtccagacaggctgatctgccctctgacccagggatggtgccagattccccacacctttagcccagggactgagacagcagtggcacaggatactgtgttacagtttgaggacagttagcccaacctgatttcttttgtgtgtgtgtcctgtttctcagagactttgattctttggatgagcaaaacgtggagaagaataatcagctggcctttgacatcgctgagaaggaactgggtatctctcccatcatgacgggcaaggagatggcttcggtcggggagccagacaagctgtccatggtgatgtacctcacgcagttctacgagatgttcaaggactcgctctcctccagcggtgagctcaggggtggggtcgtggcctcctgcctgtgcatcagggaagtctctagaaccttgcttcacacgacccctgtcagcagtgtgttattaaccatgtgctgttttcagagtctttctcaatctataagtatgcaaagccaacccatctaacacttttttcctcaactctgccaccttcccccagcctctgtcagactcatcccctctgcaaaagtgactcctgctagacttgaatattgtaatgttgttccctttgtagcatcctgcccaaactgtcccgtgcccctgtgccttgcaaagactcttcccagtccaaccaagatctttttctcgtttcttacctctttattttttttcatttgtgtgtgtgtgtgtgtgtgcgtgtgcgtgtgcatgtgtgtgtgtgtggttgttcctagggtctcatgaataagctccttacaagtgagctacatccctgggcctctgtgtctctgctcgtatactcggtgttcctctcgtcagtgccttgcagtgatgtctctcggtgcttcctctccttcgctgcttctttgattctatgctttcctgggttctcagcccctcttcctctcttgcttcccttgcaacgattccctcttagagagtcccagagatattttcttggcccttagcctgctgccttggccaacacttagtagggctccaaaaaagtatttctgttgcaacctgttgcagtttccttttctgttgctgtgataaaagctctgaccaaaagcagttcaggggaggaaaggggttcacttggctttcacttgtaggtcacagtgcatcggcaagggaggtgggggtgagaactcagtcaggaccctgaaggcaggaaccacagagaaacactgctggctgctttactctctggtccatttgcccacagctttcttatacagcccagggccttctgcctagggatggtgccgccgcagcagggctgggtcctcctgcatcccttaataataagacagccccctgcccccaagcccagtttgacttaagcagttactcaatcaaggctttcctctcagatcactctgggttgtggtaagtgaccgttaaagctacctaggacaccacttagagtcaaacgctgtacttcaaagtcctggccacagcgtctggcctggggtttgttcgagcatttccaggtgtgccaccttgggcaggctctcaaatttccttacatttcagcctccctgtgtaaaaagagagtgatggctgtaataatactgtgttatactaagaatgtgtagcaccaagaactaaccaaataaatgttaatggctatggctcattatcatttctaattactgtactcaaaatcgctattgctattcatataatattagaatcccaactagcaaggtggctcagtaaaggtacttcccaccagacagtaggagcttggcgacctgagttcaatccctggaccccacaggaaagcagaaggggaaaactgactccacagagttgccctctgaccaccacacaggttggagacatgtgtgctcccctacagaagatgatgataaggaagaggaggaggagaaggaagaggaagaagaatccacagtaaattgtaccctcctccccacagtgtcttcaagcccatatatggttatgcatatgaatatgcatttttttataacacagaccctgaaccctgagtagccctattcattgagagcccctcttcagacacaactaagaacatggcctctgctgtcccccaaactggcagccctgtgtctcgtacctctcaaccctccaccccagcctgaagtttcctttatcaaaatttaacttgggcaatctgctatgatggccacaggcagagtgcagcctttacaaagcagacatgtgggctgctgcacctgcagtgtaaggaatggggttagttttctgtgtgtgaatgaaaagaaagtgtctagacctttgtgctgtttcctaggaagacacatgctctgtcctagtcagtaacacattagagatctgtgagcttccttcttgccagtcccctgtaagggagcatggatctggtcagggcattgtggcaccctcctaagtaaacattgctctctctctcctgttcacagacaccctcgacctgaatgcagaggagaaagccgtcctgatagccagcaccaaatcccccatctccttcctgagcaaactcggacagaccatctctcggaagcgttcgcccaaggtatgtgtagaccagtcacagtaacagtgtcgtcaggcagagctaatggccagggaaggtaaccaggctaatatctgcatcttctcttggtgcaggataaaaaagaaaaggactcagatggggctggaaagaggagaaaaaccagtcagtcagaggaggtgagattcatcgtggcttgggtcaggactgatgggctgttttcaggttaagggtttgtttgtttgtctgtttaatgtatacatttgtatgcctgtgtgagtttatgtgatatatatatatatatatatatatatatatatatatatgcagctatctgggaggtcagagggcatcagatctcttggaactagaattacacatggctgtgagctgtgggttctggagatagaacctggaccctcaggaagagcagtaagcacttctaaccactgagctgtctcttcggccacctggtttaaattattaattctgaagttgctatcgctagacctctgcataatcatctcttaggagagattctctgtgttttttgacgtcattgtattttccagaaagtagcaagaaacgtgcacacgtgtgtgctcagactttctctttataaaaatcacacatttggcaaagcacgccagcacacacatacacacttgaattacaaaagaagcgcgtagctggcgaggtggtgtgaactcggtgctcggggagccgaggcgataagatcgtgggttcaaagccagcctagcccacatcatgataagccagctcaagaaaagaaaaagaacaaggctcatcggaggaaatctggaaaatgtagtagaggtgactaaggcatgctttgccaagtgtgtgatctggtgatgccagcacaagtctgtgtgtcccactggtgccttgcatcttactgactcttcatgttagaacattgcagagtgtcattaaacaccttgaagctgctgtgcagttcctgcccacacatgaagagaagattatcagaggttacctgggacccatcctgactcttggatcttgctttctgctgggcaggaggagcctccccggagctacaaaggagaaagaccgaccctggtgagcaccctgacggacagacggatggatgctgccgttgggaaccagaacaaagtgaagtacatggcgacccagctgctggccaagtttgaagagaacgcacctgctcagtccactggtgtgaggagacaggtaagccctaagctcagctcccgaatgaccacatggtacaggaaggaaggtctccatgcagcgatatcccaggctcttgtctgaatcttacacattcacagctgtgttagctttgcctcaggttcaaggaatctgtgaccagaatcagtagagagatctaaaacgtatttgtctggatgactataaacacacttatgttcacatacatacacacttgaattacatacaaaagaagcgcgtagctggcacagtggtgtgaaagcgatgctcggggagccgaggcgataagatcgtgggttcaaagccagcctggcccacatcatgataagccagctcaagaaaagaaaaagaacaaggctcattggaggaaacctggaaagtgtagtagaggtgactaaggcatgtacagtctgttaattttgcttcgtttcttactggacgatttctggggacattcttgttttcatggtggagaccactctggggacacgcttccttttctgcctttggtgttttgaccatggcataccccggtgacctctcagctcacaggcgtcttcagagtgtgtgcacaccatgttcttctccgtccctagctgtggtggatgctttagttgcttctcatccttgatgagatacagccgtgcagtctcggggatgctcgtgctcctgagagctaagattctttcccggggatgtgagcccttaaggtgctctccttaagccacatgtgagaatccagcagcagccacacacgtcttgtccctccttgctccgcagaagtcacctaacttctttacagagaaaggccaggcaatttcaaagtctctgaagtgtgttacagcgctccctgatcacctgaaagggaattgggaggacaggaggacgggctcagtctctcttcatcttctctgctcacagacctggttttgggttaatgtctccacccagcttttccctttgtgtcacagccgggagagtagcttactctggagcagtagagattgctgcaaacttggccggccccacctcaggaggccagagtgccctccagtgcaaggctgctttcttcttcacgggggagttagttttccaaatcagatagtagtctagaccccagagaactcaggctgagaaaggtgtaacaaaaaccacagcctgtcaactccacctttcccctctccccgttgctgcacttgcatttggtctggggacaaaggccatgtcttttctttattaatgtaacttcctaagagataacttagcctgcccacctcgttcacggtttatagatgtgtgtctgtcctccacaggtacttttccgtgtcttctatcttaatgtattttattttgctttgtctccatgtcctgcccccactcccacgtggcctgtgtgtgtcatagccaacacaagagcgtggggtcagccagccgtcctgctacctgccaaagcagggtcgccctgctcccatcccccagtggaaacaggtaaaggaattgctggggtctagaacgggctgccactggcctttcacctcatccctgctcctggcccaccttgaaagcctagctcaccagggcaggaagacactggactgtgagtggtgactttgggaaacatttggcagacggtgttggtctgattctgtggctgtattaactccctgggatttgaggagcgtccaggaaggctgttgacttggtattgaaggcagctggaatgatgtggggacttgtcagggtatggccttgagcccttgggtcaaggtctttgctgctgtagcattgctcccaaattggctttttagtagcccatctccgggtgacctttgtcctttgtgagaactggagaagcaaggtgtttggtttgaggcaggaaatatggaactagccttgagttaggcgtttgtttttttcagacctatacaaaatgttcaagggtggttccccacccaccttaggattctgtcctcatgttttggtgaggtacttgggagctgtgacggtggctcagtggcagagcattaatgagaccctgggttccatcctttgtaccaccccaaaacaaataaaacaccccttctcaggaactcctggagcccactcatgggcagaagggaagactagtcggtctgagggaagtgtcggccgtttgttccccagcgtcacagttgaacagtttgtcgctggggttgggagccatgctggatgagttttcaagtaacaggtgtcacatcactcacgtgggcgctgaggtgatgtgagctgggttctgttagcctctccctgggccagcctcaccagctctactgctaggaagcgctgagtggggtgttactgaaattgcatttggaagaaaatgcttctttctaacttcataatcctccacgtggaagacagggcccagggagggagaaggaaaatgccggagcggtgcgcacactcacaacagaaggtaatcttcctgcctcagtaggaaccgcttcatagagggaggccttctgaaggatgtcatcaagagttcgtgttttaaattcttttgtcctttgcttgaagccgtgatggaagggaataggtgaatcctaacccagagtttggaattgtaaagtcttacccttcctggaaaaggctgaggttttagaacaaaagaacagaagaggaaggtctggtgtcacctgggacatgggtggctctgtgtgcagtctgggctggtgcagctatgttggttgtgccgggaaggaggggacagcgtatgtggctcagagtctgctggctgggtcttggcctctgtcctggtgaggacagacctggcagcttggaaggtcaccaggcacctggttctatgccggcttctcatggagcccagtagccagcagcattgtgacaggtcccatgtagggactgcttttggttgttgttgctgtctcttggacttgtcatccggccccttactgtcaccatcaggttagttagaagaaagccttgggcagatgagaagagccttggtgaccatgaacagtgaaaccactttagatcatcaggcctttaggctacactgaatcatgaattacacagtgcccacagtagtgacggtgacacactgtacctcacactctgtcccttcgaatacacacattcatcatttgcaactctgacaaatgggcttggccctctaattgtggctatctcctgaaagctagagatgtgtccagagaattggggactccgagcaaggggtgcctgggccactgctggctggccactcatctccaacaggctggacagcactgtgactcactgtgtgtctcttgaagtggttctcctctaaggcaggaggtgtggcaggcgtggcattccttggcagagttggcccgagaacctgttccaacttaggtcatcgtgtggaagggagaaaatgggcaacagctctgcttgccagtggctgcgtgccgcgctttccagcataaacactgcagctcgtcctttgccctccctttccttttgatctcaggagtacatcctgcagacagacggcccatgggccagcctagctttgggagcagattgtcgtgtgaggtgggaacacagagtggagatgtttttctgatcttacagctgccacacctccccaccccgccctcctcccagtacagcagtctgtacaggaagctgagaatctcctggaaagtaccagagaggcccggggtagtgtgtgcttgtttctcaaatggctgagaagcctctctgagaaccgtggaccgacccacgaagaagggcgtatgtggtacaggcaggatgaggatgagctggcaattaatctgtagagcctcttggctggcatttctttgtagtttttggaactgttagatgtgagtgaagggcttaaggcattgatggagcgtggccacaggaggctttagtgggaatgtgctttgctgcagtgtgacctggtgtgcatatgtcatatgagatcccataggggtcatctaccttttccatctgcttacgatcaggcccattttggggtgcccctctttcctgataaaacccttgacccttgacattacagagcattacaccaaggtttccccagttcttcggttacctaggccacctttgtttgaggctctggtccaagatgaaaaacaagagacttgataaatcaccctgaacacagagttaggtgctatggagggtggtcaaggaaggggcctcttgggatgctttgcacatatgtaaatgttcctcatctctgccaggaacagtctccacccaggccctgtttcaatcatgttctttctgtttgtgtctgttggtgtaaaagcgacgggaaaaggagcgctctcggacctgccccaaaaaagtgatcactctctctcctacccctactccaccttcctgccgggcgtgcagtggccagcaggtgaccctctgcatgttctatgtcctgtctgtcctaccacctacactatgaatgtagggatcagctcagtagccactcttttcagggataagtttttaaaagatgacttgtagcaaaaaaaaaaaaaaaaaagaaaaagaaaaggaaaaaaaaaacaaccttcgttgttacaagcgaacagttcctatcgggaccccagatgagagccctgtgtattcaaatcctgcatgttctgttctagcccctatcatgggaggacagccgtacaccaaagcataaactatattcatctcagatccaacatccgtaaggtccaagaggcacacatttttgtaggacctcacttagagtagccctgtttcttttgctgcctgatgtactatagttaagatgtgcacaagagacaagagagcttcgtgtggcctccctgcatggggttggctcctcctgatactgacagcctgctctctggcttatacagtttcttctaaccaacccagccacccattcacgctccaagcagatggttaaagcatttgaaagccaccagatacttgtggctgttgaccgcacaatctcacattcagggtggacacacttataccgtatgcacacagaatggcttgctgacctttgagctgaaaccctataaaataaattttaaaaagccacttctgagggcaggatctgtgacaggatattttcataacgaaggtagcctacctcaaaagtaaccactaacgacgcatctggttttccaggccttcctcctcccgcccctgggcctaagaactgagccgtgctagcctctgtgactgcccagtgcctcctcttaataagggctcacagccgggcgtggcgcacagctttaatcccagcactcgggaggcagaggcaggcggatttctgagttcgaggccagcctggtctacagagtgagttccaggacagtcagggttacacagagaaaccctgtctcaaaaacaaacaaacaaacaaacaaacaaacaaacaaaaagggctcacagtttgagcatttgttctgctcctcagtcactcagtcagtccccacagtaactgtggggcaggtcccaccaccatctccaatttgcactctgaggcgtagggtggagaggccaaggagttatgcaagaggacaggtgagcaatgtcctggaaccgagcgggagccagaggctggtgctgggctcatgctgcctgtggcagtgtggcatcggcactggatgaggtcagaccccagacactagcatccacttcccaaggatggacatctcaagttaccttgagtggacagtgtggtcctcctgtccccacagttgccacctcagctcactgaggcagccttgtgcctgtcctaagatttcccatgatcctctgcattaactgagagtgccaccaggctccacatacctctcccctcagtaacccgagccccgctcccctgttcctattcaaggcctgctccccactccagagtctcctctgcgctctgtaaaggtcctttgctcatccggtgtcctctccccacctttcttgctgtggaaagcttccctgccaaccctcctcccctgagcctttcactgcacgcctccaatcttataccactgtgcgaaacacacatcgttccacctttgtactaaccacagtgcttggcctgtgtagggagcctcattagaggcaggtgggcagaaaattgtcgcagatcatggaatttggtaccggtgggattgtggacagctggttagggaagtctcaggctgggggatatatataaatgtgaaccctgaattcttgcctaaatctcccactgttaccgagctggtcgggatggagcttaagtttttatcttgttgccaacagatgtacaggactcttcatgctgacagccgtggcaagcaggatccccacctcaagagggtaaaagcatgagcctgtggcacggggtgctgagagcccacctttggggcacgctgtgtggtggggcagagggaagggagcgtggagaagagccccttctcctagctttctgcacacttgtcacccagccaagagccagaactctttgctaacagcgttgtcccgcacggtagcattcacggcagagtgtccatctgcaaagcattcagactggatgctaaccctggtgctttcattgttgcagtgggccgtagagacttcccatttgtgttcctctatcccatgccaagaccttatcacctcttcccctagggtagccaaagggcattggtcatcggggaggagtggaagagcggagcctcgggacagacaggcagtggatgtgtcagcctcagctcctgaaataaaagtactaagaagaactgaggctctcgggggaagaagtcagataggaagatcaggaaacgcagcccgaggcaggatgggtacataatgaaaagctatagctgatcttttctaaaaaaaaaaacacagggatgtctaaaatgaactatcgttccatttttttttttcattcaatgaatgtggtgatgaagcccctagcctacttattttgtgaggctttttgcattgttcccgtccttccggatctgcactgagctgatgtctcgcaagttctggtgatttcacagccgcctccctcctgcctttgctctctgagacccgcactgaggaccaggcagcaagcggggacacatctcgagaccaccaggaaataggcagcagcaccatcttcccttcccttgaaggaaactaccagcaggacgggtttaagaggggaggctggcctctgcccctccctgtcacccgctctgctgtactgccgcctggtgggaagtcggtgtccacagcctcttccttctttccaggtcctcccatagcagagaacagggtagtgtcctgtgtcctgaagcttgcatacttaataaggttgatggtttttaataagcaacatctgaaaagggagtgaggaagttcattgagtgaaaggaagcttggcaggaaactgaggtccgggacaccggtgcccagcggggagagtaggtccccaacaggcacaggatgtgcctaaacaacactgtcatggggggacttttgtttttcccggacgttggtgtgtatagatcctcagtgtggggctcaggctagataccgggggcaccacttctgttcttttccaggacttctccccgactccatagccctgcccatgcacaccctcactctctgtagctctccttcactcagtccccgcacgcactgtgactgctccacattccaggtggtcagtcgtctctatactatactcagggcccagaagctgtcagacacttggggcagaggatagggaaggctcagatacctgccacgctgccttatcactgctgtgacactgaaatgtcaactaaagggacgcagtggctgtccttggagcttgggcagcacccctatccctcccaccttgtaaagattgtatccagcatgtggcgggaaaacttaaggctgtctgttatctcattcccctctggatcagaggtgctggctcccatagccagcactgaggaagatcctacccactgttgctgcaccagctgaggccagtgtcaggaagacaaggggcatttatatcagtccctggaccgtgccctccgtttatctggctcctctgcaagcagaacacccatcctgaacacctagtgcagatagagcttcccagagctctagcattaggtggagaaggccttgggcactgtccacaggacaagggcacgccctgaaccctggcagaggacagtgagggtcccaaccctgcccttcactctgtcaggagagaactagcatgactggagatgtctctgccaagggaaaatccccgcgcaggtcagtgagggctctgtgagaagctggtgttacccacctagggtgaacccagtaggaacaccaagccaaggtgccccgaggcttcacaggtgctcccagctcccgagatgtgctccagagccagcattgggcaagcgcgggaagcagatgggagctctagatgaagctcactcgattctggaaataggaagacctgcttctctatttaccatgtacattctacagctgaacagtaaagccgtctgaaactcggatttcctatcatgacttctaacatgtactgtgctctttttctctgccttgtattttatagccagagcctgagccttcacgtcgattttttgttgaccagtgggagctctcccttagcctccgctcctccacccgccctgcctctccctcctctgactccctccgacaggtagcatggcctggactgaacaaaaccatgttctgcagcctctgctcgctccactttctacaggtgtcacccacctaagggagcctaggtctctgcctttgcctggctcctcagaagctctgtgtgtgtgagagagctgccacagacacccatgttaaagaggctgcccgctgcctttgagtgtttcacacgtcacagcctgtcagagcgaacccgctgttaagctgtgcccgatactgatagcatttttcaatctttgaccgaagactgcgttttcttaatcacgtgcgtgctacagaatttgaaccatgccgtcactaactctcctagtaaaatagtgagcacacagcactcctggtgtttcttgtaatcctgtgtggaatgaaccctgctttatcccgggtggctccgatccagttccgaggagtttgttagggatcggagagtcagctgcctttgcctctgcttcgtattcttaggcagtgtgtatatgtgtagaagcactcgcatgcgtgtggcgtacagtggggtgagcccagcgattcctacactttgacccttctgggagtgggaagaagaaagccagctgcttttcatgccagaaacaaacagaacttgactccatctctcttggagtggggggtggggtgcttgtccaagttgctacatcacaagaactgaatgacaaatgcccctgcgcatgcagtcccaggccatggctcctgagatagtccctggttacgagagaaggatcctgatgcacacagtggggcaagggctgccgtgtgctgggcactttgtcatctgctccacagagtgaagaaaaggtgactttcagatcctatgagggcatctctcacaggagagcttgggtctcatttctgctctcctctttcctgtgcctgcctgtcccaggcgtatgcgtctcaaaggccctgttactaatggacatgatatgtggggttaatggcaggtgaggccagccaatcctagggcatctctttttttttttaagatttatttattgttatatgtaagtatactgtagctgtcttcagacaccccagaagaggtcatcagatctcattatgggtggttatgagccaccatgtggttgctgggatttgaactcaggaccttcgggagagcagtcagtgctcttaaccgctgagccatatctccaggcccccctagggcatctctttagttgagctggaaaatggtattgattgctcagttcccagccaggccttagctgagcctagagagacatgttctcaagggtgagcgttcccagacttacagagttggccccacaaaagctgggcatgctgcagtttggaccagctgcccatttacacgtggcattacaggtttgtcccttgaagccacttactaggggttgatgtcatctctgggataactgtacctgctgtaattctgcattagtgacaacctctcccacgtggctgagagcctccctaacttcctaccatgagaggtgtagcatacactgtctccactcagagtcctgcctatcacatctctaaacaactgcccaccgacttgactgtcgtcccaggacaggatccaagctaggccacagggtgtcagacccctgtgagcagggcggcttaccatgcagacatgggctctctcctgtttgtttcttcagcgtttccaaaagggagattgcactagtttgatctgtgtgcattggggaagaggattagactgtctcactgtatagtccaggctagccttgagctcatagcaattctcctgccacagccctctgagtgctaagattacaaatgtatgccactacactcggctttggattttgacttcttttgttgttcatctctaaaaacaattcttccagggccagaacccttctgatgtcctggggcaaaatggtcagctttgttcaggtgtagtttgtgatttggtgtcccacctagtctgggagagatccagcctccacaaccaccacccacccctccctgccgccgcctgatgtgcacagggcagggaggtaggggggcgggggggagggggtaagcacatgggacatcaatatctgcaagaagcaagaatctgcctggttttgttcttagcctgaggcggtcagcttattcgcagagcaccctagaccctctcctagctcttgaccctgtagccacctgcctggagttgaccctcagactctctgagcacccaggatgcagacctctccttctcttccatgtttgtttccattctgtcttctacctccctgtccccagaactggactctcagaaaaacatgaaggaccaagttcttccctgtggaagattggctccactgctgctgctcatgtgtgtgctgaccaccgcggcgtggagcctggcacagtgtggcgtgcactcaccgcccagtttctgcttgtgggcactgtgttggcatggtttgcggttgcactgcgtattcgttttacacccctcaaagattgtttttcctgtcggtcatctccttaatttactttttttttccttctcatttcccttcatcttgaccattgtgtaatctccaaccaatagaagtatataaagatgtacacaggcggagtgagctcattggctgagcagatagccaatcagcttcaaaggaaagagcaacccaaaacccttctagacaagaaggaactggtaagagatattccaggggcactgtctctagtcatggcattatggcgagcgaccctcacttgctccgagggtcttactgatttctgtagccacctggattgccacctggtagctttcttgagttggtctcaattttgatgattgaatttctagaactgtggtagatatttaggatattctgtggaaaagcactttcctctttaaagatgatccatccagtattcagaggatgcgcacacatgaacactaagtgtatgtatattttacccccaccctctccaaacaaaactccagcagaatagttggtttgattgttacgaagttccgaaagcttggatcttttctcaggagcatctcgcggttgttgagtatcacgggtttagaccctggtttgtactcagggtcctcaggaggagattgtgaagcgaggctactctcagagctgttctcgggaaagccacacagagcatttgttgtcatttaaaacctgtggtctgcgtccatgggaccagagtcgtcctcacccacagacggcttgtgtggccgctcgagaggccacagagtctgatatgctcctctacccaaccccccacagggctccataaagaaagagttcccgcagaacttggggggcagcgacacgtgctatttctgccaaaagcgggtctacgtgatggagaggctgagcgccgagggcaagttcttccatcgaagctgcttcaagtgtgagtactgtgccaccacgctgcgcctatcagcctacgcctacgacatcgaggatggtaagtctctctgcccattggtcacgtcagcagccacatgtgccacccccttctccttctgagccagagacctttgggccttgccccgtccctcttttcattttctttatactaaactttctcagctgtagcttccccccccctttttttttttaattctgagacttaaaaaatatttttcctgtcatcagactttcttacctcacataagaccttggaggctaaaaggggtgtgtcaggggttcctagaactcttcgatagatgatagcaagcaaaatagatcccaggcttctgccctgtagaggggattgaattgcccaagctttgtaacctttgtccaacatcagcatctcgtagccaggtggcccaggtgttctgctttaaatgtggaaagaccttggttagaaggtagagaagtgtgccaacaaattactgtcagctcgtcacccaaaggcagttatggctcctgcagccattccctacatgctgctgaggaattcatgggggctggggggggggtcgaatttgtttaaaagtaatagagaagctttggtgagcaggagcagaaactaaatcctccccggggggggggggggtgacaccgagcccacatctctgtgggtggtatgttgactattacaaagcatggcagagggagtcctatgattaagtcacttcagtcaggctgaccctcctaagagtgggactcaggaagccatggctgtcacagaggaaaggcaggaactaagcagtgggctcctggcgttgcagcccgtggtccttttcctgcagtagcaaaatccactgctcagccaagggctgaaagagttgctcatgcgaggaaggtcctcggttagtaccaggatgttggttccattcttactctctggacagcatctttgactccaaggagaggggttggcaggtgggccccctacctcttagaactgtccctgatacttcagtaatcttggttagccttttatcttgaagtgtgcctgcaaagaattccctcagagtctagctaatttgtccatattcatagttttgcccataaaggtatacacgcaagctcacctcattctcttgagagtagacatgaagtgtaagtaagcctctagaggtaatcaccttcataaaaaagcatgttattcaggctcacggtttggaggtgttagtctatggcccactggacatctgctgtctggccatgacaaggcagcatgtggtaggactgtacagccgagggaagagctcacctcattaccaggaagccacagagggaaaggggaccaaagtcctacaggcctggtcagggtgcaccccaacaacctaacttcgcccaacagctgaaggcatggcctttttgttttaaccacatggtgggaacaatacacatagttcacttgaggcaaagcacgctgatcttacttccatctctaagacaccactggtgccgtaggatcttgcttgagacgtcgtcccctacccagaatacacttcccgagtcatgctggaacgggcttccttgaccttcctgtctccacatgtcccctcctcagagttctctccaaacttctggacatcagccagctaccatgttccagttgcccttcctgctacggtcatgcctatgtgccttctgtaccatccatctcaagtgctcgtctgcctcgagggaggcccagcattcatgtcaccagtgttattcaatgacaccaacagttgaataaatgccagacacctgtgtcattcctatttgtcctttagtgtgattgtcaaagatcgctcaatttaagctgggtggtggtagagcacacctttaattccagcacctgggaggtagaggcagatgaatctctgagtttgaggccagcctggtctacggagtgagtttgaggccagcctggtctacagagtgagtttgaggctagctagataatctccaatccgtcactttactgagtcctctataaattgtgattaatccacagtgtcagcctggctggctttcctgagaacggagccattgtgcagtggcagacagtgcaggctctggagtcagtctcctgcctgcaatgctctgaccgtggggcacttgggcaggcagcttagcctggctgtgcctcccctgtggaaggatagtagcagtctttgggttgtgtgagcactaaacgaatggatgtaaagtggtcagaattgtgtctggcacatagaaaatgttagataaaattagaggtggtttggttttttttttttttaattcattcaaaaagcaaaagtaataaagttgagtttaggaaagagaataagaggctacattaaagccagctatactggcatatcctataatcccagcacttgaaaggtggaggcaagaagatcaaaggttcaaggtcagggttggctacatgaatccatacctccagaagaaaggagcattaatgattgatgaagcacacaaagcccaagcctgtggcagtgagctgtttcaaccagacagagagagagttctttctgtccctttcctgtgggagaaagtgagctctaagaggctaaagagtctggaggttggcgtagcacttaagctgagatctcatctcagctgtgctctcgcatcaggtactgcctccctagaggatgcagttttctagaacattcttggaagttactttttggctgggatctgagccttaaaccctttattttgttacgatttggagcaggatccagtgctggtcagctaggagtcagagcttatgatctgggtttctatcttaagaaaaaataagcaataataagtaattagtattcttgaattataagcctcaggccagtgaaatggctcagcaggtaaaggtgcttgtggacaagctgatgacctgagtttgagtcctgagacccacattgtggaagcagagaaccaactcctgcaagttgttcactgagctccacacgtgccaacctgtgcctgtctacagacatacacacacacagactcagatacacacacacatacagacagacacacacacaggctcagacacacaaacacacagatacacacacacacacatacaaacagacagacacaggctcagacacacagactcaaacacacatacccacagacagacatgcacacatatatacacacatactcacaaatagacacgcatacacacatactcacagatagacatatactcacagacacacacagagacagacacacaatacacaaataaatgtaattttttttaaatttaaaaataaataagtgccgggcagtggtggcgcaagcctttaatcccagcactcggaaggcagaggcaggcggatttctgagttcgaggccggcctggtctacaaagtgagttccaggacagccagggctatacagagaaaccctgtcttgaaaaaaacctaaataaataaataaacaaataaaataaacaagctttatggtacaacccatagtgtgagctttagaattatgtctctcttctaagtagcagtctcagagacaggcatcctccaaggttgcagcagtcctcataatttgccatgacccacctggcctcagtcagattccagtcctggggagtggggagaatgaaatacaaaacacccgagatgtgctcgatgaactaggtactaatatatttcatcttctgtttactgatggcaaaacccaaaaaaagaacagagtggcttatcacagattatgtgaaaggtacggtggacaagctaaagacaaaacaaacaggaggaaaagatacataaatcaactgctcacccacagagaagcagatggtgagctgaccctttgctggtcacatgttccccacagtgccatgtctctgagtactggctgcatgccagcagctggtgagaaatctggggaaatgtgacgttttataaatattatttaaagtccataaaattctctgcgatttttccaccattggctttaaatctggagtacccaggttagagactcagtcactagctgatgggttgttggaaggcagctagttattgggagtgctaacttcattagtggcttacctcacagatagataaacaagttaatggcattactgggtaatgccattaactttaggaggtgaagcctgttggaaactggagtcacaaggatgaactctggggatgtacctgtccctggcctgtcccccatgctttctctgtgccttgccatcttgaagggaacatctcttccccaccactgtgatgccctgcgtcagggaggcccaaagcaatgggaccaagtaaccttgggctgaggcgtctaaaatcatgagcaaagtaaacattcctccctttaagttattttcccagctttgacaacgctgacctaaaactgtaagaaacacagataaaggcatatgtcagctatttttaaaatgaagaaaatggggctggagagatggctcagcagttaagagcactgactgctcttcccaaggtcctcagttcaaatcacttggtggctcacaaccatttgtaatgagatctgacaccctcttctggtgtatctaaagacagcttcggtgtacttaagattaaatgagtgaatgaatgaatgaatgaaatggataggggttaggccgatgattcagtgggtaagagcacttgctcttcaggcttaaggagctgagtttgagtcctcaggatccacataaaatagccaggcatgtccctggctggtaggtgaaatggcagacttccagttcagtgagagacccatctcaaggcaataaatcagaaagcgatagaggggaatacaccctggctttcctgtgcattcacctgtacgcttaacgtgtgtgcatcacacacgtacaacacagggagatgtgcccaggtcaccagggaagaggaaaagggaagaagagctgccccaagccttcgtttcctctgccttgtctggcccctgggcttacctttttggagtctctcttggcacatgacaaagtaaggcaagcggctcctgatacagcctttcccagggtgcagctccggaggcagctgctctcagggtagggctaatgctcaggacagattcggatcatgtgactcttagtttgtcccagcacttgtgttgggagggggaatgggtctttcaaaactttttggctgcactctccttgagagatagcatcacattacataggacccagtaaatgcacctagacttggctggaaggcctagcaaaccatgtttggccctggctatattgaagcacaccctgggttttattcagtctcttgttgtgtacatatgcgcacgtgtgcacatgcatgaagttacatgccacagcccatgtagaggtcagagaacaacttgggagtcagttatctctgtccaccttactgtttcttctaattcacaccatactccagagtagctggcgttataagcctctagccagttctcctgtctccgcctcccttctgtctctaggaatgctgggatcacagggtcccaccaccatgccctgcttttggccagggtcctaggattgaagtcaggttgtctatagctgactcctttacttctaacattacttctaaatcatctctgtagttccttgtgttacttttagcacatgttatatagttccagcctgccttggaccaaccaatgctagggaggggaagggtaggcgcccatggctgtggaggggagtggacagttctttcgggaactttcagaagccttcctggctccaccctgcatttgtattggctcttgccttccctagaactgctgctggggttttcatgtgaccatgtctttgtcctcacacactactactttgtttgctggctctgtcttgcaagcctcacatcttcagtctgggcactgattggaggcagctcaacaacccttcacacacccaaaggggaaggcctctgcatcagacacaggaaaaggaggctgcaggctggcctttctggattgcaggggtagctgggagctaggggttagggatgggggggttcgcagcagcatcctgtgaccagcaagccgagttcacaattgtggagttctgctcactcctcttttccttgcttcttgctgtctgcaggcaaattctactgtaagccgcactactgttaccgactatctggctacgcgcaaaggaagaggccagcggtggctcctctgtctggaaaggtaacagcttccttcctgggagcgggactgttagatagtcttgcctgtcccatgagtggacttgagaggaactgcagttgactgcagacacagcaggtttgcacgcatctagaggtgctggtctcagaggcgatgcttagggccgattctgaacagaagggctgctcaccctaactaactgtttctccccccgaggtcatagcccttttccttatagctggagaacaggcggcctctggagtccccccttccccctttttaagcccacacccctgagcatctgagggccaacccctgctcgccaccctggaaggccaagctgctcatagctggctctgcctgctgcctttttaaggcctgctttcctggggtgatgtccaagccctcagctttttcttttctgcttcagtgagactggtctgttctcgttttctcaaggtggcctggagtaatctcttctcttttctttttttttttttttttttttttttttggtttttcgagacagggtttctctgtatagccctggctgtcctggaactcactttgtagaccaggctggcctcgaactcagaaatccgcctgcctctgcctcccgagtgctgggattaaaggtgtgcgccaccacgcccggcaagtaatctcttctcttcacggacagccttcaagccagttacccggtggcttgggttgacggcagagggagggtgagaagaaggtgtactcttggccttctgtgtccgtgaagtctgcagcataggtcctgtccgtggcaggggaaatgccactttgtactgaatctgttcagactcttcttttaagcattgcagtacaataactgctcacgctatacagcagtcacactgtcttaagtcatccgaagaacgcttaaagtcggcaggaggattcccacgtgtcatatgtacatgcgtcacagagatgatatctgagaggatcagagatctcctctcctagggctccgcagttcagtactaacagacagactagccagtctccgggggtcattgcccctcgagccccggggggctgcagccagagtcactgttcttttttttctcatggactcttctaggaagtcaaaggagccctgcaggatggccccactgcagatgcaaatggactggccagcgttgccgccagctcagccgagagaagtccaggtagcctcacttccttgtttggctgggtggtgcgtcactctcttggcctctgtgacaaggccaagggggtgagccagcacctacaaaccaacatctcttcaattgggcaccaagtagcccaaaaccccctggactcatttttcatgtgtcagctactggcgttcggggtccccttcctctatggcctgtcagaggtgctggtgcagatcggaggggagtttcactggcagactgtgagccagtgacggtgctgtctggtaagtggggttacccccacaacccacaagacacaccgaggtgcttgttgcagaccctacaggtaaacaggaacccaaaagagctgctatgtccttgaccccggggcgagcccagcgtgataagcttctgtgtggcccctgtatagggcccgtttcgtgtcacagagaacctgccacacagactgtgtggcccacagtctgaatgtgttcactgcaacttggaagtgttttcgtcccatttcccagctaggtccagtctgtccatgtgacaagggccaccctagccaaatccctttaggcatctgggtttccagtgagggtcaggacccacatgccccactctccttatcacttcctgtgtcaatagcttgtaccatcctacctcacaaaacatgccaaccctgtccgttgcaaggcaggatggggaccgcttaaagcatgatggctgtagagaattgtcttgctttttttccttaaaatttccctgtctgccattgtataactagccacagttctgtacactactgagaggtccttaggcccctgtggtggccccagacatctctcggggggtcactctttatgtatgaagtctagggctatattttcctgtcacacatttcctctcatttagagcaagtatatctttttacttgtctttattttattttatttttttgtgcatggtttccgagatagattcttactgtgtagccctagctagaactagatatgtagacgaggcttgtctcaaactgacagagaaccactcaactctgcctcccaagtgctgggattaaaggggtacgctactatgcccagctacaaatctatcttacacagccaggtacaaactcaaataaaaatgaaagattgtcagccgatgccagaagctactgaggagcagatagagagatgctttccatggtggaggagggaggaatattttctaagctttcaaatagagctgcctctgttgataaagggaggtgctgacacagccagaggagggagaatgtgccctgggcttggcaggggcactatgtgggtgggttgtgttaggcctccaaggcacagaaaccccagccagcccctgcgaatgtgactacagcttctctgttcccttctcatgttcggggaatctttcttagataccctgctggttagactcaacagtttatagccatgctcaagctaggggcgacttgtagcccgatgaggtctgccagcccttggtagtagtatttctcgggagttgacactcccagagcacagcctggcagatgagaatgccctggccccagacacaactttggcttcacactggaatgtacacacaatcatgtgagagcaccacctaatagctttgccaaggaacctgactactcaagcaaacaaaaggctccactctccctatgggtaaagggtgcacgaacatcctttttaaaagaactacaaatgattttgctaactctcttggctcgttccttttgcatctgtgcctgtctaaggaaaatgttaggggtttcagattttttttttagacactcaaaaattgagggacctatggataggagaagcatgctctataaaacacagaaaatacacttgccagtgtggttaaagagtcaaaacaaacaggaaagggcccaagctagaacttgcttgcagaatagcaagagagggtcaagatctggcgccccaaaatatcccaggtctgaatgtccaaagtgaggctggcactgtacccctagcccaagggactccctacagagggagagcagactctgcaagtcattgccctgagtcctggacatgctcagagccctggcactcgatcttgctagccactgaaggccggggtgggggtgggggtggggaggcagaattatgagtgacattttataggtgccatgagattggtttctgtttcttcttgggtagaaatgcctttttccaatcccacattagctttgagtgcttggccaaacttgctccagaaagcttcaggcaaagcccagtgcctcgggcttccagaatgtgtcagagaaggggttcttaaccccatgtcccatgtgatcgcccatgttccctagagctcacggggttggggcggggagggcaggaagagctgggccaggctggattgtggccctgcctcctggtcctgtaccttcttgatttcctagctcttcgctcttctcccttctgttctttccccttaggcaagaattagtgctgttgtataaacaaaataccagccacaaaactacccccaaatgacaatatgaccctccttaaccccttgtagagagccctgagtaggccttaacacgctgtcttcctctggtaacctcgtctgcagctgctgcctgacccctgtttgagacaatgtttctggtatttctgtctgtaatgtgcgtttaatatagaaatcctcgttttgttctcaaacctgtaaatgctttgtttccaaaccacctcctctcactgctacagatcagtgggcctggcacagatttccttaccctggcctcacagtacctgcctggagtttaggagaagtctggaaaccggacaaagggaaaaaaaatcaaaaacgctgggcgggatggctgttctcttgggtgcacgcccttggttgcagatggtttcttttctaggtagaggaatcccattatgcagaatgaaaagtgaggcacaaggcacatgggtgggaagggaaaaggagagcttttctccctgcgtgcagacaagagcaggagaagcacgctctgcagacatctgctgaggaagtgtctttcctggagaagctgtagttaccagtggcactgggctgtcccctaaccccaggtactcttcagtggtacccactggctcccacagttagggaacacaggcacgggcccacgcgagccggaatagccacacgctacaaagaatgcgtacaaagaccctgggcctctgcctgacgaggaggttgggatcctctcgtggcttcctagggccccttcccttcaaggctatgggagaaaaaacccaggaaaggaaatgctgtggaacagctgccatgccgtctgcttcccaacctgaccgccagagccaaagctgagcagtggtactgtgtgaaccttgaacacacctctcaatgtaaatgtgtatatttatgtgtgtagatgggttttagttcagtgtgtaggcagatactatttatctatactgtgccctaactggtaacagtgagactgtttataaagctactagtctgaaagccataggaattttctctggaagcttgccctggcttgactcccccagcatagccaggattcagagggagcccagccactaggcatggcctcctgtggggcatagatgcgggggccaggtctctggggtggtacacacccctacactcaggtaatcagttttcctcatcaacaaagcaatagtcttactggtgcggggaccagagagtctcagatacctcctttccctcaagtcagtctgtggtctaagtgttagctccactgtggccgtctcagatagccattgtcttagtattcactgggcctggctgcttcctgcaggacagtggaacccattaggccctctgtgccactgaatactggccagtgaagtaaaggggttcgcttttaatcgcccaactgttctcttggggtgaggcaggagactggcagcaaagactgcccagagctgtggtacatagaagccagagtgcggaggaccagctgtgccaaggaacactttgcctgtccactctgaccttccctaaagcttttaatttgcccttgtttttaatctgtgctgttgtgagttgttttttttttttttttggtgtgttgctttgtgagtttttttttatttaattgtgtaactttgttcttgccattactgtgaaaccaaggtgtgtgtgctttaagggtttttttctctctctctttttttttttttttggtgttttgtttttttttaacaaatgttacattcttatttaagagaataaattccaaacaatcttcaggtttctgagtttttcttttctttctctttttcctgattggagggtgggaaaggaagggaaggctcatgcaggtgtggagcgcgggctgtggaagccagtgtttctcagaaccctgacttatgctgagggtagggagggcacagatggccctgaggaccaggttacccacctagtgtagtgtcccactaacggaaggaccttgtgcagggtgtggcatgctgcgggatgtttcattttgcagcaattgtaaatagagaagagcaaggagaatgttattcttgcccatgtctcccgggtttactgatccagcataagggacctcaggattggcagatggaggataaatatctgcacagagcccaaggctgctgagaggacatggcgccaggcgccatcctcagaactgggactggttaggtgccctcaggcgttatgactggggtcctgctgacactcagcatcctcattctccagctggcgtctctcctgtgttgtatcatcagggacctgagtcacagtgtctcctttcactggacgactgccctcaagcctggaggggccagcctgtcccactcacacacgctgaggctagccaaggagtagtgagacctctgccatgtcagcatgccaaacagggccacaagtgggcaccttggtggatgaagtactccatacatactgagtttcttctgttgagtctggggaagtctgggtgttgtcccttgctgacattctccagccagcagcagacctctgagaagttgaagaacatcaggcttctttgtggagttggcacactgggccaagaccctccctgccacactaacccatccctctttctttgaaatagtgttctgtgcccgcagtggaattgaggagagagaggtggcaggtacaggggctggccaagagccagtaataagagaggatcatacactctaaccctctgctgccctcgccatcccagacctaatgatgaggggaagagggctggggtcattaggacagtgtactgatttgcctaatagctgatgtgattctgtgcaaaatcttgtaaagttcctgggaaacctccaagggcacttggtttcttactgaaacatcttgaaattgttctctttttcttatacattccctggtggcttttttaattaagacactccctggcacagaggctgagcacagacttgggagaacagactgtacaaatgaccactctcttattttcatgctgaagtggagggcaggatggtgccatgtgaatacggggccctctcgagtgtgagtcagaagaacccacccagtggggaatctcacctcaaataggtggaagttttaggggaacactggattccagccccaaccgtggcttcacctcacagctcatatgggcaagcatctagcaagtgccaacaagcaaatgactcatgatgaactggggggtagggaccccactgacgtttggacctaggctacgtcgaaagcctggcagctgctcctgtccccacccaatctcggcagccactcattgtttcctcctgacatagttccagagggtgtagaattgattgtgcaaaagcaccctccgtacacctgaggaagggaggcgggcctctattgatagggagcaaccttcaattacttccgggtgttcctggccacgtgttcaccatctccctttcacttcctgtgggtcatctttttctcaactttgcagaagtggtttgtcaacggttttgaaagcatctgaggtgctttaatgagtctaaggacagttggcgagagatgaagctttactctagttaaggctgagtttagttcccttgactttgatggccttttcctcccaaggagctgttctcaaaatatgggcagaacattctccaacggtgaacattcactgtccgtagtagtggaggcttaggaaaacttgaaggaatgcaggaccgcgggtctggcctgctccagcttatcccgggataatcattgctaggggctgtacagatgaagtcaggatttctgttggcctctcctggtttctttgctttagcttttctctgtacttggttctttgtgatcgtacagtatatgttaaattgtccacagtgacttgtgactggcttcctcctcctgggcttctgtgagataccaggattagtccctcctcatcgcagttactgcagaagaaatggagcctgagtccttgtttgtcctcacctgtgactgttcgtccctagtagctaactttacgtgcagttttccctgtcattagaacccagcatttttgtgcccagtatcgtatcccttcctgagactctaaggtcggggggtcggttgctggcttacctcttttaaggctcattcctagagaaactcgaccttggtgacagatgctccttcacataaaaataattacaggagaccagtgttgcaactcagtgggctttttttttttcttcaatgcactcatgacaactatttggagaaaattctagaaagaggaatccccttggtgttgagtatctgctcagattgaaacttgaaaaatgagttatgaatcagactgactggaacatcagagaagggtgctcatcaatgacattggtgtcccttgaaaggagattataatggcacctgtgtcatttcctaggactgccagcatctacaatagcaggttagagaggccagctgtgtggtttctttcccactgttccacctcccggagaccaggctggtgggctctgtgtaaaaggcacgtgctctcccctagagttgagtctgatgagagtgactgagtcaccagctgccttcctcttctctggctcgtgttctggggagccgacactggcaggaaccatgtgacacacagaaagaaggaagggagggagggaggaaggaaggaaagaaggaaggaaggaaggaaggaaggaggctccgggtcctgctggcctgagtctgtgcagtctccaagaaacagctgtactggtgtggggtgagggtacacaagactaaagccaaagtcctcctgtttgctacattgccaggagtcaggagcagtctttgggttccagttctgcatcccctgagaaggatctgaaggactatcctcagaaacactatagaaaattagaggtttgcgaacccctcttgtcttcttccatgattgttgctcttcagcatgcctgccacaccagatcacagaatataaagtcggaggctagagatacggatgagtgaccgggtagttgttttagcctgctcaaggccctagattgaatccccaaatccccagttccatttaaaaaaaaagataaaaaagaagagaaaatcactaaggtgtagtggcatgtgtctgtattcgagcattcaagaggctgaggctgaggtaagaggatagccgtgatcttgagaccagcctgggctacattgccagcatcacaccaactacatagcaagattctgcctcaaaaaagaaaagtagccaggcagtggtggcgcacgccttcaatcccagcacttgggaggcagaggcaggcagatctctgtgagtttgaagccagcctggtctacaagagtgacttccaggacagccaagactacatagagaaaccctgcctcaaacaaacaaaaaagtaaaattaagtagagaaataggaaggcacacgatggtgctgacgacggcagtacccatgggcagcgctagctgtgtgccagacactgtctgggtgctctgaatgcactcgctaagcccttcagtggtctgggttagaagcaggcacggaaaccaaggaaccatagtgggatgtgcctgtgtgcccactgtgtacacagattccctttgcccctactctgtcatcatacccttgagagaagagctctctgagagcgagagctttgccctggtgtttctgtgaaggtgcggatgcaccctgtacatcggcagggatgcatctctttattacaggaaacacaaggcgcctcttttggggggagggggcagtgattcccagggctgctagtggaaagtcagaagacggcaagacagagggtttcatcacggatgatgtaagaggatcatcaaactgaggaagggaacaaacaaccacgagttacctgtgagaaagtgaactggagtcacatcagatactcacaccgaaggccatagggttgacggtgatgcgggcccatctgtgcctccagggggaagcctgtcgtgccagcaggcttataggtctgtctgtcagcttcatttccttacttctctgcctcttactttaacttttccagtgtagggatggaacctaagcctttacccatgccaggcaagtggtacccgagtaccgctgagccaactctccatcatccctttgtaaaaacctccagtgatgattcacagctccattcacagtcctcatgagaaattactctccctgcctggctctgtgcgctgttggagtacagggaaggagagacgtgtttttgtactgacgatctgaggcaaatcacctgtagcaagagaaaagcaaacctcttgagtgtttaggtgctgggcattgcctttggggtctcctgcttgctaaggacaggcactttgccgtagaatcacaccccaacctctggaagttattctcagcagacttgagccagttccgtttcaaagctcttatagtgaccaactgctaaatgttgcgctgggtgtccgtgttatcccagtgagcagctctggttttgccccattggatggaatttggccaatcatagaacgcttgcagggaagtctcttgaacatgtgtggacacggccttgccctagccctggaaagatgtgccacaacagagagccgcagagctcctaggcagaatgtacttagcaaatgaaagacagaggcaaagagaaagatgttttcctacatgtgtccagcccctcctgggtgtggtgagtgggcctgctataacatggctgctcttctgctcagctgcaggcttgtggcactcctgagagaaaagggataaaggggatcagttgactagacccatccttcagtccctggaatctctcctttggggttcccacacaagccagacctagaaagcgggtaggggtgtttgattggcaccatgggggatgggcagtcacctttggaggtgaggtgggatggggctgcagatagtgagaggtgtttggatcatgttcgcagtctgctgcatgggactgatatggctcggtctctggcgtctctggttgcttctctctggacacaagccaaaggctgtctcttaagcatggctgggccttcatatcttgcctttctatgacttgggtcagcaccttaggggagttgaaatttatctgtaagataaaacaacacgtgaaaagcctgcttgaaagagagcctcatgatacattagcagtgttgttaatgggagaaggtagattctgtactttaaacgatgcttctttgccttcctcaatacagcgctgcatgccaaggctgccctttggccagatacttaataataactaaagagacattcttaaaagcatactcccatgagaccaggcagactgagagtccctcagtcacctagcagcagccgaggtaccctcgacattcataagataataagcacataagattcataagcacttcagcttgaggcatccctgtggccttcctgggtacactgctagtttatttcctttggggtctctccactcggcctctccatgtggtatttaactcagaattgcccaactcttttggtaatcacatacccctaaaatagctgagtttcccttggacccacaagacctacttctctcaatgcctctatataaaaacacagttttcccatcagacataggggctggggatgtagctcagttggtagagtgctggcctaacatacagaaaggcctaaattccatccccagcaccaataaaaaccatggtggtgcataatcctagcacttgagaggtggagacagcaggaccagaagtttaaggtcatcctcggctacatagagagtctaaggctagccctagggttcatgagtctctggtgttttgttttatttttatgccatgcatggtgataaacaactttaaccccagcagttgggagtcaggcagatttatgtgtgacttcaaggctagcttggtctacacagcacattccagaacagccagagctacagagtaagaccgtgtcaaaaaaagatgtggtatggtggctcatgcctgtgatccgaccacaggctgaagcagggggagcaagagtttgaagtcaccctgggctatctatatatagctagatttttatcttaccaaagcaaagtaaactgctgggcagtgacaaagcacgcctttaatcccagcacttgggaggcataggcaggtggatcaccgagttccaggtcagcagggactactcagagaaaccctgtagagggggttggtgggggggcatgatgcttcccttaaggccctggatcccaccccagcatctcatctaccccccaccccacccccaaagcatcctttcctgtactgggtcactgggagagttgctagtcttgaagcacttgctgagcagttagtcttaacatcattgagacctagaaccctcaatgtcatacattgatccaaaatctagaaccttctaaatataacatcatacgtggaaaatctcataccaagaaactgccatacacagttatttaagctctcacacaaagtatcctgaaacactgtatatgaggtaaatatgaatcttaagtggattttgtgatcatttccaaggtatttcattatatgtagacagaaaaccctacgtctgggacatttctggtcttaacgtttcatttaagggacattcagactgttgggctagatgaaggttttcgaggtagccgttcagtggatgttgtagatggcattctgtcgtggtacctgacatgcttgccaccttagcccttctcctgcctcacagaagactgtgtggtgtagagaaattctttgagcagacctgtcggaggggagctatgcaaatacagaagtcactttgctggaccagggaggaaactcccattcccacgtagcagcgtcagtctgggtgtccgcttagaatcacagtcgctgtgaaggtataaacatgtgagcttatcaatggccccaccatggtggctgatgtgcttagaggaaacgggggaaacggaagactgcccacactgcctctgaaggttgcaggatgcagggggggagggggaggcctggctttcggccctcttctcaaacaaatatggaggaagattggacaccttcgtggtaaagcagtgctgaggcagggagtggccatcttttatttcaggatatcaggccaagatacttcccagtggagtgccgtttgttctgttaacagctaagcgggactcctacataggcaactttagcccaaaacggggaagaggatgaaatgatgtccaagttgattctttcctgtattgtaagagctcagctcagtccctgaagccaatctgcagcgtgctgctggtaggttttggttttgttttattttggtagggaatcttttgttttgattttgtttggttttcctgtgagactcccccgccccccttttaccttgactgtccccaatgcctgagctcaaaggaatcttcctgcccagcctcccaaacagctgggatcagaagtccgtggtgccacacatggctctgtctgcaggtttatattccaaaggtttctattactgcattctaagtaagaccatggttctcttgagaatggcctcacttcagatggtttgatctctaaatcccagtgtatgaggaagcaggcgagaatgcagctcatttcctgcatgcctgggagagagttgaaatggatcccttcctaccagagcagagaagaagaaacccaggtcccattgtggcctcacagtgacggaggctgtgggtgaggacaaattcccagttcctccaggtgactctgaccagtctcgatgtagatgtggagtctacactatgctgccagccaggtagctttttctgtaggagttctcatccttaacatcccccagagaccttataggttagctgtgtggatatgtggggaaagcccagaagcggctggctcatggtctgaaagaaaagccacagcccaaatccccagcagcttttgataaaaggaacagggggtgctgatggtgggtctcagtggaagaggaatgcttacattaaccagacctgacttcagtctttagcaccaaaagggggaaaagagaaaccacttaaggggagatctctgaatgacagagtagcaggccagtgtatctcagatagaccagttatttcaggccagagtatcttgtggggaccaatcatttcaaggcagagtcacttctttggtttgttttgtttttttttttcaagacagggtttttctgtatagccctgactgtcctggaactcactctgtagaccagggtggccttgaactcagaaatctgcctgcctctgcctcccgagtgctgggattaaaggcatgcgccaccacgcccagctcagagtcacttcttaacaaggctttagctggcatccagagtcaccagttcctcctaccagctgtgtgataccatcatattccattagaaagcaggcttccctggtgggtggggttggtagttagatgaatgaatcctgggagccatgttactttaggtccggtgggaggacaccacagaagacatctcggttccctgtgccttgtcccttactctcatcaaattcaggctttactcgggcttccctagcagaaacagtcgacctcatccaaacataaatagaacagctattgtaggaggtaaggtagagagactgggtcaccagtacccatgaggccagagggattagccaagtgtcccacagccaggaggtcactacggtttataccacattatctcactgggaaaaataactagaaggggccaaaaagtcccaacacagggaataagcatggaggaggtagaaactactcattgttgacatgtataaaaagatcatactgtaccccataaatatgtgcagctgttaacggtgcatcgctagttttattagaaggaaaagggaattgggaaaatgagccagaaatgaattcaggatggtggggggaagagagagcctcaagatggcctgtgtgatacacggttgcccgaaccccccacccagcactggagttttggaacactgcaggaagggcagggagagcaggtgccactgaagcctgtctgcatccctcgtgctccttgtgaatcagacagctacaaataaaggattctggcagctctcgcacatcagctgagagcaggttgtcctgttagcaagtgctgctttggggatgatgtatggagctcccgtgggcagcggctgttccaaaacagagcctcaggtcaggcccgggacctttttcctatttaggacgcagccagatcctgggagctcttcccctttggtatgcgtgaggctgtaattggcctccctgtgacctgagatcagcctgtgctgacttagagacaaatcagccttggaactgattccaggtctctcgttccacttttagctgggaaggccctccgcagctgccatctgacaaagcatatgatgtggagggaggtggccatccttcctaatgaggctggctatgcctcctcacctactcaaaccaacttctgccagccttgtttgtttacttgtttagaaatacagtctccatgtgttacacaagcactcctggcccaagcgatccttctgcctcagcttcctaagtggctcgcaagcttcaaagcattttaaataccagtgtgaagactgcagcggctgctcattttcatcccttatctcttgtggttccttctcccagacacttagccatgcgcgtgtcacaggagggtgtgtcccagtccaatgatgtcaccacgaaggcctgtaccactccgcttcttccttccctgtctgtctgtctgctagctccttggtcaggacagagagtcggggatattaatcttaatttcactggcattgtgtttgccacagtgctttaacactgtggattgcaaatgtgcgggcgggcacactggacgtcaccttccctttgggaaagctgagcctctgtgggaccccagtccttgggattctctgtctaagtagtcccttgtcactgaaagctggggtgagccagagctctatgtgagtgggtgctggtgggccagagggcagaggcagggctgactccctcctctttctgtttatgggtgggtggctggttggttggttaatttttgtggcagagtctctagtccaggccagcctgaattccttatacagccaagaatgaccttgaatttctgatctgctataatacctgatgtttgtgctgctgggggttgctaggcagtcgctcttccagctgagctgcattaaggcttttgccttaaccctctacccacttctatgtgagacagggtctcactttgtagccctggctggcctggaattcacagagctctgtctgcctctgcctctgcctcccgaatgcatctgccaggacacccagcttcaccttcacttttgtttgatggttttgggtttgagagacagggtcttgctatgccgcccaagctcgtctcaatgctcctgcctcagccttcctgagtgctggaattatagttgcaagccacaaagttagggcttctgccttatttttttttttccaaaacctccagcaagctaaagttatcagagcatccttccatagcaccagacatgtgaatggtccgaatagctctgactggttctattttttgttatttgtagcatctcccttccctggagtctcaggcgctaagcttggactgccaagttctgacgcttgatgtcccatcagcctgcaaagcttgtagactctgcagaggaataacaccaggcagagggcagaatgcctgctgtgccagactccagcatgtctgttttaagacattttctaatataaaaaaaccacagcagggcagtacagtgaggcctgggaagggagcaatgactaggactctacaagtgccctctctttgtgtcacaagtccagggacaacatggtggcctcttgaattactgccatcctcttgaagttcaatttttagtcccgctgcccacagactgtatgacctcaggcacctaagtgtgtgtgcactcagctagtgctggttaactgcttagtcctccagaagaccttccctgggtacccaggacagacactgctttcttaggtaccaacggtcccgggagcatacatctttcatagtactcgataacttatgcctgacgtactatccgtagtctatgtaagaatggaaatgctttgcatctgccatcttcccaggggcctgatggagttcccagcacagagtaagcatcgccacgaacacaacttcgcttctcccctgtgtttctacatgggtgcttcttcactccacctcgctggggttagaacagaccagtggcgctggtttgtcctgaagggatggttcatactcttttctttctgctctatatgaatggagctcctgggaagcttacgcttgctttgtgtctgatcttctctctgtctttcatggaagagcagtcacaggctgagaaagaatctcgctgtgtgtggtcagggcgtctgcttgctcatctttgttacgtggagctcgtgggtgtcgatggagaaggaaaggacaggtgagccagcacctggagcctgtgccctcctgagcctgggcaggcagctttgttttggagaatgtgttggctgcctgcccctctcttgtactctgtgcacttagctcccagacaccctcatcttggatttgtgagccaacttagcatcacattgcattggttttcagtaaagagtctccagtcactttggaagctgatgttgtggaagagccagagtcggcagcagatgtgctaagactgaaccctgcacctgactgtatttgtagaaaaactctctcatgccctggcaaaggagttgaaaacacaggctgaggctatagctccttgcttacccaacattaatgaggccctgtgttcagtccccagcaccagatgaaccaggtatggtggcacatgcctctaaattcccagcacttgggaggcaagaggatggaccttggctatagtgaattggctagcctgggctagagatcctgtctcaacaacaaaaacctgcacacaacagaaatgccaaccatcaaagcatttcctatctcagagttgctaaactagtttaggtctgcctgagaagatgcctgtagtcccaaattgggctggtataggactgcatgcagaactccagtgttatctccggtgcttagactttgtcagcagttagagacctgccctagtcagagcctgtggtcattcctgaccctctctcacctgggctctgccttttcttttatagacaaaacaaaaaccaatttccgttattattgctaagtgtgtgtatgatgtgtgttgtgggggtgggggtgtcacaaagcatatggggaggtcaaagggcaacttcattgagtggcttctctccctccgcctctctgagagttctggggttgaacccaggtcgtcaggatggtaaagtgcttcctgctttgctagcctgttcctaccttttcttagtcactgtgtatcttaaagcacaggtgtgtgtgtgcttttaacccagggctgccacctcttcccttatgtctacatagggtgactgaatttatggtccagagcaagtggacatcgactcctgtgtgtgagtgcgcaggacacaggcacagatcttactgggcatcagctatgtggcttcacccatgtttgctgaatgctgccctgtgggagaagaggtggggaataaactgggggtggcgaataaactgggtttctctagtcggtaccctcacatccagctctgggaggcaggtgtcatcccggccacaggccagggtacgactttgagaggattagagtgtttgtaagctcctgccatgttcactgctctagaggcagtgggacctgggaaaatgttaaaaatgaggcaaggtaaagtgtcatgcaattgccagctttattccgcatcagacagtttatactccgggggttaggaaaaaatcactgagtaaaagttcccgtgagttcaagctgtgtacagtcacaaggacaagctgcatgtggtgagaacatgttttttccatagaggcatataaacaagtaacaatagccggttataatgagtaatctcaagtaagctcactcctctgcgctacaactccgaggcgcgcggtctaagagcagctccttgttttgaagaaactaaggtcacaagactctagttttattttcctggggttttctcacaagcattcagaattctccacatgagactctccatccttggatggcatcagcacttccagtcagtggtggagtcaggatctgacctgggttcgtctcagtgtacgggtgtggtgtcgtgacgcagcaggcgcacgacagaatacacaaggggcctctgaccagagctgggacagtggcaaatgtcaggaggaacagtggtagcgagaagggagacaggacccctgctgtggaccgaaggagactcgagtcagggatgctttgtagctggtttgagttttagaagcaccgtgatcctatagtgtttctctaaacgcaaaccatgaggtagaaatggtagaatttttaaaagctctctcctcgtggttctaaccaacaagcagagagcactgacagatagatgctcagacccctgtgtgaagaatgacaagggcagaaagctgtgtggtttcacctcgtgcatgctaacagagaaggtgtacttgtgtgagggcatgcttaatgggcagcgcctgtcccactctgccaagcttggccctactgcacagccatgcagagggctcagggctcagggcttagcactgccaccatggtgtgtttgtcctgcaagatatttgtcaaatgcgtggcagcaggacacaggccgatcctgtgtcacagctctacaagaaccctgagcagagtcctaccagacctcagtccatctttgtgggggatcacttgaagtatgataccctctctgtgactcttttagtccctggggatgagagacccacctgaaggtcctggacagatgctttcccccacccagtcactgttacttataagtcactggcatcttctcatcttgacttggctgggagcagatgaggatgtgtggtctttgtctctcctacttagggaaatgttgccctcacccacagcatcatttcctgtcctcgggccagtccttcccccatggtctgatttccaggagacctgtgcatcctttcctgagtgatgggttatggctgcctcaatggtcaacattcccttttttcatccagcaccatttcccatcatccattgctggagttcagcttctgccctccgtcctcagttgccggtttgcttttcccacaggtaccagcatgaacggcctggaggagcccagcattgccaaaaggctgaggggcacccccgagaggatcgagctggagaactaccgccgatctgtgaggcaggtggaggagctggaggaggtacccgaggagacacaggccgagcataacctgagcagcgtcttagacaaaggcaccgaagaggatgtggccagcaggtcagctgatgcccgtggtttgcctggctacatggttccccggggcagtggctttactgggtgcccagattcagctggcagcaaaggaacttgataagcaagggaatttgaaccagtttgattgggttggaatcttagttcttctcttaccagctgtgaaaccttaggcaattccctcggtttccgaggctgtaaggtaacaccgctagtgccttcctcagcgtcagtataaaggttaaggaacaggtaggaacacggtgttgagaatggtccttagcatgtctaagcatttggaatttcctctgggtgctgctgatcatgtgtgttggtgcgagtcctaggaataggtgtgggccacctgttttgtccccctgtagtggggagaagctgacggtaaccaggacaagacctgaacttccaactccaattcccagatccaggccctaggctcttcctgttttccctgccgccctgtgaccctttctccccaccatctaggtcagccgtcattactctgtgtccctgtatatctaaagcagtgtaggtaaccatccctatggagcagggctggaaagagtcacaatctgtaagacttctgagcacagcccactcccctagctctttgtgaatcatttcgcagaaaagggaagtaacattgatccaccagttgttgcttacaagtctgcgggagaggaaaggccatcataggaaggaaagcaagctggaaacagcctgcctccacagagccagtgcttgcacaaagggtaccaggcttggagtagaggtgactcacccctggtgactctgaagccttcacaaagccacctagcggtgggcaaagagaagaacaaaatctttgcatgccagcggccacacatctggcttcccagtcagtgtcaaatctgtttagccgatgagtgatgtgaccaagcctgcatcctctcaccccagcagttgttcctgtatgtgatatcctctcgtggtccagagtttcctgtgtcagtagagaagggcatgggagagaccaggatggcaaggatgggcggagtcagtccaagccagactcctctcacagggctcccatgccggagctgaggctccagaccaggaacttttacttaagaggtgatgggcagatgtatctttaaaggtgagaatgtttgccagagcatatctctgagcagagccccgtgcagctgcatcccagcagaaaaacctggggcaggccctgtagtaaggcaccccttggactggccccacctgggagccagcccccttgttggtataattcccgggttttcactgacctgaggcctcagtcacgtgactgcaatgcatccaaagcgcccacgggcacacacccctcactccagtctcattgccagtcctgaagttctgccaagcacactggtaaaccctttagcagagcaggtggcttagccttaggtacggtggtgagatatgcaatcagcatttatctaacataaaaatgcccacttaaattctattaaagaaagaaaaactgtgagagcataggggcgggctgcctcagcgggagcacgtttaccatgcatgatcaaaccatggtttctgtcctgggaaggtcttttataaccattgaaaaacaaacaaacaaaatccaggcagtggtggcgcacacttttaatcccagcacttaggaggcacaggtaggtaaatctctgagtccgaagcccgtttgctctacagagtgagttccagaacaaccagggctatacagaaaaaccctgtgtccgggcagggggtggtggggagccacacactaaaaaggaaaacaataataccccatatcccatatcagatgcttcataaagtgaggggcatcggagcaggagtggtgggttttgcctgaaacagacgtgttacatcactttccctatagcatcaagtttggtcaggtgcccttgcagccttcagcctgcttagtgaggggttagccctgaagataagaacgggcatccttttaagaatcgtcttgtccaagctgggcatggcggtacacgcttgtgagcctgtgtatgtaacggcagaggccaattgagttatatgagaccttggctttaaaaaggaagtaaggaagaatgaaggaaggaatgaatgaatgcatgcatgagtgaatttcctggtccagcccgggagcttgttctcccacagttcaaagaacttggttcagtcatctctggtgagcagtgtggtatatttcacaacatggctgtggaatcagacctggactggaagctcagccctaccaccgactaactgcagacaaatcccttatcctgtgtgcctcagtttccccacttggaaaggccatgagcttataatgaacattacacagatgaatgcctggtacccagtggtcaccaaattagtgtcagcattaagtgtcactgcttacacacccatcgcagtgcagtgcccatccctagctgagtaggccagggatgcaggtgttggtctccatcaccaggtggcctactcgactagggatgcaggtgccggtctccatcaccaggaggagtaagagccagagcctgcctgggtcaaacttactgcctcggctgatcatcagcctctctgtatcatagctacctgtgtcgcagatggctgattgagagccaattctgctgttctggggacaacccgagagccttccttaaacggtaatgccagtctcggcggcaagctgtggacactggtttccagggtgtctggggtcttcagggtcagcagatggcctaggagatgtttataatcacctccacgggttggatcacatagtgcctgctggtcttaagccgtgtcaccgaaccttgacaaccaagactcatcagccatctaactactccttgttgactcctgggaaagaagtctccaggtggcacattgtgtgtgtgtgtgtgtgtgtctgtgtgtttgtgcgtgtgcgtgtgtgtgtgtcttcgcatgtgtgttggggtgggggtgtgggagagatagattgtccaaaggcaagagccagggagaactggacccgtgtttaggaaggtaacctatgcacagcccagccactgtgttcgttattgcctgctctctgttagctcgaaagaatactcagaggctggaacactcagaggctcaatgtttaagaccacttgttactcttgcagaggacccaggttcgattcccagcacccacatggtggctcacagccttctgtaactccagtgccaagggatctgacatcctcttctgatgtctgaaggctccaggcatgcacgtgatgcacagataaacaaaacactcatgcacataaaaaagaaaattgatagatcagggctggggagtggctcagtggtgaagagcattctctgttcttgcagaggacctgggttacacttccagcaccgacatggtggctcacaaccctatgtaactcctatcccaggggatctgatatcctcgcctggtttccttggtcatgtcagacacacagttaagtaaaacactggtaatgaaataaattaaaaaaaaaaaacaaaaaaacaaaaaggtaaatctgaaaacaaaacaaacaaagaagccggtcagtgagcccctggagaacgtgtaccttttgcaataggacagttaaggtttcagaggactccccaaagtggatggcaccaagagaggaagggctgctctccaagcagaccatgactggacaggaatccctgtgttcccttacctctggctttagcccctcttccaacagaggcagcgaggggcacgggtcctggatgacacacatgtgccttctttgccccccccccccccgccccctgcttggcagcacatgttgtcagggtcagtgggacccaggggtgtggcagaggagactgcagcccctgaatgggagaagcttaacctcagagtcaaagccattctctgtttcctgtccgcctcccccaccccaaacatggggggagggagcggaggatgtggctcgattagtctagcactgaagttcaaggtcattcttgctacgtagcgaatttgaggccagcctggactatagaaggctcaggaggaggagagagaaacagagcggggagggaaagaagtcagggcagagaggacccgtgggaattgacatagagcccttttgaggtctgtcttctcagagctgtgcgtctgaactaaattcctgcacatgctgccctgacagctgctggttctgagtcgctgctgaggtctggaggaagcactgaagagctgggcccggggctggaaatcctgtgccttagacacgctcagccgtaagctggagctgtgcagctgagtggtcatgcggccaggggagtgagaccgaggaagtcccctgaagtatgaaaggggccttcacaggaagtacccatggctctcgcgtgctgggcaggcactccgagctgaatcatactcccagtcctctttttatctttctattgtgagatagagcctcactcagtcgcccaggctggccttaaacacactatgtgacttaggtggacctttaacctcttcctctcctacctaggcctcctggtccccatccctcctagaagactgtttccctttgctaggaagaaggaaggtggatgtttttgttggaacttgcttctgtgtggaccctcctcacttacaaaatgtccatgctgtagttcaaggcagccgtcccacccttgtgctggttcctcccctccagcctcaacagaccaggcaggaccccagcaaggctcaggcgcctgcgtaaaccaggagatctaacgtgagccttgaggctgaatgtagctcagtggttccgtgcttggcaggcgtgcgtgaggtcctggatttacaccgtgaatcttgtgtggtgtgagagcccagcaaccctccagttagcccctaaggtcccatggtagaggtagcctgaagaaagtttctactagctcctgtgggtctgtctctgtccttcctgcagttagggaggctgctgtgcagaaacaaacagaaaggcctcttgcaatagtgtacttacatataataataaataaatctttaaaaaaaaaaaaaaaaaagcaaatgcttatgcttacagccactagagggggtggggtgggggggggtggagctgaccttttggctctcacagcctctgagctgtcataaaacgagctggcgtggcactaacagccatggaccttcattgtcttcatcacagagggacgtattcatcaccctgaatcttgtccagcacagccatcctaataacatagcctgggcgaggtcaggctgcattcgggcccctctcttgggacgtcagacacggtccctcccagcctgtctagacaatccgagggcacactgaagtggagggacagagaatttaagatgagtgcagaagtctccatggcctcnnnnnnnnnnnnnnnnnnnntggctctcgcgtgctgggcaggcactccgagctgaatcatactcccagtcctctttttatctttctattgtgagatagagcctcactcagtcgcccaggctggccttaaacacactatgtgacttaggtggacctttaacctcttcctctcctacctaggcctcctggtccccatccctcctagaagactgtttccctttgctaggaagaaggaaggtggatgtttttgttggaatttgcttctgtgtgaaccctcctcatttacaaaatgtccatgctgtagttcgaggcggctgtcccacccttgtgctggttcctcccctccagcctcaacagaccaggcaggaccccagcaaggctcaggcgcctgcgtaaaccaggagatctaaagtgagccttgaggctgaatgtagctcagtggttccgtgcttggcaggcgtgcgtgaggtcctggatttacaccgtgaatcttgtgtggtgtgagagcccagcaaccctccagttagcccctaaggtcccatggtagaggtagcctgaagaaagtttctactagctcctgtgggtctgtctctgtccttcctgcagttagggaggctgctgtgcagaagcaaacagaaaggcctcttgcaaatgcttacgcttacagccactagaggggggcgggggctgggggggtggagctgaccttttggctctcacagcctctgagctgtcataaaacgagctggcgtggcactaacagccatggaccttcattgtcttcatcacagagggacgtattcatcaccctgaatcttgtccagcacagccatcctaataacatagcctgggcgaggtcaggctgcattcgggcccctctcttgggacgtcagacacggtccctcccagcctgtctagacaatccgagggcacactgaagtggagggacagagaatttaagatgagtgcagaagtctccatggcctcccttcagatttgagcagtgctaagcagctgacagcgcatttcattaacgagaggctaatgagcacccggaagccagtggtgaatgcgttcagaattcaagtgccgagctttctgcagttttttcttatttttcctctatccttgtgtgttttgcggcatggcctcactctataaccctggctggcctggaccaggctggccttgaacatgcagtgtcccttgtctctgcccgccaatttctggcattccaggcatgcgccaccatgcccaaccagattcttaggtttacactttaagccacttctcccaggtctctgccacaccccccccgcccccaatacacacattacgatatgcacggtctttcctgggtcacctttgccatgcccagtagtcagagaggacaatataaatagaagactggtctatcttaactgagagtgtgagtccattggctgagttagttgaggcaggtctcagcattctttgagctatagtacacacctataaccccaacgctcaagaggactgaagattcaggccagcctgggctacatagtaagactctgcctccagggggcgggggggaagaactcacgaatgaatgagatgtgagcatgaataaacagagtaaagtcagcccagaagctctagccttcaccacacccgagagacagacacagcacggcctgcctgttgaagaccacagcctcaggagagtcggctgtttaagatactcagaactcgctggaagctgtcgtgctcaaggctaggccctgttgcagctggaaaaggatcattaatgtcgaacttgctagaacggaggcggggtggggttaagcgtacacagactgccgtagagacatcagtgcatgcctgggagaggtcaccagccaataagacagaatgcggcctcatttctttgtttctttgttttttaaacttttcccaatttttattaggtattttcttcatttacatttcaaatgctatcccaaaagtcccctatacccccacacacaccctgttcccccacccacccacccactcccaattcttgaccctggtgttcccctgtactggggcatataaagtttgcaagaccaaggggcctctcttcccaatgatggccgaacatatgcagctagagagacaagctctgggggtactggttagttcgtattgttccacctatagggttgcagaccccttcagctccttgggtactttctctagctcctcctttggagtcccagtgttccatcctatagatgactatgagcatccacttttgtatttgccaggcactggcatagccttacaagagacagctaacccagggtctgcataggtattgtacatgtgtgtctgtctttctgtcccattagtgggttccttcttgtcccttccctggctgggaaagggcagcctgaccttcctctcccttgctttgtttgggatctgctacctgcgaccgaccgtggctctgaaccttactgctatcattccttcactcaagctgggtgctttctttctctcagcagttctgagtcggagatggaggaggaggaagaggaagatgacgaagatgatcatctccccacctctgacctgggcggggttccctggaaggaggcagtcaggatccatgcccttctgaagggaaggagtgaagaggagctggaagcctccaagaacttcgagcccgaggaagaagaggaagaggaatacgaagaagaggatgaagagtatgaggaggaggaagaggaggaatccagtgaaggtcagaaccatctcctctggtcccgacccgtcgtacctcccctccccacttcagctcttgccagcgtgaatataataaggtctcacagacactagagtctgcatgctgccctcaagacctgaggttttctggccctcgttcaccccgaccttaggtagaatgcagtgtctggcaagctgaaccaaaaatgtcccttgtgtacattgggtcttttttttttaatttttattaatttttttaacttactcactttacatcctgcttactgctctcctcctggtcaccgccttccacacacacacacacacacacacacacacacactggtatttttaacctggaagtgaaaggcggggctcatctgaggactctgtccaaattaagttccttttactttttcattttatccttttccccttcagcttctgatagaactttactctagtaaagacagaggaggttggctccttccaggagtctccctggtgcacggtggcaggaggctgccatcttaagtgctcactagaccagcaccagccacaactgtcagtaacatttggggcctgaagaacgctcattgagtttccagccattctggccacttgtaaacctcctcttgccttgggcaagcgtctgactgagacctgaagacatgaggaacttggctgtgtaagaatatcactctttccctggctgcagagggcccatgggtaggaaggagggagccagggctggtagagatccggctccccgaggagagccatggccacttccaagggacatggagccaaagggggtacacacccttgttcttgcagccccacatcagagttccgggttaaattccagacagcatgggcacagagaactagctcactgtggcagcattgcttgtccctgggctctgtggatttgctgccatggactgtcccagtctgctcagggtcagaaccctttgtggtgttgacagcctccccagagtgcatcctctctcaccctcctgctctgactcctccaaaggccaaagtggactctaggcagactcactgagtttcatgagacaggaagagggaacgtgctggaaaggctggcgttggccagagcatggtttgtctgttgtgtcccgtctgcagaaccatgctggctcagagttcccatgtgttcacactcaccagggcgagtccgtccccttcagagctccctcggggaaacatagtttgtctgttccacgtgatggtacttagccgcttttagccctaacacaaccctgggagagtctgcccaccttcccttcttgaagacttcacttgccaatctgggaatttccccacacactcagccaagtcctagatgttcccttgtccccagcctgcagcacatatttggggctgcagacctggatgcctgtgtggacgagtggcaggacacacttgcatgcagcggggataactttgctctttcttttctttcttccctccgttcccttctctacctgtccctctgtgggattcttggtgctgtctgtgggtgtctggctccccctgctgtagaaggggagtactgcccctgggacagagaactcctacaaggccagtggctccagcatctctcaaaggaagaagaaatgggtacatgtgaaggtacccgctttgcctcctgcccatctccaccccggctccccagcagccacctaaaatatgcctccaagagcaggccccacgtggaaggtctttttcgtaaagctgttctcaaaggctctgggcatacctgggcacgtgtccctgacccggcctccctagacaaagcacagactagcatgtgagttagcagatccccagaagacagagaacaaggtttttagaatgtgaccacacctgtgtccctgtagctttcgctctgagttccctttatccagttaaacctcactgcctagctacagctcttcagtctcaccccagggtctctgtgctgccaatggttcccattcacaccacacacacacatatacacaccatgtacatacacagcacacatacaacacacatacacaaccacacaacacacacatatagcacacatacacacccacaccacatacatacacagcacacacacaacacacacatgacacacatacacataacacacacacaacataaacacatagcatatgtacacatacacagcacacacatatatactacacacacacaccacatacatacacagcacacatacaacataaacacacaccacacatacatacaccacacagagagacacacaccacacatacatactacacatacacacttcacaccatatacacaccacagatacacacaccccacaagtctgcaagtgttggcaaaaggcagagctgtgctcagagaaaagacggaactcttccttctgtggcttagaagccaaagaaaggaacagcctttctctctgagcctcaccctccgggctcctgacacatctgagctgtcagtccgtttgctgttattcagccctggacagcacaatctgggcagtctgtctttgaggatggactgtgaatccatattgatcagtaagagagtctgtggggccgccgctccacatcatggaacaggttaacctccacatcagagaattcactttgcttttgtgccagccacgccatgccacatcttcattaggttaagtcatagagctgccctggtagtgacaggtgagtctagttaagggcgtcaaggggaggacagacagacactcccagatgggagctggcttcagcctgaagccacagagtccttcaggtcagtggcacctgctcttactgccgaaatagctgccctttcttcctcagtgcccacacccacgctccgtagtcactggctgtcccgctatcttaaccctactgtgtggcatgacccaagcaagcactaatgagagggtccttcggggcaggggctgcatgtgacttccacctgctctggcagcaagggtgaatgcagggggcgctgctgggattttctatagctgagaggcagatctcatgcccagaggggtcagaagggcttcagatgcagcctgcaaggaaggaagggcttgacccacattagggaagaagctttggcctcactcctgcctgaatactggagttccagacttcacaggacagatctctgcttcgtcttctagctgctgtcctcaccctccacgctgaccacgttccctgtgtcagaacccccgccaccatgccagcatgcagcatgagctctctggccaaagggctttccctccccagcagcggctttgctgcagagggtaaaaatgaaagttccggcagagcacacatctgtcctggttagttggctggctcccggcagagccgtgcaccatccgagcctacctgtgactgacaggaagggtgttctcgggagctcgtgctgtgctaggtaacagccatatcctgggccctggagtgatggtcctataaggtgagggtcgtccaccctgttccgccctgggcagtgtgggcctcagatccatgagggaaaggaaaaattccttctgcatttggaggagtgtggatttcattgtactaagaaatgtttatgcaaagctcaaaattactaaatcaaacctaatcaacagaaggtgtgtgtacatgcatgtgtgtgcgggtgtgcatctgtgtgggtatgcatgtgtgtatgtgtgcgtgtgtgcttgcgtgtgtgtgcaaacatgcatgttctcaatttttacctctttcttattcacactggtcctggcaaacgctgtaactctttcgtttcctgtgctgtctcctccctctttcccttgactgttcgctgttccttcctgtcctccctctatcctccttcctggggacctggccccctagccgggaacaagaggctgcagcagatcataaccgcagcggatcccttggcgatccaggctgatgtgcactggacacacatccgtgagagagaggcagaggagaggatgctcccaacctctgagtcctccacttctagaggtaactgcttggagccccagagtcgggtgtgtgtcctgagcccccattcctggcccttcccatggctgcagcagccctgtctgcagagggaccactgtccttgcctgtcattcaagaatatgtaaagttccctgagttctgaggctctgtctctcatgaggaagaacaggagtgtgaacctgactcagaagacctagaatttgctgtcccctgcatttctcagctgggcactctttatccgtcttcagagtgtgttggcagagtgggtgttgcatgagtgcatgggaggacgagggaggggaatgtatttagaatcacagtcaggaggggcacacagcgtgcctggcagtcatcatctcatcatctcgtgggctacgtcaagtcctgggcagagtggcctgtgtttcccactaaggtgcacatggactttattctggctcccttcttatttgtttgtttaaaacagggtctcactgtgtagccctggctggcctagaacttgctatatagaccaagctggcctcagattcacaaagacctgcccttttctgcctactgagtactgggattaaaggtgtgcactgacatgcctggccttcttcgtcgtcttcttcttcttcttcttcttcttcttcttcttcttcttcttcttcttcttcttcttcttcttcttctttttttaataatttctgtctgtctttccttcttccttttttatgtttttagacaagctcactaagctagccaggctgaccttgaactcaagctctgcctccagagccatggacctaacagattacccgccataccctagctctggcttctcctaaggagtaacaataaaatgagagcaaagcccatttagaggtgtggtggtcatgtgtcattctccttgacccctgtcttctgtgtagggactcttggtggcatcaccttctctggctggggtgatgcctcccagggctctgcggctatagaagatcacttctggtcatggatgggaagacttggggttttgtgtggtgtcttattcctctaggacatcaaggtggcccgcaagatggggacaaggacaactcagcagccctagccagagctgccctctctcaagttctcttttctccttgtcccaaatacctgtcacagaggccaacattggaacacacgcgagagagcgtgcgcgcgcgcacacacacacacaccctgtgttagtaccacatggccatctgtgttatgatgtctctgtttctcttcctctgttttgaattttaggacagacttcagctgtccctgctgaggactttccaatgtataattttgtacttatcatctgttttaaattcagtgaccggccttccctccgtacgccgcgcagcagtgcaggcctggttggagactgtctccggaggtagtctggtgatatttgacaccccgagccccgttcatcataacctctttctctaggcagctctgctggtgccctaactctaggactcggctcctgtcgctggtgcatgcgagggcaaagccagtgggtggggtttctgcatgctttgtcagacagcccatctgtgcatggaccagaagtgcatcctccatcctcaggcagcctggacaccaacagcggagataggacggagtcccacctcttaaaaattatcattagccgttggttgtgaaacccacggtgaaaggaagctttttatggtgaagatttaaacctatagaaatgaagttgggtaggggtggatgcggggtgaaatcagatgtcgcgttccacaaacctaccagtgtatcagaggagcagtcaaaactaagaaaggcagtgaggagcgctgggcattgctaagctgtacaagatatggcagcaaacctgggtccccagactaagctacacaggccaaaggcagcctgacaaagacttagttgcccttactagttttagtagaaacctttttctcaaggagagatgcttggcacttggtaaaggacagtccttcccactacaggatgtctcgtcctcggcttctgcgctaagtgctgaacggtctccatctaatcccgcacacccccacaaaggagacagcatccaccctggttggaaactggtgtcctggcagtgacttctgggaccagtaggggtaacactgtgggtctttaccacctccacctcccaccccccaaccccccgttgtccaccagcagctgaaagcagacatgtgtggtgggagagggttcagtctagtccggctaacgctgagttatcatcacccttcgagctagaggaaggaggaaggaggttgaggaagaaggatgtcctagcaggcagctatagtaaaccatgactcccagcttccgtagcgtgtggctgctcctcacttatgtggccgcttccagcgcagcgctccatcttaacaagagttccatcgctctagctgtgtctccgcacacatccgctaccgctgcacagtagctctcaagtgtttgcttcttgatatgtgtgatcatcgttcctttccaggtattcccaggagcatagaaacaccccccccccccttccaactctacgtcagatgtttcttagtaggaaaactgtgggaaggaacaagagaccaggaccaggctgaaccagcctggggaactgaggagtggtctccattgtactgtttccaactttcttgccagagagaatgtggttgccacctcgatggcacaagggccctccagaatgggcccggaatctgtttccagcagtctcttattctcctacatggcagagtgtacaaggatgaactcaccaccaaagtacaaagcttagtcttaaagctggccccagggatgttgttcggtgggtgtttgtgtccccagagtcacagtcacacattccctggtgattgtctcccatgagtgtcccaggaagatcactggaaggttttagacctgtggggatacttgagtttctctcccttgtctgtcttagcaaatgccatcagcataggagagtgccttggcactgccaactccctggatggcactggtatttcagaaagagcaggtggtgaggttcaggagcccggaactttatctggagtgcagctgctccttcctaaaccctgggctgtctgtagttttccaatcttgtttgccatagctctccagtttcagctttgagaaagttcatctgggcatggtggcacacgcctctcttcagaagacagaggcagtaggatctctgagttcaaggccagcccggtctacacacagcaagttcccagccagccagagctacatagtgagaccgtctttaaaagacatagatagatagatagatagatagatagatagatagatagatagatagatagatagaagaagacagacagacagacagacagacagacagacagatagatagatagatagatagatagatagatagatagataatttgaactatcatcatctaatgaattgtggtaaaagtaactgtataaaaaatgtacagtgtagggaattaaagaaaccaaactcacagaattgcctcctcctacgccaagaaatacagcgttcccagaatcttcaaggtgctgcttcctagtcacagtcccccacccccccacccctgcccctcgcatcaacccccttagggagcctctttttctagttttgagctcagtggcctgtgctgacttggcccctcccactctcagctcagagttgataccctgatctgtggaactgaaagctatcaccctcaggctgacagcatcctaggcaaagcctctgtccttcctgctctgctaacacagcctaggaccaggtgggggacaaactaaggggctgtctgtcagggcagatgaaatgggaagagagccttgctttgttttgcagccccaaagagcaattcttgagcccagaaagggaattgtttgttggttttggctttttttgaggcaaggtttctctgcgtacccctggctatcattgaacttacttttgtagaccaggctggcctcgaactcaagacccacctgcctctccctcttctgtgttggaattaaagacgtgtgccagcccacctggcagaaagggaacttttcataccccctcaggttcaccctcctgctttaataaactcctctaagctgtctccagaaaagcatcggcctccacatgtgccgatgcaggctaacagcagagtcacttgaccctcaggcctgctctttgtcacccaaaagtggacatgaggaacatggccctttggctacctcaaaatgagggactacctcattgcacattagtggccagcactgggcctactgtgtaggcaccgttagaggtgacggtgatggcctcacagcatcccttgactatgcctgacttgaggatctcacagcagcagcctctggtgaaacagtgatgcctccaggccagaagcccctctcctgcttctacttggccccctagagtggactcatgactgtggcacccacactgcttatagagtgcactccatgttatccgggggcctcttttctccccgtggcctatgcattactatcttcttgtgccctgcataggcatctgtctgtctgtccctttcctcttgtccttgaatgtctctgctttacagctcctctagatgaggatgacctagaagaggacgcggactctgagccagcagagactgaaggggaagccgcggaggatggggaccctggagacaccggtgctgaactggatggtatggggcccagccttccttctccgcctctgtggtggacaggaccagagtgggtgggactcacaaaagataccttacagcaaaagtttagggagaaggcgctgtggggagggggagactctgagactagtgaaagaaagggaagataagtccgcagatacatcccccccaccaagggttttttgattttgtttttctgttgcagcctgctatgtcacagtcactgcgtgtaaaaagcagacaggtggggtggggaggatgcgcagtatagtgtctgctgcacaagcagggctgcctgagttcagctgcctgacccccttgtaaaagccaggcctggaggagggtggagacagggtgacctcaggggctcacaggccagccagtcaagctgaaaggccagctccaggttcagtgcgacttaagtgaagagcaattcgaagtgtctgcctctggctgtcacacatatgaggacacacatcatacacacatgcatcatacacaccccaaacacaacaaacaggtgaagacacacatacacacacacatatcatacacattccaaacacacaacaaacaggtaaggacatacataccatacacacacaccatacacacacacacaccaaacagataagcacacacaccatacacatacacatcatacctatatatacatcatatttaccccaaacacacaaacaaaacagatgaggacacacacagacagacacacaccacataaccatacaacacataccatacaccacccccacacacattccatgcacacaacaacaacaacaaaaaaaaagcaccacaggtttctgcaaacttcatactaagatgctttgtgttgaatctggcctggtaagaggcttggtttgcagggactgctgagcctagtttagacctcgtgccacagtgagtcgccccatgaagcacctctctaaggaagcaagacacagaaaaggagcgcatccagagctcagatgtgtaacgctttgcctcttgcttgccttcatcctccagatcagcactggtctgacgacatcccttctgatgctgaagcggagcatcgcttacagagccaggccaaggtgaaagcagagctggagctgagagtatcggaaaacgaggaagagaagccatctgatgcgccaaagcaagaggagagaggtggggggcaggaggaatgacttccagagtaccagggaccacaggggcatgcttgtaataccaggggaggccttcagaatagagcccatggtgcccagcagtagccccacccgtccctgtccttgtccttgcctgtctagggccacagatctctacaaacagcctcagacagtagtacctctccttgggttgttgaggatcgtggggacaccaaaagcacttcacagagcttgagacccaaatcatagctgccacgcatagcgaccagggtgccactgcaggtgtacccagggatgggcagtcaacttgacttttgttctagaacagtctaagggcagacccagaaacacagtgcacgttagcctatctgagtacctgctctgctgcctccacaagggactggctggagtgtgagaccgtccatggagctggctgggccctactcctagtctatgtagagtgaaagggacctcattcctattataaagccctgtgtccctccttccaggtacttcccaagtctccagccctagccagccacctgagaaacaagttggtgtgttctccccagctcgcagccctgggacagaggtgagtaggacgggggtggggagatgtcattgggaccttaggaccttgaagaaactccatcttaggacccatgatgtaagctccgatacagccctctcgccagctcattttgtgaaattctaaaaacgtcgtatcttgtgctaggcaaggccactgagggggtgtgggctccagctgctgccttggtccttgtgggtgggcaagtttatttttaagttaatgcaatgatatttatgtatctgtaggtttataagaggtatatttttttctctggcaaaacaaatatgtaactacttaaatgaaaagcatacccccaagttcccagcagtgtgtgacactttagagaatgatccatttcaggctaacgtctgaggtccttaatctgggaagtactgtgtgcaggggaaaccaggacagagtccaaacccaggccttggtctctgaggctccaggaaacagggcacagtccaagagttaagctgagaaccagggtgggtgttctcagtgtctgtggacatcgccgtgattgctcagagggacagtgtgactggagagcagactgcactaagcagtggctttaagtcctctcatagcattagccccatgttagtgccccagggaactccagggctctagtgattgtgggttaggatgaaagccacattcatgagtgcccttggccagtattcatgtgagtagaccaagaagcaaggatgtgtgtgagatgaaccaaccctgaacgctcaagctgttcaagctaagcagagagatttttaaaaagttaacaagtagagcagaaaatgaggaagcatctcctgtagctctgaatgacagccaaaggatggagaggattttatttcaataaatgccggccctttgagaaagtccaggcgggaaggcgctggcttctcaaaccctcatcactgagcctctgttatcttctttctgtgcaggaggccaaatccccacttgccaccaaggtaaagtcccccgaggagccacttttccccacgcctctgctcctcagagaaaagcccaaagctgaagtccctgaagaacagaaagctgtactctcgcccatccggtcacagcctgtggccctgccagaagccagatcacctacctcacccaccagcttacagccagagtctctgttggcccctcccactcctcccacacctccccccacccaactccccatctgttcccaacctcagccctcctcggatgcctccatcccatcgcccaccaagtcccccatacgcttccagccagttccagccaaaacatccacacccctcaccccactccccgtgaagagccaaggagaccccaaagacagactgagtggccccctggctgtggaggaggtcttaaagcggagtgatctggtggaagaattctggatgaagagtgctgagatccgccgcagcctgggccttactcccgtggaccggagcaaggggtcagagcccagcctcccctcccctgcctcgaagccaatatccctaaagtcctactcagttgacaagtcacctcaggatgagggtctctgccttctgaaacctccatcggttcctaaaaggttgggcctaccaaagtcagccggtgaccagcccccactgctgaccccaaagtcgccctccgacaaggagctgaggagcagccaggaggagcgaagggacctgtccagcagctcaggcctgggcctccatgatagctcctccaacatgaagaccttgggcagccagagcttcaacacctcggactccaccatgctcaccccaccttccagcccacccccacccccaccccccaacgaggagcctgcaacccttcgaaggaaaccccatcagacttttgagcgcagggaggcctcaattatcccccctcccacccctgcctcattcatgcggcccccacgggagccggcccagccccccagggaggaggttcggaagtccttcgtggagagtgtggatgagatcccctttgccgacgatgtggaggacacttacgatgataagacggaggactccagtctgcaggagaagttcttcacacccccttcctgctggtcccgctcggagaagctccaggccaaggagaacgggcgactcccacccctggagcaggacgtgccaccacagaaaagggggctgcccctggtctccgcggaagccaaggagctggccgaggagcgcatgcgcgcccgggagaagtctgtgaagagccaggcactgcgagatgccatggccaaacagctgagccggatgcaggccatggagatggtgtcctccaggtcccacacggcacaatcgcagggcaaggaactaggatccgagtccaccagacacccaagcctccgaggcacccaggagcccaccctgaagcatgaagccaccagcgaagagatcctctcccctccgtcagactcaggaggccccgatggctccgtcacctcatctgagggctccagtggaaagagcaaaaagaggtcgtcgctcttctccccccgcaggaataagaaagagaagaaaaccaaaggggaagcccggccccccgagaaacccagcccaggcctcccagaagatgtggtagccaagcccaagtccctgtggaaatctgtcttctctgggtacaagaaggacaagaagaaaaagagcgacgagaaatcgtgttccagcacgccgtccagtggcgccacggtggactccggccagcgcagggcgtctccaatggtgagagcaggtaaggatggccaaaggatgctcacaggacggttgtgaggagtgcctccctggacagtcagctcacaaagatccactttcctgggctgctcccacaggggttcttaggagagggaacaagccacacccaactcagcctgatccactgcatgaaccgaggcagataccaacttgggacccagtagggtggactcccgttggtaatcctctcagagtcgcatgtccccatacatgagcctgattttgagtggagcagagagtcctgccaaggggtcttgagcaggtgtctagggtgtcatttatttggtgttaggcccatcacctttggggataatctcctatttccttaagaggatcttttagagacccacccgtggctgacttcctgcaatatgggttcatggggttacaggctgccatcttcacctggatttccttcacccaacagagctgcagctccgccgccagctgagtttctcagaggactcagacctgtccagtgatgacatccttgagaggtcttcccagaagtccaagcgagaggtgggtgggcccagtccccttcagagagagggtggggaagcatccattcattctctggtaggatagcaggctgtgaatggcagtctgaagccagggtgaggagccagtgctctctctggtctcatagcaggcagactttggagtgctgtgccagcccacagtcaacagcaaaaaccacagagaggtttctctggcctttgaaatcagcagctgggggtattgcctcggtctgaagaagccagggtacactgtcagttagcagccttccctgaacgtttacaccatgagcagagtctgtcagggccaatgggagaagagctgagtactacttggagtactacttgagtcatgcaagtatggacacggcactaggcatggagggggtaggccaggtggctccatcaggggaaggcctggtgatgctcactctctggcaatttgttaagtagaactttgtttaagaattgaccctgaagcagcattaatcagaagttttgtgtatgggttatccactggggcatgggcagtctctcagggaccaaccccctcatgtacctttttgacatggcttctcaaggcttggccttaagtcaccccctcggccaacagcctcgaactgtaaaccaaccagggcaggctgtggtagttctgcacctaatatgtgtgtgtttcactgagatggtgtcttcctgttacagccccatcctccagcctgactcggttcctcttttaactcaacagactagaaaaaattagttcattcttatcttgttctccattcatctgtctcgtctccctgggcataatgatagctctttatctgctgtcctagtcaccaagaaccacagacctctcgtcttccatcgcctgcacccaggcctcgtttgttgcatcaggactccaagtgtaggactgggactgtgtgctctttatggggactcagtgcactgtgttgctactgggtgtgcctgctgaggtcttccaggcagtgagtgacattggcacaaaggtggggtgtgtgcatgcacatgaggttcaaagcccatccctatactgggctcaggtactgtcttaggaagcctgaaggagcccgagtaaaggatcgtgtggcccaaagtcccctttgcttccatggtgagtgtgctcatgtgaagacagtttgtgtcagtcacagtggtcaaatcttctatctctgtgtgcctttgtggtcaggtcacactgcttctccatgaggtaatgaatcatcttaccacagtggggagtgccagatgctcccagttggctatgcaggatccatcatgctggtataaccacccagtgaccatagccaggaagagcagaggaacttatttcctagcagtgtgaacaagccagtcacagattcctagaacagcaagggcctggacgccttatgtactgggtgtattccacggggacaggatcattccttggtggtcacatagggaatgctgaggaccagaggcagtggcaaacatgcctcttaggatggcgttgtatctcactgaacgagggcaggacagggtattaaaatatggaacctactgggtgtggtgactccatgcgaccctaacagtctggaggcagaggcaggattgcacaagttcagggccagcctgggctacctagtgagttctggggatatatacaagcaagatcctgtctcaagaaaacaaaaggagggagaggggagcaaacatggaacctcagtgggggacaggccaagacaatgcatccacaaaactgtagagaatggtttgcaacctctgtgacatctagtggtgaatgcaagcacaatacgtattttttaaatgccatcgtcaaatggatgtcaggttgctagtaggtgacactcctgtgactattgggaagatgtgtctctcctgtggaggaggaaatccatgctggagcttctagagactgggtctctgacctctaaacaactcagtgaaagaaggtgctatgtaaagactgtgccctcaggctcacatggtactgtaccatctggaagtcgaggtaaagggtgttctggcaccactggcttcatccttcagtgttgctgggtttgaaacccctcaaaattagaagaatcaggagcaaggggcccacatttgccactgccctggtcctgcttgtcttcagcattccctgtgaccacaaggagtcatcttgtccctgtggagtccacctgtcacataagatctccacgggcttgctgttttaggaatctgggctttagcttgcctggagaaggaagcctctggccacagtgtggtataggaggaagccaggcttcttcctgtttcacagacccaaggcctgagtcagcacttgagaaaacaagtgcctgggtttagtttccatagcgacacgtgcacaatgaaaaccaaaaccttgattttactcaaatgtttattatacaaaatcaaattatttaggggttatatgtttctattcatgtgtgtgcaagcacatgcatttaacatgcatgtgagaagctaaaagaacaaccttgagtgtcactcctcatgtgtctgtctacttgtttgtatgtatgtatgtatgtatgtatgtatgtatgtatgtatgtatgtatgataaagagttcaccatgtaggctagactggctgtctggacagcaaatcttgggggtcaggatccacctgtttccacctcctccctagctgtaagattacaggcacaccccaccaagcctggctttttatacggggtttatagctcactctcaagtcttcatgcttgcaaaacatgtattttacgaacaggcttatctctccagcccaatctaggttttcctagccatctaaagccctgacaacaagaagtaacttccttttgcttccatctggttcttatgagcagcctgcccaactactccttcaccactgaggcccactagggtctgtcctgccctctacgagcccccttatcctgcttggtagccctgacacagttccattgccagcgagccatgctcttgaccctactttcccaggtgacccagagtgtgtcatgcttgtcttccctgtcactgccactgccaggttggcaccagtcgcagcagggagtgcattaataaggggctgctgtggatcccttgcagacaggtgtcggcatggctcttgaagtgtgtcagtgtaggaccctggggaccacatctgtactttacctttttaaactggcccgttctgcatgacgacttaactcacagtcggctatgcaggggagaggaactgagcaggcatgatgcccgtgctcagagctaaaagcagcaagtgtgtgcccagccagcatgcatgtggtatcctgtgcaggtcccccaatgtgccacccttagcgtcctcctgtcctgggtgccaccagattccgattgcctgcatccacagggacctttaggcactttatgtgacccatgagaagaccacaaaagcaaaggaaaccggccaaggctttgagcaactctggtcagtgtgtgaactggagaggtttcaatggttgcccaaacactggtacttcctctaaaaaaccgtgatttgtgctggtttggttcccttcactgggtctagttctgaaaaagcaggtttgcccagtgtcaggacatgtcttccattccatgctaagtgttcagtggcaggaacagagaggaaggaaggggctgccgtggctgaggagggccaagtcaccacacatttcgacaaactgggatccaacaaggaacagacacaaggggctccagggtctgctgttctgcgaatagaaaagtcaaccccaactctgacagtggagttcactgagactcatcgtccagggtcccttcttgtgtagtcttgtgtggcattgtgggacacgatcatgtgattgtctggtgtttgttttaaacctctaactgattttgttccatttctgttttcatttttttaatcatcattatcattactgttctgttttgttttccgttgccaatccccttaaaagtcgatttatgtaccacacgccttggcattcaggagagcctgttcatcaaaggtagtgtctcattcccactggctggccctccttgcatgcctgtctgtgattaaccacttggacagccctgctgggcctgcagccgcgtcctcactaactgtcatacgtgcatgcagctgtcacagtagaaccttctttagttgtgtcacagaaagaggaggagacagtcactcttccattggccggagcgcatgtcatcatgggtgagggcagagctgcccttgtgggtctgggtagcccagcaaggaatagtcaccagcccccaccattagggcactgggacaccggaacaatcctagagaccaccttctgcttgttcacctgaccttggatcatttgagctcctttaggaaactcgtgtttctcagtggctgcccagtgtctgtccagtcactgaatgcttgggaatgtatcagtggcctatgtgtacaggtggctgggacatctaccagtgcttccaccaagctcacaggtgccacctcaactaccccaccatgtcactttgacccttcttctccatggcaaccattgcctctgctgacgctggcagtcagcaccactgattgtttctcagcctgcattagactggattcattgagatttacaatggaggcacccatggcttttctcctctagatggtagctactaaagtctttatgaaccccattcacctgaagaaagggatcccaaacacggggaggggagagaccccctcactttccaaaccttttttcccctgtatcttagaaataagaggcctagagaaacgtgttactgagttgtatttttttacaatcaccacagcaccttaagaaaatcacaggaatgcgtatatggccacgatggtctcaatgccgaaggagtttctgcatgtctgtggtttcatctcccaacatgcagcctccattaagcctcttattgctgccacagaggtaaaatgcctcacattggggtctgtgtgacacagctgtaccctgtggtatttaagacttcagcagggacaattatggtgaagtctgtggcccagcctcacctaccatgcccagctggctaccaggcagtgattccctgagaccatgccaactcaccacctaaaccagcttccacctgcgtgcggtgggctcaggtgctctctcaccctctctagcccagaacctacacagaggaggagctgagtgccaagctgacgaggcgtgtgcagaaggcggctcggagacaggctaagcaggaggaactgaagcggctgcaccgagcccaggtatgtgctgaccgtgggacaccatgatgcgcaagtggaaatgggatagcatcaccctgtacccccagagggcctcacagcacggaaggtgaagaggccagggcagaagcagatagggcgttcttgtcttccaagatgacaaactcaaagtgcttcagcgtcatgcactacagaggcccagtctttgaggcactgtctatagaaaagaaggtccatgccttgagtttcctggaagcctgggtctagcgtagatgttgagtcagcaagttcacctgtaaccacagtgtcaggagtccagtttgtggcctcaggctcagatctgaacggtctgggattttattggaaaagctcagaagtacccttggtcgtcagtctccatccttaggcctcatcctagaccagtgattctcagcctgtgggtcgaagccccttttggggggggggggtgaatgactctttcacaggggttatacctcatctctcatatcagatatttacattatgattcataacagtagcaaaattacaattatgaagcagcaacaaagataattttatggttaggggtcactacaacatgagggtgttcttagcttctaagatgacatcctcaaagtgcctttaataactgttaaagggtcacattgggaaggttgaggaccactgtcctagactgttctagacacttcttttccaacttattgagacaggacttccaattactccacccagtgctttatagtctccttatgatacaggcttaatgaaatcattttggaatacttttgaatgattccaggggaaaacagcaagccctgggatccagctgcatgcagctggcacaccatgctgaccataacgtccctttgaacagcttgccaacatttatttagctctctccctctctgggtctgcagcttgattccccggaagctggagacgagaacagcccagaagcttatactcttgtttcttggtagatcatccagcggcaactggagcaagtggaagagaaacagaggcagctggaggagaggggcgttgcagtagagaaggctcttcgaggagaagcaggtaccgtctggcttcctccctgacgaggcttgttctcaaggagagagtctaccttccttactgtggcgagccagtttggcgtcacctcttctggaatttggctccttctccctccaggttttctgagtcgatggcaccctccaggtccagcgcttacctatgttcaggcagcccagacaacctaggcctgctccccagcccgtccctcagcttgctgttgccaggaggaacgaaaccccgggccctgtcacctgttggtggcgagccctgggcttcctcttcctctccctgttcctcctcctcctccctccccaccgttttctcttgaagaagatgtctgtgagtaagggagattgtcccacaaggaaccatcacagaacctcactggacaggccttagcctgctctcccgagtgcttctcctgtcctcaattccctgggctccctctagcccaagctacacagccacagagcctgcctcctctctcatgaggggcttctggctgcccatgcactcagatttccaccggtgagccccggcttgtgtccaccgaaggccatgtcacgaagagcagtattggagaggctctggcttttgatcagctattgtaaaataggcatgggagctgggcgtggtggcacgcctttaatcccagcacttgggaggcagaggcaggcggatttctgagttcgaggccagcctggtctacagggctacacagagaaaccctgtctcgaaaaaccaaaaataaaaaataaaataaattaaaaaataaaataaaataggcatgggacactcttacaagggctatgtggttgggacatgctagacttgacactggtgggtacagagaagacaaagaggtgtctgaactatctctgggcccatggtcagcccagcctcaggcatggaatgattgacctctgctaacacaagatgcagggcctggacggggagcctctcatcttcataggtggccagtggtctaagggctcagcgtccataacgtaaggcaaggaaaaagataagtcagagcctcttgtgatttccttccagaaacaggaaataagctggaaggaagaacacttcccggcaggcaagctatcaagcaaatagttcagacagggccagctgccgcctcgtgggctttctgaatactggccactggtctagccagtttaggagtccaggcaggcacagaagcaaatctttattcaggtcctttaagtctcagaaatggtgctcattggtgggctcggtgctagtcctcgggcaaagatgtgtcagagagatgaggatgtggatgtttgggggtggtgcttcacctgatgcgggttgtgatgctgtgaaacccaggctaccaaaggggatacaaaagcttaagccactttgtatccagtgagttgagaagaccggaaccactggtccaaggaacactggctctcatgccaagcagtgaagaggagattcacccacacattttcttggctttccaatgcaccaccatactaatggtgtctccagccgcccgaaggcctctcgctgttcctcttcctctgactgatctcctccgtgcagcccatactggatggggttaatcctccctccagagagccctggctacagagctggaaagccctgtcctctctaccactctcttcatgtaccaagtgccagcaggagacttggagcaagcctctcacctttctccagattccttcagctgaggggcagctctatcccacatcagtagttggcattactatctaggatcctggttcatagagtttcccaaggatgctctgtcctggagctctgcttggaggctcaaaggataaccatttgattgatggtttctgcaaagtgcttaaggttctcgcagctgaagtctgtttctgcatttatgtaaaaggcatgtcactccggctgctaccggtgagccagaaaatgatgccattaaaaattgacagagcagccagagagatggctcaacagttaagatcgcatactgctctctcagaggaccagagttcagtttccagcactcacatcaggcggctcacagcagtctgtaactccagctctaggggagggagctgtctcctgtttctgaacctcacagatgtcagtgtcacgtgtatactcacgcacacgcacacaatctgaatttatcctaactcagttggcaggagagcccattggatacaaattgttagttgaggcctaaaatccaaaagaattattctaaattgtggttgttgggatttgttgattggttggtttgtttttgttttttaatgcacacatgaaagtgcttgcttagtgagagcttcagatattcggaaacctgagcgccatgcttagggtgtcccagagggcgcatgtgtttgctcttagtgggagcctttagcagctcacagggacatctcaacacctgcaaatatggccaatgcaggcgctcacaaataagagcagctgactcaccgacagtcattcatattctttctaaaacaaagaacaaagataggggctagagagatggctcagcagtgaagagggcttggtggctgtgcaggggacctgggtcttattccaagcacccacatgactgttcactgccatctgtaacttcagttccatgggatccaatgtcctccacagacaccagacatgtgtgcatgtagacaaaacactcatacacataaaataaaaagaaatctttaagaaaatgataaacaagaagctcacaaacataaagaggaacgccaggtatgctatactgtgctggcgtgataccttagccacttggaaacaccagcagtgcgctctgaagccagcagctcttaagccttatagggaccctactccaggatccccacacagtggcacctgatccctgtcacagccatcaggacttgaattaactcacttcttatcaatgtatgtatgacaagttgcaaattcttgtacatgaagcagaagaaacttggaccacacagctcccccaaaggcaggtttagctgtaggttttcagtgggcatgtgcagtacttgaccaagctgtgcattaagtcttcaaaagttaaaactggctgtgggccagctatctgggagtccccccgggagcccctcttgaagagccctaggattcaacagaagtttgaaagccatgttctagtccaactcctgactataggcagatctttgcaaaccctcctggaccagaaggtgaggctgcgtctacgggtgcaccttagaggctcttggaacatctccctatgatgcgtttgtatttccaaaaaaactcttctcctgttcttatacttaaccctccacgcccagcactggtcagttttcggtgaccttgtccccgacagagaccatcttggagactgagtctggtggcagcagctttctcgctgtttctcattccattccacttagcagtctcactgactgagcaaggaacacggcagcttctagctacacgactgggctgtctccctgagctgtgccaagctggccagaacctgccattctggctcatgtggtcacttcaagactccattgctgtcaaaggggtcatgctttgttagccaagatgcccttccagagaagagatctggtctggagttgctgtcaggttacctgtatgtgtcaaagacttttatatacccaggccgcacggattgggctccagggcaaggctaagacttgtgggattcttatcctggaaatggaggggagcttctctgtttctctgactcaagcctagaaccactggactggcctcagacacgagctgggaagccaccaagggcactcagctctctgacatcccatccttaaaagagaaagatgtggttgccaggatcagcatccagactgtgaggcacagagaatgccagatgttttgttgttctctgggccctaaaaactgccggctcaagacccactgccaccaggcaccttaagctgctggacagctcctggagcagagaaacaaggaaggcctgtggccgcagccccagatcatagagggtaggaaatgtgccagtgtcccagctcatgtttcttaccttgaaagaaacggttctctgaagatgggacacctaaaccccagaagacatgggagcctcgtctgcagccagcccagcgcagtggtttctgtggaaagcacgggcaccgctaatggcgtcacttgcaagttccttggtttcctgagctttctgttttcctgtctttaccacacagtgttcgcatcttgaaagccttagctcagaacctctaatattcagaaagtaagtcagagagaggcctctgttctagccttagactttcttagagcttcgggagggtaccttccagcagggttggtgttcccagccgcgccaagccccatcctccccgagcggaggtcggagcaggaatctccctaatgttgtctggcgactccatctgtagtggtgtttggtgccccgcacccccctgcacccccttcataccacgagctgcagagctggcctgtgtgtgtgcatggcatgcttttcagacatgcacgcgttccagctgctccactgggctctctcacaatattcctgtctgttttatctgttatgcccttgatagcttttgggtcggggtggcagcagggtcatccgatccaataactctgtcttcaccaattccttgttgtagactattggggagaatcttattacagtggcctcatcgacttgcacctgggtggtatgtatagcgtcatccactgctggcactaaccccgagacgcccttccctcttgtcctccatcccagtccctgctcacagcagtgaggaggaaccaacctgataaccaaacagcaaagcataaacccttttccaggttcagtgtcagagctcttaccttgtgtgcgccgaagccctgggtttcatccccagcatagccaatggcaaacagctgtcgggtcctttgctccacatgtccctcggaggacaattaagatagctcttgctgcttgaggttcttctaacattttattaaaaaaaaaacaaacaaacaaaacctccagccctgccctacacagcctgcatctgtgggcttcgctgttgggccgtggttcactcacactcaaggctccagtggagactgtcatcccgaatctctgccttaccatgtgtaggtgtcacatccactaggatgcccaccttcagctgttttcattacaggtatgtcaggtattccctagagatgagaaaggctctctctactgttgctgcctctgctcagacacacaagattcagcacttagctgagtctataaggcccctacttcactgggccctggcactcagtccacattgatccattggggcttattaaacatgcaggttctcagaccgcagcccagacagagaggcctgggtatgtgttcttacaaactccccagctggtcctgacccctctaaagcaggagcaccctggtcccgaggggctgagtacttgccgccttcccatacaaagcccagcagagaaatggcccacctggagacgcgcacctagactttgagctgttgtctcctggaaggctgccatgttgcccaatgagtgagtgtccagccactggctgtcagggatagatagcacccaccgggcactctgatctcttcacccgcccttggagtttccaagtcttccaaagacagaagtgcagggcagtataaagtttcttcctcttcctcacccttgcccaggagagagacacgcttcctgacccgttcatttaaaagccatagtctggagccagcaagatggcttatcagatgtaggtgtttgcttccacaccaaacaaccagagtacaattcccaagacccgtagtgcaaaagaactagctcccacaagtggtcccctggtctccatacacttgctgtgatacacacatcctccattgatacacataaacacagtttgtgtgtatatatgttaaagtcaaccaagctatgtatgctggcacatacctttaatcccagtactcaggaggcagaggcagatagagctctataagttaaaagccagccttgtctacatagtgaattctgggccagccatagctatacagtgagaacctgtgtgcagtaggtcatgcctgcaatcttagcactggggagcctaaggagagacttgacatgagtttgaagccaggcttggctagtatgagagtgtctcaaaaaaaaaaaatctccaaaacaagaatatatagaactaagagatgactcagtaagcctgatcagtgcctatcatacaagcataaggacttgagttcgattcctctgtacccacgtcaaaaaaacaaaacaaaacaaatccaggtatggtgacatgcgttagtaagtctagagctggggaagtagaaacaggggagggttcctgtagctcgctgtccagctagtcttgctgagctgtgggttccataagagaccctgtctcagaaaatcaggtggtgggctggtggttcggtggccctccagttaaaggtacttgctgctgagcctaaggacctgagttaaatttttagaatccacgtggtggaaagaggggtccagctcctgcggggtgtccacgtgtgcaggggcctgttcatgtcaccctcacaatcggtacataagtaagtaaataaataaaatgtaatatgataataataataataataataataataataaatagtggactgcagggatggttgaatgcttcagagcacttacagctcttcccaaaggaccagagttcagcatccgtgttcccagcatccatgtaaggcagctcacgaccccctgtagctgcagctccagggaacctgacgttcttccagcctttgtgggtacctgtacacatacaggcacacagacaaataagtaaaagtaaataaaattttaaaaagaagactgaatgtagtagttgaaaagcatttaaatggtgtggtgatcaaggaaaacagctcgagtcaaacccctgcctctacacgccaggtacatgtatacacacatatgcagacatgagtaaaatgaaccctaagccaggcccatgggtatggctcgatggtggagcacttgcccagcacacatgaggttctgggctccaccccttataccacccacacacacacacacacacacacacacacacacacacacacacacacacacaatctgattcccatgaggtcagtaccatatccatagaaacgtcactgatcagaagtaggacccttgtcaagccccttgagtaggcggcatgagtcagctctgctctcttacatcccagtcttaaactccaggaatccacttggccacaggcccctgtcggtgtccccagcttctggaatgctggggggctcccactcatggccattgatgctgaaaaagggcagatgcttgcacccggttaacagacccctgtctcgtctaataccctgtctcacctcctcccctcctcctcacggttccctaaagaatgtttatgtccattccgaggtcgtctctgtatgtcaagagataatctacattcggggcgttgtggagggagtggtccaaacccacttcttgccacataacccccacccctcccgcttgaggtactggcttttgcagcatagactgtctctgtgtatgtcttgaatgttgtctttaaccgactgctcaggtaagcaaatgcagtgagctgttttctgtggccccagacaccaaattctaaccttggctttggtgtcccacagcctcatagttccccaatgtctacctgatttttccatggcacggacatgagttctgctcacatgtaggagacaggaagaaagatgtacttctttctgatggtaggcacttgtgtactccaagaaagagcaaggccctcctctctgcacacctgaaaggaagacacagagcactgatgaccctgttcggagtctgctggtgttttcccttcaggcacttatgctaatatccattatttaaggaacagtctccctgctgaaatctgcatcttgaagtagagaagctgctggccctccatgcctgcttccctaaaaggccacgttgtggaccaatggcatctgttcctgcagacagagctctgagcagcacttggggtgttgggaactccagttctcacctgagaagcccagacctggattcctaccccatgcctcagtgaggtcttagcctgatgcatacagccttgagaccctgtataaaaagtctctctaggccaagtgatggtggcatctagcctagcactcagaaggcagaggcaggacaatcgcaggtaaagtgcagtctgaaactagaaggaaacggctggcttttgtttgttttgttttgttttggggttgggggttggggatatggctcagaggcccagagcccaatgcacgataccaaatgaaaaagaaaatctctgagagccacggagtgtataaaaatttactggactagctggagttataatttgaagaaaaaaaaaaaaaacattaaactgacaagtaatgaatgaccctgagccggagaggaagggtctccatttgcccagccttcctgtcttcccctggacatgtaacagggacagcccactgagtattgttttactaagcagtgattcccaaccttcctaacgctgcgaccctttaatacagttcctcatgttgtagtgaccccctcccaactattaaattattcgctgctgcttcttaactgtaattttgctcctgttatgaattgtaagtatctgatatgtagggtatctgatgtgtgaccctcaaaggggtcgagacccacaggttaagaactgcagcgagcagcgaccagagcaaggtgactggagatctagagaaaaacatgtctcttctgcaaagctcagattcagcgcactcgtgcaacttctgatttctcagaccctcacgtctcggtttgtctcaagagggaaacagaaggcttagcaatgcagcatgaaagactggagagggatcggtggtcgtcagtgagctggagagaggcctggcagcctgctggttcctttcttttcacatttatctcctctccttggatattggtagattcctgcctttctggtcaagatgaacatttagcctggcacagtttttacttgatactttgagtgtgtgtgtgtgtgtgtgtgtgtgtgtgtgtgtgtgtgtgtgtgtgtatggtgtgtaggtgtgtgggtgtacacacctgtgtaaactcgggtgcacactcacatcttcgtggacctcagttctcataagtattttctagctcaccagcagttctccagtctagagagtggttctgttctgagctctttatcctcagggcacagcgctggcacgaatacgtcatctctgcctaccagagcagccttaccctatctgacgcttacgtgctgaatcatggtaccagccatctggatctccagccagagcctcggagcttgtgattgccatggttgaggctggacctctcagccttgctgtgcgaagccttcctcgtgcacgggaaggcattggtactgaccgaatagacatgaagttgcagaataagaacagcggagcataatctcagtcagcacagattttgccaattttatacaagacagaagtgaacattaacaagagccctattcttcatacccaaccctccaggaaattgtccaggcctagcgtgctattcagcgacagatcactgagcagcaagaggctctgagaacagcaacaccaaaaagaggtcagacatgatagcacatgtctataatgccaacaccagaggattgggaaatttaagggcagcctgggctacataagtccctgatttgaaagcggggagagagtaaaggagactggagacataactcagaatgcttgtctggtgtgcacaaaactctgggtctgacccccagcttagactgatcatggtgtaactcgcctaccagcttaagcacttgggaggcggaggcaggaagatccaaagttcaagatcattctaagccagcctgagagacacgagactccatctggatcaccaattaattaactaattaattaggcattgattccatgctgggtcacttggcagtagatatatcacattgctacaaatgagtatccagagtctacccgagaccaggcaagggtttcccagagcaggctggagttccggtgacaggagagcgcagctgagaaaggagcacacttctcccctggctctgacaccttcagaggccacctgaaagtatctggttacagagggaaatgtgctcactttgtagatgaaatttgctgcagaacatcagaagggagtgagtatgtggggcctgcacccatcctacagacatccagataatgattgacttttacaggctgggtatttagaactgtgtgctcacgtggacagtgcctggcccataaaaagcccacttttctcacagtgtctgaaacctgacaggccaggactaggacttgggtctggctgtcaaggcctctccggcattaagcctttggtgatattccttgactcggggacacagagacctagaagatatccaagatagatacagaggtgaggcctgcccccaggttttctctccgctccaaaccagcttcctggtgactccttttctttttgaccaggagtccttgaatctggctggcgcacttacttcctagttgtgactgctcacctcttctctgtccaatcagaaatgctttcctgtcaggcagtggtagtgcatgcttttaatcccagcactcaggaggcagaggcaggagccagttccaggacagccaggactacaccgagaaaccccgtctcataagactgggagtagcggggaacagaacagaaaagattccctgctttctattttaaagaaatggggccaaaagaagccagcacagctcctggcccagaaggagtggctaggggacatttctttggaggttttgctttatttgttttgaaagaagttgacacgtagcccaggctggactcatgctcactatgtaatcgaggatgcccttaacttgattctctcgcctctgcctcccgaatgttaggttgtgtgcattctcccctgggtagtagacagtttctcccacaaattattctcatcttgtccttaaaagaagcccatgatccttttaggcatctctagttctttccgatattagcagcattgtagaagcagggttaatgcagccaggcagaattgagaggctagcttaaaaatgggggacctcaagccatctccccttccagcccatgctgtccctgagggggttgctgagctgtgagtagaacaaagatctgtgtctcagcccctcaaggcttggttagcacatcctcttatgtaaatgaacacctaacccatctccgcctggcctggccggttcagcttagtattttgaacagtaaaaaaaggcttaaagtatgttctctccaagtttcagtgggcatctaggctcagggtcttgcaggtttatagttcagcaaggtagagctcttgcctagcattcccgaggccccggattcatccgcagcgccacagaaaggagccgggaggagcagcaaaccaaagcgtctgcttctcacatttccataaaaggcagagaaattgctattaaaatcagcgcctctgagcttcgcctgcgtgctctattcagattctgctttggaatggaattccccatttgattagtttttctgttccatttcttctttttaaaatagtgcctattaggtgttttttcttctcctcctcctcctcctcctccttcttcttcttctttatcagacatgttggaggctacaaagcaagacatgtggatggacccatctgttcacaccctttctgttcatatggcaatgtcttttcctcctctgttttaaatacttgcttcacccaatgctatcccttcctctcaaattttattttttaacttctgttctcaatattccgttgtctcaaatgaccctccctgttgtaaaggttgcacaaggaagtgattgagataaaagaacttaggatccatggtgtgagtgacattcagaaggtagcgtttacctttaggtcgatatgtttctatgtgcagacgcctgcctcatttttggatgtgcattgcttacgtactgtgtcactgtcccttgctaatgagtctgaaggctgttctagctacacagcgacctattcgtgtgtcactagagtcccaggaagcgggagagagagttgacattggtacttccgggatttctccgggtagctgagccccacacagactttctgcctcaaacccgagcaggtggagcaggtcaactatggtagagcaagtttttgggaaagacccaagcatcagctcatcgcagctgttgagatgggataaaagcacttcacacaatgtctgtggctttggtttgaaggctgtacccagtatcaagtttactgcacacaaaatgctgagtaggataatgaaaggctttaaaggaaaaaagagactggtccctgcatttatcccactgcagtgtagaacgaccagtccaacagtagcttgacctttagttcccctgttaacccgagccgcgttctggtcgtgggccaccctcctcccagtcctccatggcccacgggccttaccttcctggggcttcctgtctcctgtgtgtgctcctgtggttctgtgatggtcccttgctcagctcctctccctcttcctccaatggtgaccaggtctgtagagatctctgcacactgtctcccaggtgcccatcactactcttaccaagtgtcactgtgaggtgttgtcttgtcagctcaccccccctttgggtctaacagtccacagtgtgacaccacccctccaccgtggcatcagatgtctctgaagggggaggggctggtcggtttgccatagcctgggggaggggtaatgctactggttagtgaagtcatccctgtgagttcatagtggcccctaacttccctggtccagaatgcaaagcagtctgtcagccctagaggaccatgacaagattaagacgccacttgtgcagattcggagtccctttctgtgggcatggtggccaaaggtgacagatcctccttgccccctggagttacagaaaagccagcttaaccgtgagcacgcatgtcaatgcgcacatcttaagaacacattacgtgggtttccttggtgaccccggtaacctcctgcacacctagaagcagcgttggctgcatattgagaacgtctgttgcatggaggtaggcaaacctacccaaggccaccataccatgtcccaatgtcacctaccacctgccctcattggccactgctgcctgcagcctgggcctgctcttgttccatgtctgtgctgggaaaaaaaggaaaaaaaaaaggacttaattcatttgtagactttgttccccctgtttccgcttctccattcttgtggattttttccttctttcctattgttcctttctcactttttctgtttttgtcctctgcttgtttttatttcaccttccctgtccctctccacctccaaattcctctcctcctctccctcttcctttttttttttttttttttttttggtttgtttgtttttctctgtttcctcttgctcttccttgtttggtcctttttgaagttgagcccagtggcgggactccacggcgtagacctctctccttctgcccttgctgtgtccaggaaggtaacgtaacctcgcccactcttccccactgcctccgaggggccgcagccaccgtagtccaacagggagccaaggcccagcaaacgtccctcctctctctgactcctgctagccccacgtcagaatgtcatgagtacgtggcagtttcttacaaggcacagtatccctttgactgtctaagggaggatgggaacagacaaagagcctgtggctccagtgtccgcaggcagttcccctgcggtcctgtctaccgttggtgcttggggccttgggaccagtaagctaaaggccagcatatggagggccaggaacaggggaggaagcccctctgtggcatcagtttgtcttggcagagtcaaggaatactgtcctttcaaagactggtctacacagatggccccgagttctgttgtttttttcctccgaccactaaaaacccaaacttctctaccttatgtcttgctgagtgtgtcttgttttgttttaagtttgtctgatcttgaagtctgttgtggtgataagattgtcattgacaaggcatgtgtgggcaggggaagggagtgtggccatgactaacccctgctaacctcttctctgctctccatggctctcacatgtgacccccccccccaatcccttatccccttgctcatcagccatgaccgagctccaacatggctcatgagcggcatcccaatgtctcctggtggaatttggagtctttacatgctgggaggtggggaaggaggggatgacggacttggtgtgctcgtggcttgtcactctggacagcttgcatgcctcagggcttcatctccatggccacaggggcacactgtgcagagaccctccagaagggatgcgtggaactgggctgtagactgcttgaaagccaaagacccaagtctattggtgcggggaaggagagcttgggcccccccaagacctgtaggcaagctcgacaggccgagatggaggtgtccatctttgagagtagagctcaaggccaaggggtgcatgtctgcttggcacggggctgatactaaccattgcttgtgtcagttctgtctccagagtgtggtcgctggctaaagacttagttaggcctgacatgcaaccaacagacagtggaaaagcttcagcctttgcctagtgtgaaggagttaggaagatgcgggcaagagtaatgaagagtctgacatgggaacagcacctccccgagaatcgtccatattctcatgttagggcatttctctggcctggaccatccagccatataagcggaggggacttggagagttctagtctctcaccgggaagccctcagacatcctgagctctgtataaaatcatttaatcctgggatgggagtgtagctcagtggtggggcattgcctggcacatacgaagctccgtgttctacccccagcacccagaaaaccactcagggaagtttgtgtctacatgagagcaaagagccaccaatacagtgtgcttccaaggcaagggcattgggcagctttgtacatgacacgggactttgttacttcctgggtgggttgatgccttagacagtccttcctccacgctcctgctgctgttaagctcaggggtgtggccactcctgatggacactcagggtgggtcagaagttgattcaggacagctcgagtcagctgctggaacgagagcaggaacagctaccgtcctcagccctggggtccgccggggagaaatcacagccacctcgatggcctgtgactaccacacagggtctgctggagtgtttgccaagctgcctgctaagaagagctttcttagggcaagggatgtagctcagtggtagagcacttgcctgatatgcacgtgtctagtgagtgcagaacagatcaaagaaatggcatctaccagtcagtctaagaagcgtgggaaagcgtcaggcacaggtgcccaggcaaaagcacacttaaaagcaggtcacttcagagcaagctctacgactgggcgtggtggcacactcgcctgttttctcagagtgtgatggacagtctaggtctgtcgggccctggggtggacacgatgcagcggcctgtcgttctctgcccccccccaccctgtccctgtccctgtccctgtcaaggctgtaggcaaactttggacctggcttgggacagttccggcagcatcttgcttggctctttgcacatttgccccaatgtgacagtctttcttgggctgggcaaacggagcctgtgccctcgtctgaccctcgatctctcacgcaggcatgggcaaaaaggatgaccccaagctgatgcaggagtggttcaagctggtgcaggagaagaacgcaatggtgcgctacgagtcggagctgatgattttgtgagtaagccgagatttagggagcaactgcgggggtgccagtgctcggggtgcgccccagctatatgctagtgctcggggcgttccccaacacacacagccatcctagtctgctagggtgagggagctggcctccaagtcactgttgctgtgtctccctgtctcagtgcccgggagctggagctggaagaccggcagagccgactacagcaggagctgagggagcggatggccgtggaaggtaagcagagggcacatgggtgggaaggtgacgagagccactatcccaggccatgcctgatgccttcagcctctcggcagatcacctgaagaccgagggggagctttcagaggagaagaagatcctgaacgagatgctggaggtggtggagcagagagactcgctggtggccctgctggaggagcagcgactgcgggagaaagaggaggacaaggacctggaggccgccatgctatgcaaaggcttcagcctggactggtcctgagcccgcctgccattgtgtctggtagattggcacccacctgacccggctgcgttctcccaaaccaccggattcaggttcagaagaggcctggcatccctggagaagccgtgctcagacaccatgccgtgggaaaaccccaggtgaggggtatcatctgaggtgacaacacctctgaggagaggcaccttcccccaccccagacttcccactcaggagggaggagatgggtgtgtttgatgtgtgccccagggggaaaacgccttcaggtctatgagggcttgctgcctggcacctctttcaagtggctcctcttcagagccactgccaccacagagcacctgcagagcagagcagccattgccctcatgctccctgaagcaccaccaaagaaagtacagaggcaccttcaggaaagggctgtggatggagatccagcagggacaaccccccacaggggtaatgctcaccctgtcggggcaggggaagtaggcaggttcattatgcaagtcaggagggcgcaggaggggcctgcccccccacacactggatccccagtggccaagtgccccgggcctttcacatggacagtggcctgaagcccgtggattgctgtgttttgcttttagttcacaaccattttgacactggaaagtattgactttgggagagctgaaggaagccctacctgtcaacccctcccccaaccccactacttttgaccgagaggcgcagtccctggtcagcacccacatctgtacaggagatggctctccttggtgttttcctgtgtttgcacattgaaacgagactgacagcctggccagacactcagccacttcggaccctttttttttttttgtcaattaacttatttttttaatacttgaaagtgagcaatgtcatttttttatacctttactaagagacactgcctgtcacctgcgcgtgggagtggcaagaaggtctttgtacatcccatgcaacctgatgcaaaattgccctgattcttgttacacgcatctatttattagccttcttaatagtgttaccgacctgcttggcaccagggagcagcccagggccctgtgggtccttgttcacagctttgccgtcccctcctctacccggcaccctgttcctgttgccactggacttttccaggagaatagcctctctgtatggatgcatttcggagccaggaggccaggcctcgagacaggttgttctggtcttttgggaatcttggctctgtggaccccactttgtccaattttgctgccaaggttttacctcctgtacatatgttaaaggttgaggctagcccctcttcatgcttgctgggaccaagtagagtgtgatgctcagccccagctagacaggaacatgtgtgctggtctcacctcaacataccggccactccaatcttctctgcctatatcaggattttcttggcctggcaggagccagtcagcaccatgtaactagatccataagccaagctgttcatttctcatggttcagccagagaccagcagttggagccagggtgcttctccttcaaaacagcagccacctatggaccagtccattggtaccataccaatctggaaagggcacgccagctgggcctgtgggaggggccagtgcagacaacagccaagggcccacactgaccctggactccccgtgggaaccacactgtgcctcaacttgaacatccatccacccaactccagaggagcaaacagctatcttacttctcaccttgcgcaaaagctgccatctctcctgtggaaacccagatgtgctgctagcaaccgccacagcgctgacgtcatcacttcctggactctgatatggcggcatcgctatttttattccatcagaggaggatgttctggattctattttcaaccacaatctgccaatcaaactggactttggacaggaccttcatcgcctgtgtggccttctccttgaccctgtcctcctctgcagtgccaccggcggcaatcccacgcagctcagccctgtcattcctgctaacccagaacaaggaaaccatttcccgagcgactcaagaaggatgcaggggcacgctgcatctctagctgcctctcagagctctgcaccagatgttcccttccacctctgtcctggtcagccatgacgtgttgatctctccaaagcacacgctgcttccagtgaaagtgggcagaacacttcgcaggagggcctcagaaatccaccagccttgggagacgtcccgcagttctccagtcgtgacgacacgaggacttcagaatcccacagagcacttttttttttaggctaccagtttgtaaccactagtttgcagttgatttcagtggcccgggaacgagacaagaagtgttctccacctctggaaatgcatacagctctggtcatgcgttcttcccaggaattatgtcttcacttgaaggcagggaagagagggatgtatacacttcatccacacatacagtgctagagtgcttttgagtaaacccaaactcaaggctaaggacagtacatgaggctctaacctctgtccctggagcgcaagcagaaggcagcccgtggctcccaaagaagagcgtggccaacccaggttctgaccctgctcagttgatatctctgcctccaacagccatccttaacgtaattttgaccagcagatgtagactttaaaaaataagacatatgtcactgggacaggagagtagaggtgggggcaacaaatcttgggggcgctgggactatagctcagtggtagaatgtgtgttcagcatgcataagacccacggttcaacccccagtaccacatttaaaaatttttttcttttgaaagatggtaacatgacccacaagagggaatggctggtttatgcgcaataaagttttgttttgtttcggttttttttttaaagaaatgaaaaatgtatttctgaagtcattgttctgctcttggcattgagctaaggcatacttagcaccttcctttcaggtgagtgatactgaacacaaatcatttggtgattatcagtgagtgtatgcagacaaggattctcagagaatagagcttttcatttggtttgtgattt

SEQ ID NO: 1853 - DNA, 8708 bp, Mus musculus
cagacagaggcagaccccgggttcttcgttccttcttcgctgctccgatgaaagaagtgtgcctcggggcttctgagtgagaacctttgatgggattctagctggaaggtggagtcaccacactcaggatgcatgcagccacaacagcagcacctgtgtcctgaggaccagccaatctggggaggcaagctctcaccggcgaggaagatgcgggtgtgaagccccaagtccattaaggtgacagtgccaggtggatcagcaccattccaccgcccctccgtggagctgtgccaagagtaggggaacatggaggagaggaagcaggagacaacgaaccaagctcacgtcctctttgaccgctttgtccaggccaccacctgcaaggggaccctcagggccttccaagagctctgtgaccacctggagctgaagcccaaggactaccggtccttctaccacaagctcaagtccaagctcaactactggaaggccaaagccctctgggccaaattggacaagcggggcagtcacaaagactacaaaaagggcaaagcctgcaccaacacaaagtgtctcatcattggagctggcccctgtgggctgcgcacagccatcgacttgtccttgttgggagccaaggtggttgttattgaaaagcgagatgccttctcccgcaacaatgtcttacatctctggcccttcaccatacacgatctccgaggcctgggtgccaagaaattctatggcaagttctgtgccggagccatcgaccatatcagtatccgtcagctccagctaatcctcttgaaggtagccttgatcttgggcattgagatccatgtcaacgtggaattccaaggacttgttcagcctcctgaggaccaagagaatgaacggataggatggcgagcattggtgcaccccaaaactcatcctgtatcagaatatgaatttgaagttatcatcggtggagatgggcgtaggaacaccttggaaggatttcgtcgaaaagaatttcgtggcaagctagccattgccattacagcaaattttatcaaccgcaacacaaccgcagaggccaaagtggaggagattagtggcgtggcttttatattcaaccaaaaatttttccaggagctgagagaagccacaggtattgacttagagaacatcgtctactacaaagatgacacacactactttgtcatgacggccaaaaagcagagtttgctggacaagggggtgatcctgcatgactacacagacacggagctgttgctttcccgggagaacgtggaccaggaggccctgctgaactatgcccgggaggccgcagacttctctacccagcagcagctgccttctctggatttcgccatcaatcactacgggcagccagacgtggccatgtttgactttacctgcatgtacgcctctgaaaatgccgccttggtccgggaacagaacggacaccagttactagtagctttggttggagacagcctcctggagcctttctggccaatggggacaggaatagcccggggctttctggctgctatggactctgcctggatggtacgaagctggtctctgggcaccagccccttggaagtcctggcagaaagggaaagcatttataggttgctgcctcagaccacccctgagaacgtgagcaaaaacttcagccaatatagcatcgaccctgtcactaggtatcccaatatcaacatcaacttcctcaggccaagccaggtgcgccatttatacgatagcggagaaacaaaagatatccacctggaaatggagaacatggtgaatccccgaaccactcccaagctgactcgcaacgagtctgtagctcgttcaagcaaactgctggggtggtgccaaaggcagacagaaggctattcaggagtcaatgtgacagatctcactatgtcttggaaaagtggcctggccctgtgtgcgatcatccacagataccgccccgatctaatagactttgattctttggatgagcaaaacgtggagaagaataatcagctggcctttgacatcgctgagaaggaactgggtatctctcccatcatgacgggcaaggagatggcttcggtcggggagccagacaagctgtccatggtgatgtacctcacgcagttctacgagatgttcaaggactcgctctcctccagcgacaccctcgacctgaatgcagaggagaaagccgtcctgatagccagcaccaaatcccccatctccttcctgagcaaactcggacagaccatctctcggaagcgttcgcccaaggaggagcctccccggagctacaaaggagaaagaccgaccctggtgagcaccctgacggacagacggatggatgctgccgttgggaaccagaacaaagtgaagtacatggcgacccagctgctggccaagtttgaagagaacgcacctgctcagtccactggtgtgaggagacagccaacacaagagcgtggggtcagccagccgtcctgctacctgccaaagcagggtcgccctgctcccatcccccagtggaaacagggctccataaagaaagagttcccgcagaacttggggggcagcgacacgtgctatttctgccaaaagcgggtctacgtgatggagaggctgagcgccgagggcaagttcttccatcgaagctgcttcaagtgtgagtactgtgccaccacgctgcgcctatcagcctacgcctacgacatcgaggatggcaaattctactgtaagccgcactactgttaccgactatctggctacgcgcaaaggaagaggccagcggtggctcctctgtctggaaaggaagtcaaaggagccctgcaggatggccccactgcagatgcaaatggactggccagcgttgccgccagctcagccgagagaagtccaggtaccagcatgaacggcctggaggagcccagcattgccaaaaggctgaggggcacccccgagaggatcgagctggagaactaccgccgatctgtgaggcaggtggaggagctggaggaggtacccgaggagacacaggccgagcataacctgagcagcgtcttagacaaaggcaccgaagaggatgtggccagcagcagttctgagtcggagatggaggaggaggaagaggaagatgacgaagatgatcatctccccacctctgacctgggcggggttccctggaaggaggcagtcaggatccatgcccttctgaagggaaggagtgaagaggagctggaagcctccaagaacttcgagcccgaggaagaagaggaagaggaatacgaagaagaggatgaagagtatgaggaggaggaagaggaggaatccagtgaagccgggaacaagaggctgcagcagatcataaccgcagcggatcccttggcgatccaggctgatgtgcactggacacacatccgtgagagagaggcagaggagaggatgctcccaacctctgagtcctccacttctagagatcagcactggtctgacgacatcccttctgatgctgaagcggagcatcgcttacagagccaggccaaggtgaaagcagagctggagctgagagtatcggaaaacgaggaagagaagccatctgatgcgccaaagcaagaggagagaggaggccaaatccccacttgccaccaagaaaagcccaaagctgaagtccctgaagaacagaaagctgtactctcgcccatccggtcacagcctgtggccctgccagaagccagatcacctacctcacccaccagcttacagccagagtctctgttggcccctcccactcctcccacacctccccccacccaactccccatctgttcccaacctcagccctcctcggatgcctccatcccatcgcccaccaagtcccccatacgcttccagccagttccagccaaaacatccacacccctcaccccactccccgtgaagagccaaggagaccccaaagacagactgagtggccccctggctgtggaggaggtcttaaagcggagtgatctggtggaagaattctggatgaagagtgctgagatccgccgcagcctgggccttactcccgtggaccggagcaagggggaggaggttcggaagtccttcgtggagagtgtggatgagatcccctttgccgacgatgtggaggacacttacgatgataagacggaggactccagtctgcaggagaagttcttcacacccccttcctgctggtcccgctcggagaagctccaggccaaggagaacgggcgactcccacccctggagcaggacgtgccaccacagaaaagggggctgcccctggtctccgcggaagccaaggagctggccgaggagcgcatgcgcgcccgggagaagtctgtgaagagccaggcactgcgagatgccatggccaaacagctgagccggatgcaggccatggagatggtgtcctccaggtcccacacggcacaatcgcagggcaaggaactaggatccgagtccaccagacacccaagcctccgaggcacccaggagcccaccctgaagcatgaagccaccagcgaagagatcctctcccctccgtcagactcaggaggccccgatggctccgtcacctcatctgagggctccagtggaaagagcaaaaagaggtcgtcgctcttctccccccgcaggaataagaaagagaagaaaaccaaaggggaagcccggccccccgagaaacccagcccaggcctcccagaagatgtggtagccaagcccaagtccctgtggaaatctgtcttctctgggtacaagaaggacaagaagaaaaagagcgacgagaaatcgtgttccagcacgccgtccagtggcgccacggtggactccggccagcgcagggcgtctccaatggtgagagcagagctgcagctccgccgccagctgagtttctcagaggactcagacctgtccagtgatgacatccttgagaggtcttcccagaagtccaagcgagagcccagaacctacacagaggaggagctgagtgccaagctgacgaggcgtgtgcagaaggcggctcggagacaggctaagcaggaggaactgaagcggctgcaccgagcccagatcatccagcggcaactggagcaagtggaagagaaacagaggcagctggaggagaggggcgttgcagtagagaaggctcttcgaggagaagcaggcatgggcaaaaaggatgaccccaagctgatgcaggagtggttcaagctggtgcaggagaagaacgcaatggtgcgctacgagtcggagctgatgatttttgcccgggagctggagctggaagaccggcagagccgactacagcaggagctgagggagcggatggccgtggaagatcacctgaagaccgagggggagctttcagaggagaagaagatcctgaacgagatgctggaggtggtggagcagagagactcgctggtggccctgctggaggagcagcgactgcgggagaaagaggaggacaaggacctggaggccgccatgctatgcaaaggcttcagcctggactggtcctgagcccgcctgccattgtgtctggtagattggcacccacctgacccggctgcgttctcccaaaccaccggattcaggttcagaagaggcctggcatccctggagaagccgtgctcagacaccatgccgtgggaaaaccccaggtgaggggtatcatctgaggtgacaacacctctgaggagaggcaccttcccccaccccagacttcccactcaggagggaggagatgggtgtgtttgatgtgtgccccagggggaaaacgccttcaggtctatgagggcttgctgcctggcacctctttcaagtggctcctcttcagagccactgccaccacagagcacctgcagagcagagcagccattgccctcatgctccctgaagcaccaccaaagaaagtacagaggcaccttcaggaaagggctgtggatggagatccagcagggacaaccccccacaggggtaatgctcaccctgtcggggcaggggaagtaggcaggttcattatgcaagtcaggagggcgcaggaggggcctgcccccccacacactggatccccagtggccaagtgccccgggcctttcacatggacagtggcctgaagcccgtggattgctgtgttttgcttttagttcacaaccattttgacactggaaagtattgactttgggagagctgaaggaagccctacctgtcaacccctcccccaaccccactacttttgaccgagaggcgcagtccctggtcagcacccacatctgtacaggagatggctctccttggtgttttcctgtgtttgcacattgaaacgagactgacagcctggccagacactcagccacttcggaccctttttttttttttgtcaattaacttatttttttaatacttgaaagtgagcaatgtcatttttttatacctttactaagagacactgcctgtcacctgcgcgtgggagtggcaagaaggtctttgtacatcccatgcaacctgatgcaaaattgccctgattcttgttacacgcatctatttattagccttcttaatagtgttaccgacctgcttggcaccagggagcagcccagggccctgtgggtccttgttcacagctttgccgtcccctcctctacccggcaccctgttcctgttgccactggacttttccaggagaatagcctctctgtatggatgcatttcggagccaggaggccaggcctcgagacaggttgttctggtcttttgggaatcttggctctgtggaccccactttgtccaattttgctgccaaggttttacctcctgtacatatgttaaaggttgaggctagcccctcttcatgcttgctgggaccaagtagagtgtgatgctcagccccagctagacaggaacatgtgtgctggtctcacctcaacataccggccactccaatcttctctgcctatatcaggattttcttggcctggcaggagccagtcagcaccatgtaactagatccataagccaagctgttcatttctcatggttcagccagagaccagcagttggagccagggtgcttctccttcaaaacagcagccacctatggaccagtccattggtaccataccaatctggaaagggcacgccagctgggcctgtgggaggggccagtgcagacaacagccaagggcccacactgaccctggactccccgtgggaaccacactgtgcctcaacttgaacatccatccacccaactccagaggagcaaacagctatcttacttctcaccttgcgcaaaagctgccatctctcctgtggaaacccagatgtgctgctagcaaccgccacagcgctgacgtcatcacttcctggactctgatatggcggcatcgctatttttattccatcagaggaggatgttctggattctattttcaaccacaatctgccaatcaaactggactttggacaggaccttcatcgcctgtgtggccttctccttgaccctgtcctcctctgcagtgccaccggcggcaatcccacgcagctcagccctgtcattcctgctaacccagaacaaggaaaccatttcccgagcgactcaagaaggatgcaggggcacgctgcatctctagctgcctctcagagctctgcaccagatgttcccttccacctctgtcctggtcagccatgacgtgttgatctctccaaagcacacgctgcttccagtgaaagtgggcagaacacttcgcaggagggcctcagaaatccaccagccttgggagacgtcccgcagttctccagtcgtgacgacacgaggacttcagaatcccacagagcacttttttttttaggctaccagtttgtaaccactagtttgcagttgatttcagtggcccgggaacgagacaagaagtgttctccacctctggaaatgcatacagctctggtcatgcgttcttcccaggaattatgtcttcacttgaaggcagggaagagagggatgtatacacttcatccacacatacagtgctagagtgcttttgagtaaacccaaactcaaggctaaggacagtacatgaggctctaacctctgtccctggagcgcaagcagaaggcagcccgtggctcccaaagaagagcgtggccaacccaggttctgaccctgctcagttgatatctctgcctccaacagccatccttaacgtaattttgaccagcagatgtagactttaaaaaataagacatatgtcactgggacaggagagtagaggtgggggcaacaaatcttgggggcgctgggactatagctcagtggtagaatgtgtgttcagcatgcataagacccacggttcaacccccagtaccacatttaaaaatttttttcttttgaaagatggtaacatgacccacaagagggaatggctggtttatgcgcaataaagttttgttttgtttcggttttttttttaaagaaatgaaaaatgtatttctgaagtcattgttctgctcttggcattgagctaaggcatacttagcaccttcctttcaggtgagtgatactgaacacaaatcatttggtgattatcagtgagtgtatgcagacaaggattctcagagaatagagcttttcatttggtttgtgattt

SEQ ID NO: 1854 - protein, 1742 aa, Mus musculus
MEERKQETTNQAHVLFDRFVQATTCKGTLRAFQELCDHLELKPKDYRSFYHKLKSKLNYWKAKALWAKLDKRGSHKDYKKGKACTNTKCLIIGAGPCGLRTAIDLSLLGAKVVVIEKRDAFSRNNVLHLWPFTIHDLRGLGAKKFYGKFCAGAIDHIRQLQLILLKVILGIEIHVNVEFQGLVQPPEDQENERIGWRALVHPKTHPVSEYEFEVIIGGDGRRNTLEGFRRKEFRGKLAIAITANFINRNTTAEAKVEEISGVAFIFNQKFFQELREATGIDLENIVYYKDDTHYFVMTAKKQSLLDKGVILHDYTDTELLLSRENVDQEALLNYAREAADFSTQQQLPSLDFAINHYGQPDVAMFDFTCMYASENAALVREQNGHQLLVVGDSLLEPFWPMGTGIRFLAAMDSAWMVRSWSLGTSPLEVLAERESIYRLLPQTTPENVSKNFSQYSIDPVTRYPNININFLRPSQVRHLYDSGETKDIHLEMENMVNPRTTPKLTRNESVARSSKLLGWCQRQTEGYSGVNVTDLTMSWKSGLALCAIIHRYRPDLIDFDSLDEQNVEKNNQLAFDIAEKELGISPIMTGKEMASVGEPDKLSMVMYLTQFYEMFKDSLSSSDTLDLNAEEKAVLIASTKSPISFLSKLGQTISRKRSPKEEPPRSYKGERPTLVSTLTDRRMDAAVGNQNKVKYMATQLLAKFEENAPAQSTGVRRQPTQERGVSQPSCYLPKQGRPAPIPQWKQGSIKKEFPQNLGGSDTCYFCQKRVYVMERLSAEGKFFHRSCFKCEYCATTLRLSAYAYDIEDGKFYCKPHYCYRLSGYAQRKRPAVAPLSGKEVKGALQDGPTADANGLASVAASSAERSPGTSMNGLEEPSIAKRLRGTPERIELENYRRSVRQVEELEEVPEETQAEHNLSSVLDKGTEEDVASSSSESEMEEEEEEDDEDDHLPTSDLGGVPWKEAVRIHALLKGRSEEELEASKNFEPEEEEEEEYEEEDEEYEEEEEEESSEAGNKRLQQIITAADPLAIQADVHWTHIREREAEERMLPTSESSTSRDQHWSDDIPSDAEAEHRLQSQAKVKAELELRVSENEEEKPSDAPKQEERGGQIPTCHQEKPKAEVPEEQKAVLSPIRSQPVPEARSPTSPTSLQPESLLAPPTPPTPPPTQLPICSQPQPSSDASIPSPTKSPIRFQPVPAKTSTPLTPLPVKSQGDPKDRLSGPLAVEEVLKRSDLVEEFWMKSAEIRRSLGLTPVDRSKGEEVRKSFVESVDEIPFADDVEDTYDDKTEDSSLQEKFFTPPSCWSRSEKLQAKENGRLPPLEQDVPPQKRGLPLVSAEAKELAEERMRAREKSVKSQALRDAMAKQLSRMQAMEMVSSRSHTAQSQGKELGSESTRHPSLRGTQEPTLKHEATSEEILSPPSDSGGPDGSVTSSEGSSGKSKKRSSLFSPRRNKKEKKTKGEARPPEKPSPGLPEDVVAKPKSLWKSVFSGYKKDKKKKSDEKSCSSTPSSGATVDSGQRRDMVRAELQLRRQLSFSEDSDLSSDDIRSSQKSKREPRTYTEEELSAKLTRRVQKAARRQAKQEELKRLHRAQIIQRQLEQVEEKQRQLEERGVAVEKALRGEAGMGKKDDPKLMQEWFKLVQEKNAMVRYESELMIFARELELEDRQSRLQQELRERMAVEDHLKTEGELSEEKKILNEMLEVVEQRDSLVLEEQRLREKEEDKDLEAAMLCKGFSLDWS

SEQ ID NO: 1855 - DNA, 86023 bp, Homo sapiens
tttttaaactgcagatcacagtttaaaagccactgatgtagaaggagatgtagtttcaaaagagatcagagactgagttgattccggggccatttcaacgtgcagaggcttgggatgggtctgggaccagcaaaggacgcagagaggggctatgaggtcacagcaggacccagagagtagtgtccccttgtcctggaggccggtggggttgtgggggggcagacggtagtgagctgtgacttgtgctgcagacaggttgaggaaaacaaggtttgagaattgatcattggattggacagcatggaagtcattcatgaccttgatgaggcatttctgtggagggctgaggacaaggtctacttgttggaggttcaaagatagtgggagaagagaaagttgtgaacaaagcattgacaattctttcagcgagttttgctgtcaaggggagcagagtaagttagttggagcgggtggggtcaggactgggtgttgaaagacgtgtccttgctgaagacagttcagtggggtgagggaggatcactgcagggaagggaccagtgtgggaggcagcatgcttgagtaagaacggggacaggatcagaagcacaggcagaggctggcttcagcgagacatgtggcagatgttgctcgctgtcattggagggaaggcagatgagatgggcatagacattgattaccgatagaaacttgcggaagaatgccgagaaggtggagaaactgagaaccatggcagaagagaaattgtgttttcgttttttggtttttgttttttgttgttttttgggtttttttttttttttttttttttttgagactggatctcgctccatccccaggctggaatgcagtggtgcaaccatggttcactgcagcctcgacctcctgggtagctgggacgacaggtgtgcatctatgcctggctaattttttaattttttgtagagatgagggtcttgctatattgcccagtctggttttgaactccttctgaagcaatcctcctgcttcagcctcccaaggggctgggtttacagtcatcagtcgccacacccagcctattttggtcttctacacagaaatcgaatccttgagaaatgaacattgattgcaagctgctcagcttggtgccgttgacatgtcatcgataggcaggtgtggggtggctggtgggcctagatgacctttcagatggtgctgagccttgactgcagtgtattttgtggttctgtggcagtgacgacaggcaggcgagacacctgagaaaccccatattctgttccaggttagtctcctgccagctgtgttttgggccagcgtcggaaagccttagctgcaggctctgcccctgcaagagggaggaagcgacctgacccgagtgccttggtaggaccttgcatgtttcccacaagttctccggtcatctcgtgaggtatttctctcccttcggactgctggaggcttggcattctctgagtccctgtgtgcagtggcctggaggttgccctgtacggcctaccaaccagccagcttcctgggtctgcccaagtgtaggtgaccgggtagccctttaatcagcagaaccttattgagcacctgctgtgtgcctggaactgagtacatggtgctaagcagagtgttgggttggtgcaaaagtcagtgcggtttttgctattaaaagtaacggcaaaagtaactgcactgacttctgcaccgacgttatagattggattccggcccttgaggagaacagctttttttttgggattctcctttggttgtgttttcccacatcctcaatgaggctttctccccacccagaggcctttcatcacccctgagggcagggctcttagattagtgggtcaggaaggtgtgggtcttttggtctgtactgttgacagtgggcaggttgaggtccaccttctgtccttccccaagctcctacaatggatggagtagtattaggtgattggaaaatgttttgtcattgactcctcataggcgttgctgatggctggggtgcaagagcctgccgcagaatgccaactgatacatactgtgttagcactgttttagttgcttagccttttggcagccagtaagaagaattactgtgaaaccagactgctctcactgccatttggaaagggctccatttcaaaggagcagatgcagtgataaatcatgaggagaaaaagaatcctgtattgtgtgtccttgctaaatttacttgaaactgcatatccattgctagctgggcagctatcttcctggcaggcaagttcctgctctcgggtggttagggactggaggcatgcattctcatgagctttcatttctcaagctgtattctcaggtggtttttcatgatggctaaggacttaggctctcaattggacaagtctggacccaaaacatgcctttccccatctgcaaaatggaggtcatacatcctgcctcgcgggatggtggtgaagatgccataggcgtggatgtggcaccgagtagtaacgactcagtatcttctatctgtcttgtttaacactacagtttagcaggacttacacagatcttactcctttagcacccccctccacccaatgccattctcacgctttctagaacagatggagtggagaggggaagagtgataatggagcagagaaagttccaaaccatttttctttccttcaaaaaacaaaaccatctgaaccctgttgttccgtttttatttagactgagtatgcgctttcattgctggagtttattgataaactgctggatgataacagcgctactgtgggttggtccttgctctgttcctggcactgataaacattttacattcgttaccttacttcctacaaaaccctgtgattttcattttacagatgaggagactgtaggatggtgagcctcaggcattcttcttgattgcttgttttgggggttactttgaacgtgagttgacgtcatcatcagtgattgtgtttattgggtgcctcgctatgattcagacattttaatgtgtttggggtgacagaactgcaaggcagaggtcaggtcacttctgacttacttcatttctcagctgcgtggatgttcttaacttggttttcatgaagaaataggttgttagcaaagaatagaaatgaaaattagaaaagatacaacataagtgttaggactgtactacagtcctgcaggattagggacttggaagagaacccagaggctatctgggtctggctcttctcagatgcctctagagaggggtcatccacacccagccaagcagagtgcgggtcatgagaaaaatgccacactcttgcagtgttcctgttagactgtcactgcccgcccaggctgactgttgcattcctggataccacgttttggtagcacattggaagtctttctctaacatgtgtccaggtctccttcaccttccgcagccacgcaggccaggctagtgctttccccaggaccggtccttcaagtacagagctgctgggctccatcctaccctcgtcacctccacagaaacacgacttatttctactccaggtcgggttatagcgcagagacccagtccctgccctaaggaagttcacaatggaggagagagacatttaaataatgtccttgcagagtggcaggagcagatgaggagtgcagccaggtgacaggcaggagaggggaagggcacagtggtggggggaggagctggcttcatgtttcctctccatcctgctaagtgtcagcttgatgataaataggatggagagtcaggatagatcccaggatgcaatacatgtggattcaataccttctcatgatagaaatactcaccagactaggaatagaagaaaattaccttcacctagtaaaagccatatgcgaaaaaccatggtacgtgttatgttcaacagtgagagacagaaagcttttcctcgtatgatcaggaacaagacaaagatgcccacttttgcctcttctatccaacataatcctgaagttctatccagagcagttaggccagaaaaagaaattaaaaggcatccaaattggaaaggaagacagttatctccatttgtagatgatatgatcttatgtgtagaaaatcctacagattccaccagaaaaacctgttcaaggctagtacataaatccaacaaagtagcaggatacaaagttaatacacaaaaatcagttacatttttatatactaatagtgaacagtctgaaaaggaaatgatgaaaataattgtctacagtagcatcaaaaataataaaacacttaggaattagccaaggaggtgaaagccttgtacagtgaaaactaaaaaacatcactggaataaattaaaagataaatgagaacaaattcatgcttatgggttggaagacttactattgttaagatgtcacaattacccaaacaatacacattcagtgtaatccctatcaaaatcccaatgattttttttttttttttacagaaatagaaaaacccatcctaaaatttacatggaatctcaagggaccctgaatagccaaaacagcccttctaaaggagaccaaagctggaggactcatgcctcctgatttcaaaacttactataaagctatactaatcaaaacagtgtggtactgacataaaggcagacatataaaccaatggaatacaatagagggcccagaaacataccctaacatatatggtcaaactatgttttgttaagagatggggtcttgctatgttgcccaggctggagtctagctcctgggaggatcaaataatcctcctgcttcagcctcatgcacctcacttacggtcaaattatttttgacaaggataccaggactactcagtacggaaaggacaggcttttcaaataatgatgctaagttgcctatgttgaaggaagacagatcaggagcccgaggcatgttggcgatttgggtcctggtttctgagggaaaatatgatcaagtgttcctctccacctacttttttctttttttggtttttgagacaggatcttgctctgtttcccaggctggagtgcagtggcatgatcatggctcactgcagcttcgacctcctgggctcaagcaatcctcccacctcagcctcgcatgtagatgggaccacaggcgaatgccaccacacccagctaatttttttgtttttgaagagacaggatctcaccgtcttgcccaggctggtcttgaactcctgggctcaagtgatcttcctaccttggcctcctaaagtgctgggattacaggcatgagccacctcacctggccttccacccgctttcaagatctgtttagatgagacatacctctgactgaatgggctaggggaaggcgcagttcacagattgctgtgtaagattcagaaatttgcacgttcgctggtgtgttcatggtgcattggctagggagaaaactaagcttcactctgatgccatactcttgaagtgtcattcttttttgttgttttgtttctttttttttttctatttttaaacatgattctcctttctactcccccacaaacatccagctacctcttctaagagctagagattgagtgttctcatagccagccagaagtcagtgacaaccttcaactattgttataaatagaaacataaccatgtcctgcgtgtgcttcagaggccgtctctgcagtgccatcctccacagccaaggcccatgcggggcttctgagtcagcagtcagctgctgcggacaaaacatgcaggctggagtcagctggcagagactcacagatgcctggaaacctggcatcacctcctcttcctcccccagcccccaacccggctcctcacttcctctaccccttccttgcacaccttggcttttcagtttctgggatttctggcaccttcctgccaggtttcctggtctccaggttcctgtgattatgaactgtacacagggtggtgcaggacaggccaggaggagcatgatctggctttgaccttaaggaatgagggaaatgggggcggtaacagaaatagccctgctctgctgtgcttcccggctgttgtcagagccaaggagaatgccgggtaagccccttgcagagtgagacaggcccagcccagcagagccacagagcaatgctgtcacactctggaggagtctttgcgctgcagtcatcattcagctgcaaagcaggaaaagtgaggcagcccaagggaattcatcttgtgtcgtcttaccttgggtgccggtcgcattgttccaggagccatcctgcctctgttcatccattgtcaccagtgccctgcaggtcgaaatctcttcggccggggaattaaaacttgcctgctggttggctctgcagctctctgggagctgtggctgacatctgttaatttaaaagtgttttcactagcagaaggattggggacagttattagtgaagccgttcctctgtagtggggtttgatttggaaattctttgtggcggttagcagctctttggaagtgaattatttcaaaccgagtgggtgacaaccagccatggggttgttagctcacacgtaagaactcttcttgggaaataagtgcccaagaccctctttcagggtaggtgtaagccaaggcaggcgctatgacgggaaggattttggagttatgggttgcaggacctttaatgtattggcttcagcaagaatgtcatggttctgagtgctctgaatcctggcaaggagttgaaagtggctactgtttagaaacaaagaaaagtcattttcttctttgacatgaggtagcggtggatcagacccagtgtatgcaaagcttaccaaacactgtgactctggtggagttcaggttgactgtgaatgcaggcagggcacacagggtcaggattgtgccatgctgtgtgcttgtcaaagagcaagtgaagcctcagaagtcccacaaagaggtcaggaggcaaagagggtccctgatgtagaaaatggtgtgggacctttgtttctagtcatgggttgtcagctgtcaccatttctcctgccttcacataagcacatctgctctttcctgccctacaagccatcttttgactttctaacatttctaagataagccttggcttgtaagataaataatgggccctttttaggaactgtaaagtatttctcttgctgctacctagaataaaacctttcttttttggggaaactgaatgttaattccagttaactccatttcttgctggcctcttggccatgtggctattgagagaagctatgtgtgttaacagtgtattgtttttgttttgttttgttttgagacagggtctcactctgtcgctgaggctggagtgcagtggcacaatctcagttcactgcaagctccgcctcccgaattcaagcaattgtcatgcctcagcctcctgaatagctgggattacaggcgtgtgccaccacacctggctaatttttgtattttttggtagagatagggtttcatcatgttggccaggctggtcttgaactcctgacctcaagtgattcacccacctcggcctcccaaagtgctgggattacaggcatgagccaccacactgggccagcagtatagtttttaatatctagagccaggagggtttgttgagtacgtgatatatttgaggcgaaaagcccagccagtgtgttccatctgcaatgtatcctccacattatgtgacgagtgttgtgtctgttgacatagaaaatataaggtggagagggcagttccttgtatttagttacaactttctctcatgaaacttaagatgcatctcatttggtttggtttaatcctgtgataccatggtgaggtgcggagagaagtggcatgtcatttctacttcacactgctgctcagtgtgcttacccaaagtaagagcttcagggcctcttctgtatcattctggaacatggtgcctgtcttccaagagttggtttcagcagcacctgcagctgaatagtgggcagtctcttgcttctacatgcctgctgaacgtagtgcatcaaccactcccttcctctgtctgcacccaaccccaagggtacatctttaaagcaaagtccagtccagttgtgttggtcactctcgtggtgaattggtgatgtgcctgtgctgggccattgtgatgagagcaccaggagcaagtgctgtgggcatgtggatttctcagcagtagccttggagaacttcagaagtgaaagtcttggccaggctcacacctgtaatcccagcactttgggaggccgaggcgggcagatcacgaggtcaggagattgagaccatcctggctaacacgatgaaaccccgtctctactaaaaatacaaaaaattagccgggcgtggtggcgggtgcctgtagtcccagctacttgggaggctgaggcaggagaacggagtgaacccaggaggtggagcttgcagtgagcagagatcgcaccactgtattccagcctgggcaacaaagcgagactccatctcaaaaaaaagaaaaaaagaaagtcttaggggcgctgtctaacctccttgtcttacacacaaggaaactgagggttcgtgcaacagtgcttacccagagttgtgcagcggggtcgtgcagctggggtctggctgtgtgggctcagccctgtggtcacactcgtcttgtcaccctgacccactctctactcactagttttgtcctttgtccttttgcctcccaccttccaatacagttccagtggtgaggtttcatcagatgtgacgcaaaaacgattctgcagactcacaggagccggtgggtgcaggagtacacgcggtgccatctcccacctcccagcctctgtccagcagactcactggacgtaggtgtgcggacatttccataggtggaaggcatagatatcgtcatttactgctgttcaattcgattcagggtgaaaatggaatgactgtgaagtctcccaaccctgtaccttacgcaatagcaggacttcttcagttcttttaatccctgccaactttgacactctcgaactttctgctccttagacttctgtgatgctgctggttggttctcttcagacctctccctactgttcctcatcttttaagagggctcatctttctctcccagcctcttgaaggtggggcctcctggatctcttccagagtctgcggctcttctgccctgtgcactctcctttcgtgatcttcctgcttttgtatgcttagctactgcccgtgtgccagcgactcccaaatctggatctgcgtccccagccactccctgaacttcacatttgtaccgacttcccggtaagcacctccacttggagctcacgtgtgcaggtgaggaaggggctcactgctccactggcaccaaggagtgcttctgtttttaatccattggcctgatgtctccgtttaatccggggcctaagctggaaacctgggagttatccttgcctctttgatctgtacgagtcactcaggcctgtctttgtcactttcccatgtcctacacctcttccctgcctggctaacatttatgctgagagactcagctgtcacctctcagaggctcgccttcagtggggacccccccccttcaccaccaatagtgacttagatcctctttctctgtttccgagatggccttgtgtctccctctctagtggcacttggtacagtccattgagacattctgtgtctgtgtctgcctcgtctcctagactgtcagatccttgagagcaagaaccatcctgctcacctttccagccccagtgtttcgtagtgcctggagtattgcaggtgtgcagtccacacttatggatggatgactgcgacactttagaactctgctttgaagaggaatatgtctcctggagaatgtttgtagacagagaaatgctaaccacgtttttctttctttttgtcagattaacgtgacagtgtcaggtggacccacagccatcccacctccccctctggggagtgctgagagtgaggcagcatggaggagaggaagcatgagaccatgaacccagctcatgtcctctttgaccggtttgtccaggccaccacctgcaagggaaccctcaaggctttccaggagctctgtgaccacctggaactaaagccaaaggactaccgctccttctatcacaagctcaagtccaagcttaactactggaaagccaaagccctctgggcaaaattggacaaacggggcagtcacaaagactacaaaaagggaaaagcgtgcactaacaccaaggtaagctttgctcctgttgggccctggggtcactgacgagatgccttctccctcaacaacgtcttgcatctctggccattcaccatatatgatctacaaggtctgggtgccaagaagttctatggcaagttctgtgccagagccatcgaccatatccaggtgccaaagaggaggattgagttagaggtaggctgagtgagaaccaggcaaagtctagccacaacctagcataagaaatcaggcttcaaccctgttgaaattttgtggatgtctaacctctttttgtttgacttgcatgacccagaccctgttttaagcatgtttcatgtatttacatattgagcgttcaaagtttcaagtatttaagaacaaccaaagtcaagtggcatgggaaccttttattttgctgaagctctcttttgaacctcacgtggttcggaggatgcaggtcacttagcagggacatagccaagccctgctggtatcctgtctgaacacggctttggggttcttggcatgtcctctttccaaagttccatactcagtagctggtaaggtatactgtttgcgaacttggcatttgccacaagcttccaacctcttcccatccatgttccaaaagtctgttttgattcataagcaaggactttgtgaaccaaagtatttctgttgctttcttcaccatgtggagaaatggggtttccacgaagcaggtaggcccaagcaaagacctgagttatgcacttgcctttgtcggggtaggtgcgaggaagcggatatggagaggtacatttcctgcttccctccttagaagaacacctagtgtgagaagtttggaacaagctagcagggacacaaatttgcagatgacttcatggctacgttatgttctttcacgagctttaatttgtgcaataggggatacctagagccccacccccagtggatttgcatttgggtagatattcatcagcaaaattcaagaactgtaaaggcatgactttcatgagtgagtactggactccactaagaacaaaacaaaaacaaagccaaaagcattgcacgttttccttccgcacacacagagcaaactacttaagatatgtgtccagtctcctgctcagtacttctctggagtgtggattttcgagatcatgttcctggacgttcagtctagaaatggggattttggaactcttattagcacacaaaactttggctcttgaaaattgcttcccgggaatcatgtgtgtggtagactcattccaggaggcttgagattgcctggagtgtgtatgtagtactctgtatctctttggacagaaatctgcctgacctagaaaccttcgaaatggtcctctcctgttgatgtaagattgtatttgattgtcatatcgtttgttgagatgatggccacttaaatatgctgcagatcaagggccttccaggctgtccaaggtgaacaggtgccgagcttgtgtctagcactgatggttctgtcttctccattcatggtggtgatcactagctcttctcttaagccatggcaggtgctctgctgtgacccacgtaggtgtgaaggtttcttggcagtggggagaatagccctatttcggggctttagggagtgatgatcttacaatcatgagacttcttgagaattgtttgttggaagtgccgcctgccctgaaagcagctgtgtttttcagtgtctcatcattggggctggcccctgtggtctccgtacagccatcgacttatccttactgggggccaaggtggttgttattgagaaacgagatgccttctcccgcaacaacgtcttgcatctctggccattcaccatacatgatctacgaggtctgggtgccaagaagttctatggcaagttctgtgctggagccatcgaccatatcagtaagtaaaactagctttcctgtaagattccaccctaccccttgcacgcttgttcagtagaaagagacaggcagattagctgaggaattcatatgccacccaatttcttctaatctcattactgtctttcttatagtaagtgcactcatcttgaagtaaaaacacctgctatgtggtggttctataatttaggactcttaaatgtgagtgtatcgataacctgtgaaatgtggggtttggcttgaggatttctgttaggtcgtggactcttcctgagctcttgcagtttgtgggatgggcactggggcaggcactggggaaacgatgaccagtttgggcccagaccctctggtggtccttcttgcagtggcagaagtacacaagcatgcagctgtctgtgctgtgagctgatacattctctactaatgtaagaacaaagtgctgtggggacacagtcctggggggagccacacttgcaggaggcgcagagccctggcctggccgttaatggcaaggggataatggcattcctctggtcaggtggttcttgtgcggtctgcaagctcttgctgttcttttgtcacctctaagctcagcccgggcctttgcttttctgagatcctacagggtatgaatacaagttaatgcaatcagcggtgtttgactgtaagtggccagcaaagcaattcagaacagacagtgtgcgttatgaaactgaaagctttttattgattatcattaatgctttcaggaaagctttatcaaggagcctttgttctgagcttctccagatgtgtcctgtaaacacagtcagtcatggaaccttttgctgtttgcagcagctgtgccaatttatcagacgctggctggcagtgaccacattccactggcagaggaagccctctgcccatctgctggctatagtttgtaaagcatcttgggacccacagttctctgcgaaaatactgtgctagcgcagagcttaacaagtatttgggaatgggactcagaagggtggtggctgtggtaaactggggagaacaaccaagatgacgtgaggaggatttgcattgctcctggcacattagtcacaggctccagttaagtttggtcttaagagagaaccaagggtcattaacgcagtggatttgtctgccttaattgtggcaagattcatcttagggttgagagggtcttctaccagggcctagatctttatctctgcaccttaagtcgctgccatgcctggtgcctgcaggtgctcatggacgtcgaataaatcaatcagtctcactatgaaaataagcaagattgtcagtcattctggcctcagtttccacagctatagaccaggaatgggagggggaatggtaggaggatctagttggattgcgatttcccttccttgccttataagaatgtgtgatgatcaaccagggaatgggctgaaagacgcctgtgggcggggaggtcatgcagcagctctgcatctgaccgtgggctgcaccctgtgggtgcacatctgcctcctagcaggattggagatgctgccaatatggcagccccaaattgggaagatggaaaggaacctcctgtaggccacagtcccatgttgtctccgagcttttgattgtttaaaacactgaacccgagacgtgggagtgtcctgtgtgttgctctagaacagctcttccactgggttatatttgcctttaagaaaggaagaagttacagagcgtggctttggaaggtctcctgctacagcaggctttgggaatctgaatgaagggggcgtaggtggcggggtgggagcctgagctgcgacacggatgggtacccccttctccatgtgttcccatcaacgtcatctctgtattctcccaggtatccgtcagctccaactaatacttttgaaagtagccttgatcctaggcattgaaatccacgtcaatgtggaattccaaggacttatacagcctcctgaggaccaagagaatgaacgtaagttatactggaggagtgaagaaggcgtgagagggtgttgatgggtgaggaagatgagattgagggagcaaaccaaaggctcctgagggctgcttccagagctagccaaagcctgtgcctttggggacttggcctggatgcagccttagatgtcgcaggcgcacatgtggtgggaagggccccgtgagccctctgcaaggcttctttccttctgtggtttgtccccactgctttttctttgttagatgagagtctcactctgtcgcctagcctggagtgcggtagctcaatcttggctcactgtgacctctgagcaattctcctgcgtaggtctccagagtagctgggattacaggcatgtgtcaccatgcctggctaatttttgtattttagtagagacagggtttcaccatgctggccagggtggtctcgaactcctggcctcaagtagtctgccagcctctgcctcgcatagtgctgggattagaggcacgagccaccgtgcacagcctctgtctccactgcttctacacatagtgtttttggcccagggttttgtgcagttcacatgactgggtatctagagatggtcctggctgtgaatgtggtctgggtggtgacccccatttatttggttttggttcacagggataggctggcgggcactggtgcaccccaagactcatcctgtgtcagagtatgaatttgaagtgatcatcggtggggatggtcggaggaacaccttggaaggtattggtctgtgctcctctgcctggctcatagcagagggaaagctgatgctatcctacctctggggcgagactgtgcgtgaccagcgtccacccttttgagagcctgaatgtgtgcttcctgccctgatggaatggcaggccccaccatcctctagccagctggcagtcaggctgctgcttttattttatttaattattttatttttgagacagggtctcgttcttttgcccaggctggagtgcagtatcatgatcacgctcactgcagcctcgatctccctggtctcaagcgagtctcccatctcagcctcctgagtagctgggactacaggcgcgtgccaccatacccagctaatttttgtattttttgtagagattgggttttcgccatgttgcatgggctggtctcaaactccttggctcaagcactctgctcgcctttcccaaggtgttgggattacaggcgtgaaccacctcacctggcccaggctgctgcttacagggcactcttgctgaggcactaggagaccaaccataccttgagtggctggcacctgtaggacttaatctacatattaataagcaggtgctccccccacgcatcccttttttaaagaggaatccctagtactgagtaatattctggccagtcagatttcaaattgtttgttaatggagactttgacttcttccctgaattttcatattcttgggtaggtaaatgccttattttcatctgcagaagagctgccctaactttcccatcagttctcatccctgactttccctgttgtctttatcagcacccccactttatctgaagtgatcttccttctctagccaatgattatcacctctgaaaatttatttccctccagggtttcgtcggaaagaattccgtggcaaactggccatcgccatcacggcaaattttatcaaccgaaatacaacagcagaagctaaagtggaagagatcagtggtgtggcttttatattcaaccaaaaatttttccaggaactgagggaagccacaggttggtgttgatgtctccggagccctaggatagaaacttaaatagtccctggtggctttttcttgggggattggtggggtgagtggccgtcggtgtccctcctgcactgtctgcccctcctgctcttttcactcctgttccttcttcctagcgcattgcttcctgcagaacttgtctcctcctcttgtattcttaacctcctcacagtgactgggcggctctgggttttgttttttgtttgagacaaggtctcgctctgttgcccaggctggagttcagtggcgtgatctcggctcactgcagcctcgaactcctgggctcaagtgatcctcccatctcagcctcctgagtagctgggactacaggcaagctccaccatgcctggctaatttttcgtattacttgtagagacggagtttcgccatgttgcccgggctgctcccaaactcctgggctccacctgcctcagcctcccaaagtgctaggattacaagcgtgagccaccacacccagcctgaggttttgtttgttcgtttatttgttgtaaagcattcgttctgcctccactagttcttcccaatgcctgccctgtgctgtgatgctgaggcatgctgcttggtgtagctgctggccggtggctccctggtttgcttgggaagctgactttaggccttttaagtatgtagtcttcttcctgagttccagctcaggcttgaaggcaaaccgtgtgtcagatagcgatgagattgttgtatgataggttttgaatagatcaacttagatattttgctaaatgtgccttcattctcttgttttctagaacttgatttcttttcattacatctattttttagattaattaaaaagtcagtagttcactctctgcttccaggcgtcaagttgtctatcctgttcttaagaatctaggagattcctccagcttccttgatgactgtcccaagaggcttaacccgataactaatccaagccctctttagaggttagcctcttttttttttgcttgtttcgtttttattcccgtaaaaacagttctgtttactgtcagtcatagtttttaggattgtttggggtgttgagtgaatacagagaaacaaaactccctgtatttccatgaactgatgatacaggacgtgagaatctgggcttagacacctttccctgcctggagcctcaggcccttgtctctgtaggcctgtgtgtaacctttcagcctgccctgatgcaccttcatctcagcaaacttacatgcacacgtttgtcttctggccccaggtattgacttggagaacatcgtttactacaaagatgacacacactatttcgttatgacagccaaaaagcagagtttgctggacaaaggagtgatactacatgtgagccacggatttccttcaaaactctttcttattgaagtggttaatatcaccaagagaaagaattgtctgatgggtttttcctgcaagggaatgaaaatgagcactgaatgcatcttctggtaacccctgatgttttccagtttagcgtgaacaactcttaactatggctaatttcaaatgtaaataaaaacggggggagaatagtgtaatgaaccctcacgtacctaccgtccagctttcacagttctcaacacgtggccagtgttctgtcagtaatatttctgtgcactccttcttcaccactggattcttgcaaagcaggtttcagacagcatttcatgcataaatactcagtttaattttaggtgatttggtttgtggttattgtgatttccatatctgactgatgattggttggttgaagagttatcttttgggagggggagcaacagagggaaaggagtttgaccaagaagcaataattggtgtttatgggagcctgatgaggattctggtgtcactgccgatacagttttcagaggtccaggcagcactgacaggatcaggctacacttaggcctctttatgaccacagaacaggtctgagctccatcatagccaggtccagctcagcctgtttctaggtgactgcatggtgtgccctgagatgatggcctgaaatatgaagtcagaagaccaccgcgtggatggtccctgaaggagagttttttaagtctttcctggtctcactggtctcaacgtgagaatcactgtccccatgcgatgagaaaaacagaagcagagacaccagttgtgctgattcaggcctgtgcagttcccacaagagactcacagctgaatttcagggagtcctttgtctttgcagggtgatgtgaatgcagtcactttagtctgagctacagtactaccttatatgacagcagagcggggagtgagctgacgagcatgtgccggtggcagagagccccctctttctacccaggaaccttgcgtgtgtttctcagcacagccaccctgtgtgctttcagggagaaccaggacaaagctgtttatacagcccactttcccaaaagcataagcaagacgtatctggttagatgctttctaaaattgccttgctaattatctgggactacatcagggttacattgctgtcagtaagaaatagccagtgaagcagttcgtacgccttgggacaaggtgaagatttaaatctgccacgcaggcagaactgtggttgtcagtcacaatttgataggagcagtctagaatgccaagagacctggtttactttgccttcatgtttttttttttttaagagggcaggggccatgcctttggtgtatgctgttaaatagtaaacccatgtggctacttagtattgagcaaacagtctttctaggaccaacctgagtgtttgtgttttggctttaacatcttgtagtggtggctgaaaggaccatcatggccacttagaaaccgtaggccccactttcagagaataaagacttggctcagtgtgccaggaacctccaaaacagaaaaggagtttttcagtcctttgttcttctttgtgggtttctgtggaggctttcaagtcttacttactattttgaaaacctctgctccattttcaacatattccttcccagcctcctggactaccattgctcccacctccatgtctttttggcactcaagcttttttgagttcttcctttgggtgtcatgagttatgcaaggctgagtgtttcacgtggtcccatttgacaaaagccatttactacccagaagataatgaaatgccctttcagttcacaaagtactgtcaggtatgtgatactcagaacaaccctgaggcagattggataagatcaaagaagtagtcattgttccaagcaaatggaaaagccatgactgtgtgtttaggcagcaaggtctatgttctctcgggaataatccaccccccaaacccctctttttttttttttttttttttttgagttggagtctcactctgtcacctaggctggagtgcagtggtgctgtctcagctcactgcaacctccgcttcctgggctcaagcagttctcctgcctcagcttcccaagtagctggggttaccggcacacaccaccatgcctggctgatttttgtatttttagtacagatggggtttcatcatgttgaccaggctggtctcgaagtcacgtcctcaagtgatctgcccgcctcagcctcccaaagtgctgggattacaggtgtgggccattgtgcctggctgcctttccccccgcccattttaatggtataaaagttttggttttggaacgtggagtcactttagggggaagaagaagctgtggccctgggttgtgtaacatggttctggctgagtgccagagcttctccatccctaccctcctctttctctggagacaggactacgccgacacagagctcctgctttcccgagaaaacgtggaccaggaggctctgctcagctatgccagggaggcggcagacttctctacccagcagcagctgccgtctctggattttgccatcaatcactatgggcagcccgatgtggccatgtttgacttcacttgtatgtatgcctccgagaacgccgccttggtgcgggagcagaacggacaccagttactagtggctctggtcggggacagcctcctagaggtgagtgctaagcatggcagcactctgtggtaggggcaggaataattaggagtgaatctgggcatcctgggtcttggaatgagcgtctgcagtgttgtacagcacaggtaaactccctgcaggagtcacaccaggaagtagaggagggctacaggccactgggagcccaggcctattaagtatgagtggaaattctgcccctttttgacttactccttgccaatctgggaaggagagcaatttgttattgaaacagttgccaaacactactgtcgacagcaaactctttgttccttagtttatttttcccattttgaaaggtgtgttatattttaattatttgttttatgtcttatctacagcctttctggccaatgggaacaggaatagcccggggctttctagctgctatggactctgcctggatggtccgaagttggtctctaggaacgagccctttggaagtgctggcagagaggtaatgggaagtaacccggggttcctttcatgagaaaactgggaagaaggagtggtttactcttcaggcagagtgcaagttcttccttcttctttctctgccttcttaattaaagatgttttcatgtggaaaagaggaaaggcaagataggatttcataaaatcatagaaacctaaagatgagtctcctagactaagtcttctcttactcctttccaagataaatttcttactgacagagaagaaattaaaagtagctttgaattcataggaaaacaccaaactgcttataagtgtttctcaaacccctaaatgggatattttgaagcagatttttgcaaatgcaataaaaatcctgtgatttgctttctgataaagaactaatgccttaaccagaagaattagagagacaagatttcccagatgaaattgggagttgatatcatcttattttgtctcttatttaaggtattctgactaaatatagtgataattcttttttgtgttgattttctttaaaattgaagtaaatattgggatgcttgaaaaaataaaagagtaaatgtgtgaccttttgagttggaggcagcatctgtgggcgctcacggttttgtgcctgctctctctcctcggctcttacccggtcggttcctgtgggatcactgcaggtgggtgtggggagcaggggctgacgtaggactcaagaagactggtcaaggatgaggatttgtcaggcatgtcaggtgacttgctgcgctgtcagaacaatcatgaaacgagagggagatgttcatggtgctggtcccgattctgagtatattgttgtgttattgcagggaaagtatttacaggttgctgcctcagaccacccctgagaatgtgagtaagaacttcagccagtacagtatcgaccctgtcactcggtatcccaatatcaacgtcaacttcctccggccaagccaggtaagaccttcttgtcagtatttacatctgggcccatctgcaggaccaatgagaattctgatctgttgagatgcgtgcacctattaataccacacatacaaggatacttttttagtcatccaggtagatgtctctctgaattggtagaagtagatagcattttccatcaacagattgagagctaaggcatagagttgttaaatgacttagagaaaatcaaacatgataggaatccaggcctttatgccacgtcttctaattcaaattcttactttacggaagagcacttgccccttagtgaggagaggtaacttccacctgtgttgttgctgccggtcacgtgtgacttacattgtctgaacctcaatttctttacctgaaaaatgggaataataatccctgactactcacaggattattgtgaggacaaaagagattgttcacttgaaagaatttgttctagtgtaatttttttttttttttttttgagatggaatctcgctctgtcacccaggctggagtgtggtggcacgatcttggctcactgcagcctccacttcctgggttcaagtgattctcctgcctcagcctcccgagtagctgggattacaggcacccacctccacgcctggctaatttttgtatttttagtagagatggggtttcactgtgttggtcaggctggtcttgaactcctgaccttgtgatctgcccaccgtgcctggcccctagtgtaattttctgttcaccttctacttgaagtttatacctttaggccttctgttaagaggcagcattattagtagtccaaccgagactcttagagggacctccatgaccgagtaactaattttttctctcttttcttttttctttttttttttttttgagacagagtcttgctttgttgcccaggctctctggggtgtggtggcactatctcagctcactgaagctttgacttcctggtctcaagggatcctcccacttcagcctcccaagtagctgggactacagctaatttttaaattttttgtagagacgaggcctccctgtgtttcccagactggtctcaaactcctagccttaagccatctgctggcctcggcctccccaactatagggattataggtgtgagccaccgcacccggccctgtgtagctgatttctagcacaaagtcccacagttaaaatgtgtttgtttttctcaaaccccaccttatttcataaaagatttaaaggtcatcatcctaacttctgtctgaactttacccagccttctatcccagactttcctttcagccattctgctcttaggtaggaatttgttacttgatatttgattttctttctgtttgactttgtaaatttctgccaggtgcgccatttatatgatactggcgaaacaaaagatattcacctggaaatggagagcctggtgaattcccgaaccacccccaaattgactcgcaatggtgagttctggtggtggctttttaaaatgcaggcagccccttcagagaagtctatactcattccctgagccacaaggtgcggtccgaggcagtggccgaagtactgtctgagacagtggctctcaacccagggtgattttgccctccaggggatacttggtagttgtctggggacatttttgatggtcatgattgggggtgggcaggagccagggatgctgctgaacatcccgcagtgcacgagacaggcctccaccacacggaattaccttggcctgaggtgttacgagagcacagagagaaaccaggtacagacgcggggcagaggggagagagggagagagtgtgagagctaaggtttcgggagaagactttgtggaaaaagtctttggctgggtcctgcaacatagccaggattcagtgacaggtgaggaccactccagattttgtatgtattgaaggccctgaatacttttttgaaagagaatgacatgagtacacctggtcagccacacgtgagaggggttggaggagggaagtaccagaggcagggagaccaggtagaaagacctcgccatagtcaggctgaaggtggtggaggcccagatctgggcctgatgctggggatgaagaagggaggaggcagtggaggagacctcagactttgggccaggtgcaactgggtcccaggccaagctttgctgctggtgaattgtgcggcctcgaagaggtgattgaatagctctgaacttcgatttccttgtctgtgaagtgggggcagcagtgtctacctcacattgtgatcatgagtgccgggcctgtggtggatggtcattgccattgttggttatgtgagagagaatggtaaggaggtgaagtcgatgggcaggggcaattgatcaccttgtggggcaagaggtaggtgtttgtagatggtgctacatcagcgtaggcaaggcagagggagggctgagagggttgagaggtttgagtcatttggacattgtgaatttgacgtgccattgggatgccagggtggatgtgaggaccagcaggcagttggaaacatttgcatttttctccactggagcgtcttctctttgaaagcagagagtgtatctttattcactgtttttattttagagcatggaatattgaagttgcctgttacatattggatggttggatatacacataggagacagatctgagtaaaagctcatttctgagccaagagatggcaccagaaggtggttttatgtgttatcgcagaatacattttcatggcgaaaaacctaaatgaaacaggattttcatgatacttggtttttagcttatgttcacaaattactaaatgacttagtacaaacttcagttgccctcggtaagggaacagactttcttggatataaatagttcatagattcttttgaatggccgatatcagagctcttctgatgtgattaataataggatttttaaagaggctgttcgggttttagaagacgtttcaatgaactgtaaaaagcatcccagcacatgtgtttgcctattcagtttctcagggttgagaattcatagtacaaggtgccaagctctgttcggggactgtctggtctggggccccagggttgtcagcggagccctgcagggcttcttctcttggcaagttatacagtgccttggaagtgcaagggcgaggcctgggtgctttgggttgaacgtgccaccctatagaatggagccttttctcctctcctcttcccagtgttactttggagggggtaggcttcctcagctaggtgccagcgactgtccgggaactcagagctgctgtaagccaggctggccacacagtaggtggcgctcctccacctcagtgccgtggggacagcaggttgtggctgtcaggctgtggtccctcagggtactggggggtggacgttgaccttagagtctggataaactagtagtttcttttcttagaattcgctgtcatgataccatttgcataaccttgttcctcactgttttctttgcatggaaactagtgttgactgtttcgtccctaccctcagtaatttttcaaaggggacatgtgtcctacaaagaggattctctgtcagcattaccaggtgaccacacctccaataatactgtgttttgttgttttagagtctgtagctcgttcaagcaaactgctgggttggtgccagaggcagacagatggctatgcaggggtaaacgtgacagatctcaccatgtcctggaaaagtggcttggccctttgtgcaattatccatagataccgccctgacctgatgtaagttgtgatcaaactttgtgtttttttatactcctcaaggatctcagaccactctgctatcaagtaacattttgtcctttttcctagaatgaggtacatagtaagatactttctctagaaggcagtgattttgatttcactatatttgaaactctgtatgtcatgtattatatagctcaacccaggaatgatttttatttttgtttttttccaatttttttttttgtgctcctatagctgagttttaaaaatcacaacactcataagtcaaaaactggttttgacacccacctgggcctgttagcttcccacaaaggaaaactgtttattggccccggttgaactcttcatttcggccagctgtctctcaaattctatgggtcacaagggaaacctggctagaacatttggccagctcaaggcaaatgtgtcactactaacaaagcaaaacatcatgaacagttgaccaatttatgatggttcattggtattttctctgtgttaaagactgcgttttttacagacatactctgttgtcctacccacctatcccagtgacatctcctttggccattctccactcacctgtctacagaatcagagttctagggtgaccccaggtcagctgcggggaccagcacacccaggttcccccatcggcatttgttaccacggaagccaaaccgaaggattcagaagcagagcatgttgcattattttggtttcctgtccttttcatcattaggtccacttaaggggccaatttctgtttgttttgtttaatgattgcttaaggaatcctacaagatatagttgctatttatatgatggttataaactgacaaggcaagagctggtaaaaatagccttgtgcagtgtggattacaaatggggatttctggtgtgcttggatggaggtaagtgacctctggtgctcctgtcacttagctcacccagaagttgatagcaagtaagtaaaaatagggcttattcactcctgccaaagaaagggggtagggcaaggaagagcagcttgggaaagattgtgatcagtggcagaggatgggcaggtgagtcagctctgttccaaagggaacaggcagaagtggttgagggagcctagcaggtgggggtggaggggcgcctggagaaggttaggggaccgtcttctaggaaggcaaagcagcacagggacagcgcggcactgttcagcagcagtgaggtcatagtttcagaggctgaacctatggtgaggaggagtttgagaaaatggaaaatgctgtgggatcctagattaacacagaattaagggctgctgggttaacctgaagtcatgtaaagaagaatgcgatcagtcttctgaaaagcaagaggcttaaacccagtaggaaatggccattaatctaaataggaaacttagcaatggaaaaattttttgaggaggattttggaatttcccctccaggagaaggctaagattgatcagagctgatttagtaccttaacagcttgtcaggtctaagggccatggtgggtgatagtcccaggcctgtaggagcaatctgatccaaatgggagatgtatcatgttttgacattagtttaatgtggatgggccatacacaaggatcaagatatattaaagatagttcctattattttttatttttatttttagagacaggtcccgccctatttcccaggatagagggcagtggcacagtcatagctcattgcaaccttgaacttgcgggctcaagtgattctcctgcctcagcctcccaagtagctaggactgtaggcatatgccgccatgcctagctaatttttaatttgaattaaatttttaatttaaattgaactcctgggctcaagcaattctcctgcctcacccttccaaagtgttgggatcacaggtgtgaaccactgtgcccagccagtccctattctcgagctcacattttagtagtaaatttgtgttactagaaaaatgagagtcgttttttgactttctccctttttttctttggtgggtagacctttcatcacttcctgaggttgctttgcttttcctcagtaaaaagaaaaagaacaagaggtgagataagacaggtttgctctcaaatgtcagcgatgcacagcaccctggattttagctgaaaacagagaaaggacgatgactccaggatactgcgtttctgtttaaggactgtcaacctatcttgatatgttttccttgtcctgtttctcagagattttgattctttggatgagcaaaatgtggagaagaataaccaactggcctttgacattgctgagaaggaattgggcatttctcccatcatgacaggcaaagaaatggcctccgtgggggagcctgataagctgtccatggtgatgtacctgactcagttctacgagatgtttaaggactccctcccctctagcggtaaggcctggaaggagctgctttgcggccccctgctgctgtgctgtggcccggctgttcttccttccttccgactgtcccgcagcagtgccaccaaacacaaagttactctgtgtttttaccagttagctgtcagggaaatctctggagctttgcttcattgtttctcccttctctagtagtgtgttctcaacccctcctttctttctcactgcatttataaaaatgcagaaatcgttcctgtgccgtctttttccgtgaccaccaccttctagtgctcgtgctctcagagccagcctttttgaagaagtggcttgtgcttgtggcctctgcttctgcacggcccaaactttgtaacgggttataatccggcttctcttcataccgcgctactgcagctgttccccagtgaggaggattcccacctcctactcttttctcagttcccatctctcatgcacttgcttttctgcattgttgagcaccggagaacgatgtcccttttcgtggaattatcttgtctcctctgtgtctgtgatcctgaaccactcttgttgcccttctttctcctgtcactgtgcattctcttggcttctttctactcctacttgttagcacttcccaaaaatctttgcttgtctctcagcttgctgtctcaggctctcatagtgctacaaaaaatattcctgttgtcattaattgtcccttagagtaagtgtaggttgaggctagagtgttggctgtggggtctgacctggatttacagtatcccaggcttccacttggccttaggcaagttactcaattttcctgtgtctcactttccgtcaacctatcttgtaaaatggggtaacgggtgtaaaatggggataatatgtataattacattgtgatgtgccaagaaggatgtttggccagtggaagtacttaataaatgttagtgatttactatgaattaatgactattttaaaaattgctgttgttactaatgaaacattgaaatccaaaaagcttgtgttaccaccctccagtgctttccagcccatatattcttgtaaggatctgtggcttttcctggttagccatgacgttcttacaacagaaagccacagctctaacatcgacgtacccattcagtgccacccccatctgtgtgcagctcagagtgtggcatctgcatacactaaaaccaggaaccctgagttcatcgcctctctgcttttctctctccctccctctctctctgtcctgaaatttttgtcacaaaaacgagccttcagcactctgctgtaactaacaatcacagccagcttccaacttttgaaaagcaaaagtgcgggttttggtaactgtagtagattgggaagaagagtcatttttgtttatgtggatgaacaaaagaaggttcaatgtccatacccaagtatgcatttcctccgtggcgtttcctactgagaccacatgcttgtcctggagctggtgaacctttagagccttctgaggctctgcgaaccatccacgagggagagtagttttggtcaggattttgcggcgccctcaagggctgtgcttgaacatcactggtttctattcccagacaccttggacctaaatgccgaggagaaagcagtcctgatagccagcaccagatcccctatctccttcctaagcaaacttggccagaccatctctcggaagcgttctcccaaggtatgtggaggagtctcttgattggctgcaaagctaatggcaaggtatgtatggctagaataatgcagtttccctcctcccttggtacaggataaaaaggaaaaggacttggatggtgctgggaagaggagaaagaccagtcaatcagaggaggtgagattcacttggggaattgctagaatggtcatgtggaatagccccttttggttaaaattcttcatttccacattggtattgctaggtcttttcatattcatcctttatgagaatttctgttgggctttttcttttcttttttttattttcttttttttttttttttttttttttttttgagacaagagtctttctccattgcccaggctggagtatagtggcacgatctgggctcactgcaacctccacttcctggatttgggttcaagcaattctcctgcctcagcctcccaagtagctgggattgcaggcatgtgccaccacacccagctaatttttgtaatttttttttttttttttttgagacagagtctggctctcttacccaggctggagtgcagtagtgcaatctcggctcactgcaacctgcacctccagggttcaagcgattctcatgcctcagcctcccaagtagctgggattacaggtgtgcatcaccatgtcctgctaatttttgtatttttagtagagacggattttcaccatgctggccaggctggtctcgaactcctgacctcaagtgatccgcccaccttggcctcccaaagtgctgggattataggcatgagccaccacacccggccaaattgttctaattttttagtagagatggggttttaccgtgttgtccaggctggtctcaaactcctggcctcaagtgatccacccatcttggcctcccaaagtcctgggattacaggtgtgagccaccatgcctggcctctctggttttttctgtggatgtttgcctttgtttaattttccagagcacaccagggatgcacacacgtgcaccagggcctccttgtctctttggttcatacatgtgttcgagggcagtggcttcctggaatgtggcagtaccagcacaggtcccagtactctttatacggccctacctccaggcttgctgtctctgtgtggacacgggaaccttgagagctgagccagtccaccagcccccatgccaggtcctgagtgcacttctgtgagggaggggcatggggggagcctcctgtcacagcgccgggttctttggggttggcattgaccaggaggaagctcctcggggccacagaggagaaagaccgaccctggtgagcactctgacagacaggaggatggacgttgccgttgggaaccagaacaaagtgaagtacatggcgacccagctgctggccaaatttgaagagaatgcgcccgcacagtccatcggcatacggagacaggtaaacccaacccgtgccctgcccacaccgatttggtcagatcacacaagaaggggggatcttttccatccattgagatgggctgtgtcacagaccccagcgttcgtgggctggcatctggctttccctcgcctgactgcagcaaagaagagccctgtatatgcttgcttcaggctctgagggttgctccgtcctcagtgttcaggcctgaggtgtccactgacaagaatcagcagagggatctaaaaaaaatctgtattcatatacctgtacatctgtacatgtttgcagacatatttaaattctagagaagtacacacttactgaggaaaatgctgaaaagtacagtaaaggtaattaagccacctgtaattctattaattaatattttcctgcccttctttctggtgtttttttcagtgtattcttgtttttgtagatgaggtcattcttaacatatacttttcgattctccttttttcatttaaccgtaggcgttcccatgttgttcctgactctttacaagcaccttttggaatgtgtgggcatcaggcttctcttagctgttgctctagtgttggatgttcgagttgtttctcatctttggataagcgttcttatgataaagcttcttttgtgtgttgcagctgtttcccgggatattttcctaggaatatgagcattgagtgctaagcagcactcccacatgccatgcatgcgagtgcatggcagcagcttgtggcttggggtgtcttggttagggcgtgtctctccccttgattgtctaaaagtcactctgacttcttacaagaggcggggctgggattttgaagattcgcactggaagtgtctcataaatctcaatgataactggagagagcagctggagggcagggctgcttctctgaatttctcttctctctctccgtcttttccatgcccatcagccattcttcctatggaccagatgggtgggagcagctttgcttggagtctggccataattaactacctcccacatctagtctttgcacgccagtcttttcatgctatggctcacagaaaaggtgatgatattcattgataaacggttgtggttgtctggaggctctggcagccccaggtgcccctaccttgggaaggctggaatgctgtccgttagaggaaggttgcctctaagagaaggttgctttcctcattttggatgggaatattagttttccaaatcagaattagtggcttagactcagagaacatttagcttggaaaagagatgatgcgtattacagcttctgttttcctttttctgttcttttgcatttgcttttggtttgggggaggctgttagctttgctttagaagtgtaactttctaagaatgagtccccctcttccccacagttcacagatatggggctgtcgcctgtgagttctttctgttcttctcccaccttaatgtatttttattttgttttgtctccatgtcctgtccccacccacacttggcctgtgtgtcccagctgacacaagagcgtggggccagccagccgtcctgctgcctgcctgggcaggttcgccctgcccccaccccccggtggaaacaggtaaaggaactgccagggccaggatgggtgctgtctctccaggccttcctacccctcctcctgagccagccagggttcaggcctgtgctctggaatcctagctcatgagggcaggaaatctctgctcattcgagtagtagctctgggaaaacattgaacaggcagtgctgattgattgcatgatttatgtaactcctggggatttgagaaagttaaaagggagactgttgatttggtttgaaactcgctgaagctgtgtggtaggtggctcacccaagggtacccgcgctcttgggtttgctgttgtcacatttgtctcaagttgacttttttctagcatgtttcctcgtgaccttgggagagagaattctgagtatgtcaggcctgagagttggggtgtagagccttttacattaaataggagaatgttatccaggaaaatagtctggaactatgagtttgtgtttgttttaaatcctggatgaaggtattcctggacattttcttggtgttttctctacatttaaattaatgtttttggaaattttcactaaaaccttggcaggatctcctggaaaactgcttatcctaagtagtacagaatagggcaggtgatggcatgcgctttctaagagaaaacccagcagaggaattgggacccccagctgcgtttcctccgtgtcacagctgagcaagtccctgctctcgagtggagccagggttggctacctcgttgtccgatatcatttaggtctgctgagatgctgagagggccatgagtgggccctggatgccgtcagtgccttccgtagtcggtctccccagcctcctgtgctgtaaagtgagtttattgttaggagatactgaggagtggtgagttgggttttatttaaattacttacattcaggcaaaaatgttcctttctaaccattctttgataatatagcacattaaaggcagggcccaaaaggctgagatggaattttgggagcagtgtccaaactcacgacagaaggcgaattcattctttctctgtgcatgagggaggtcttctgaaaaatgtaattggaagtttacttgcattttattttcttaacctttgccttgatgtctaggtggaagatatgatttgaaagatgatgcttagttgaggatctgttgcaggggaaggtgaactccaaattggattccaaaacctcttacagtattcataacgggtgcctgaggtgggaggagcagagggagagggaggtcaggagtgacataggcgagtgggggaacaggtggttgtggctggaatggcactgaggggccgccagaagcactctccctggagaatgttggtagtccctgccagcgcagcttgtcacctgagtcggtatggtcatggtggagtaggagactggcaggctgtgtgggcagtggaatagaaccatgaaagtcaaacgcaggttctgtgggatgggcactggagattacagttggagacagtagctgggcagatgtataaatgagacttgattggtgagaaatcgttagcggtgagaaccccgttaggttctttggtacaggggatatccaatagggatttgcgaatttaccaggtggcagggagatagcactgtgaaccggaactcacagttcttaagtccatgtgaaatgtatagtattcacatagaactttctcagctctaaatcatgcatttgggccttctaaatttatctcctgaaagagagttggagttgcagtgccagatacttgcagaagcctgggacagaggaactccagtggtacccaggccctgtgtctgatgcctcccatggctggccctccgcatctcccttcaagaagcagggctgactggcagcatcccattgtgactcatggtgcttctctggaggtggttcagaggcaggagggcattgcctggtaggacagtgatagctgagttgacagaagggcccgcctcagcctaggtcatcatatggaagagggaaaataatagcagctcagcctgccagtggcttctctttatttccttactttgtaaacactgtggctcttcccttccccacccttttgccttttgatctcagaaacacatcccaaaggcaagctctgtgcattaaccagccctagtttggaagtagattgtcatgggagctctgagcgagtacggggctgtttccccagacctcgtggcttccctgctccccggctccctgcatgctgccccatgggtcacctgggcacagggagatgagacttccttggaaggtatcagagaggcctgggaatgtgtgattgtttctcaaataccagcggctttgtaaattgtagacagactctcgaagggaatacggtggagggggcagaaatgagggaaaagccagggacatgtatatggcattcaaatgttagtgagacacatttaattttgacatcatgctcctgcctttgttgcatttccttgttagtttcctggagccctttgagcctccatgagtgcagggactgagaggagggcagcagtgccagccactatcacagctgctccctgaaggggctgctgcttcgcttcattggatgcacgtgaccaagcccttgagagggggtctctgtgtcccctcttagtggttggcctgtttgccctctctactcatcagcaagcctatttcttgtatccccaacttccctgagaaaactgttgctccctggcacctggaaagtgctgcaccgctggttctccccagtcccgcagatcacccctgtggctgtgcctatcagaaggtgcacgtcccacctgggggcccacgggagaccactgggctgccctctgaggatggaggggcaaggaaaggcctccctggggtgcttctgacaaacacccttcagtcctcccagaaccagcttccacatggccactgtttgaatgatgttctctctgtttgtgtctgttggtgtaaaagcaacgggaaaaggagtgttctcggacctgccccaaaaaagtgatcaccctgtctcctccccctactccacctccctgtcgggcacatggcggccagcaggtgatcctctctgcatgctccatgttcctgtctctgtctgcctgcctgtctgtgtaggtggctagtgtagagaccaagtcactttccctcttaccagcaataactatcaagaagaaaggctatgcgtagaaaccgtttgtggtggaagcaacttttatggccctcaggatggtgcatcctacattcacacctgaccctagtcagtcccacccacatcatggaaacacgactgtcccaccacgaactagaagttcaactgtaattgatgtttgtcgtgcatccgaggcccaggagccctgagagcagcctgtttttctaaaaccccactgaaggcagcccttttctctcgctgcacagtgaggtggagtaaggccttcgggcactgccgcagggcttctccacgtgagtttcgttccttctgattctgggagctctgcctcttgcccattcagcatcttccaacaaacactcctccccactgcacttgcacgccaggcacagcattcaggagcagccccatagccagccacagctgtggccagtgaggacagcaggccagtgaggacagcaggcgtgtgtctgcggcatgtttgtaggatggcattgttgaccttcatggtatgtttctataaaatgtgagtttcaagagcaggatctatggaaagacattttcccacctagggtggcctgtttaaagtgtgaccgtattaacgtgactgattttaaaggccccacctgtgtccatggttctcagaactgagccgttgcaggttgagcagctgctgggtgccttcatctacacaagagctagccgtcctcagcgtccgctgtcgcctggaaagcacgctcagttcttctcaagctgtgtctccgtcagttctcacagtaaccctgtgaggcaggtgctgttactggctccgttttaccagggaggagactgaagtatagagtggagaggccatgtcacgtgtctgagccgcatagtaagcaatgcagccagactcgaatctggcttgtgggaccggggctacgctctggcctccctctgcccacagagacattatgctcacgggtgctagataggagcagccacgtcagaggccttggggctgtttttccacccgcacgtggctgtaaggtgaacccttagccagccagagagtaatgcgaggagccttccctggtcctgtgattgccgcttctggctcctcggatgagcaaggccatgtccctacctgcaggtctttaccctttcacatataccttcccgtccattcgccaaaaacacattcacttctccctttagtaaattatgctttggcccgatgctcctattcaggaaccacttcccactctggagtttcctctggactgctgtcttagtcatttattctagccaattcccacctccccacctttgctttctaaaatgtcttgttgtggaatgtgtcacccttttaacctgcctctccttctaaaccttccatttgatgcctctgatcttatgccactgtgtgaaagaaatatgcttgttccacctttgtactaaccatagttcttcattgatccgtgtagctggcctcgtcggaggccagtggggggtggaatggctgtgcagaaagtcggccttgtgtcatgggatttgatacagatgggattatggttacctggggatggggttagtaggggaaggcgatatgtgttgaactctgcatttctgcccctgaatttcccactgtcgtttagtaggtccaaatagagcgatatgcatggagcttaagtttctactttgttgccaacagacatacagggatcttgatgctgacaaccgtggcaagcagagcccccaccatgagagggtaaaagagcatgaacccgtggcatgggatgctgagagccaagcacacggggcacgctgtggtggtggggcagcgggaagggatatgggggacggccccctccccttgctttttgcacgctcttgtcacccagccaagagccagaattctttttgctagcagtgttgaccaatgcaaatagcattcactgtaaagcagtcacccatctggcattcagatgggatgctgatcctaaatgtgcgtattgtaaagggccttaatgacttcccatttctgcccactgttccccttccaagaccatactatttctacccccaaactatgtgccagtggtagagtagtagcattggactgtcagatacaacttcttagggagagggtctaaatcagtattcaagtggcattcagcagtcacggatcttgaagtggaaatcctaagagagccaaagctcttaccagcgtgaggatttttccagtgggatgagaatgagggggagaaaggtaggtgatggcaaaatggggctgtacccgtggaaagctttagtcttttctgaaacactgaggggagaaattactgattgcagctggccatcgtacaatgtgagggatagccgagatgcccagttaaagaagccggcttactttatgaaacttttgttcttgttattcctacccttaaagatctccaagtgggtacagctctgcagctagcgggaagaatcatctctagttgttaatctcacaaaagccattttggtttctaactcccttctgcctttgctctctgagaaatgcagttatggccaagcagtaaattaggttacccctcggacccgataggagctaatcatagtgccatcttcctgcgccctctcaccaggctagcagcgggcaatgtgtgtgctgcctgaacctggtgctgggtcggagagtggagactgggctggaggtgggggtctttcccaccccctttccatggcctcgccccacggtgctcaccctttctggggctgctctcccacggcgctgtgtgcccagcctctttctctcttcttcccaggctgtgtcccctcaaaaaggaaagcagcccttttcactgagcagggcagtgccctccattttgcagattgtgtatttaatgagatgctgataatgtttaatgaaacagcgcctaaaagaagaagggaggggaaggccgggtgcggtggctcaggcctgtaatcccagcactttgggaggccgaggcaggcagatcacgaggtcaggagatcgagaccatcctggctaacacagtgaaaacctgtctctactgaaaatacaaaaaaattagccaggcatggtggcgggtgcctgtagtctccgccactggggaggctgaggcaggagaatggcatcaacccaggaggcagagcttgcagtgagccaagatcgcgccactgcactccagcctgggcgacagagccagggcgacagaatcagactcggtctcaaaaaaaagaagaagggaggggagcatgttgaataggagagattggcagtgagaaacaatttgaagtttagggctgtggtgcagagaggggatgagttagggtttttgagctcaggaggcaataaggcttgcagagatgtttctctctttttccctctgaactggtttctgcactcctcagtgcagggctccaggctggatacttttgaggacactacttaagttcttttcttggactctgctgccatcctccataacctccctaacctccataacttccctaacctccctaacctccataacctccctcacctccataacctccctcacctccctaacctccctaacctccataacctccctaacctccataacctccctaacctccataatctccctaacctccataacctccctcacctccataatctccctaacctccataacttccctaacctccctaacctccataacctccctcacctccctaacctccataacctccctaacctccctaacctccataacctccctaacctccctaacctccataacctccctaacctccataacctccctaacctccataacttccctaacctccctaacctccctaacctccataacctccctaacctccataacctccataacctccctaacctccataacttccctaacctccctaacctccataacctccctaacctccataacctccctaacctccataacctccctaacctccataacctccctaacctccataacctccataacttccctaacctccataacctccctaacctccataacctccctaacctccataacctccataacctccataacctccctcacctccctaacctccctaacctccataacctccctaacctccataacctccataacctccctaacctccctaacctccataacctccctaacctccctaacctccataacctccctaacctccctaacctccctaacctccataacctccctaacctccctaacctccataacctccctaacctccctaacctccataacttccctaacctccctaacctccataacttccctaacctccttaacctccctaacctccataagctccctaacctccataacctccctaacctccataaccctgcatgtgtacttgccctctctgccccacctctacccagtcctacccagtcccccactcctccccttggctctgactgctctgccccccagggggctactgagtctccctcttgcttccttctgaggggcggtgcttacagccatcctctccagctccctctggggcctgtgttgctgagcccagggccaaggagctggctgagtgtctcaagcagagggtgttgaagtaccaggtaactgccagtctatgtcgccaccccacggagctatgaagtgcacgtggctgaggtagggagtgtgaccaatctggcttggagctggaggagcagagggctttctagcatcatgacttaatgctgtccttcccacctgtaaatagttcattctgaacctggtgggaaatgaagcagttattggttgccaaagctttcggtcactgcctcaatctctggggactgggttcctagctgcatgggcccacggctaagggagacccttgcccagttttgttacgtgtgctatgtgcagtctgcagaggatttgggctcaagtcttttctcctcatctttgcttgggattcagctggctctttggcaagcagagcctctctgagcactaagtggaaggaagagatgctgcattcctggcccttctgtagaaggagcgagcttcactctagatttgctgtctccgctgcctgctacttctaaggccaatggagtgatagggtggcgggagaatctttttgccctggagaaatcccagctcaggccgggggttgcttggcagagcacagagcatgtgagtcgacaagccatccccctgcccttcctgcaggctgccttacccattcagagggaggccgaggctgtgccgggcggcccacagctgcgggaccgcgttccagggtgtgctctgctgcaagcatgagggaaggacagttaaaagcaaaacggaagccttgcatgggccgcttatgcttctggagctactttttttttttttttttttttactatacatggtatttagataaaggtctagagtaaaaggctctacaaccatcttatgttcagaggtcagtgtgtgacttaatttaacatttcctttacttttgtttttctccatcttgtattttatagccagagcctgaacctcctcgtcgattttttgtcgaccagtgggagctttctcttagtctccgctcctctgcccgccccgcctctccctcctccgactccctccgacaggtagcatggcctaggactcactaaaactctgccctccgcagcctccactcacgtcactttcgcaagtgtcatgtaccccaggaggctgcagtgttcctcacttgggcccgtctcctgtagggagccagctgcatgtgttgctgtttgcctgtgtcggtctcgtgtgtgaggtctgtggcacactcctcagctaaagtggctgctggctttcatccaactgtatctgacacatccaggtctgttgatgtgaacccgctttgatcctatttcaactatatcaaataatgataaatgttttgcagccattggcttttttaacttcacatgtcttccaaaataatatgtgttaaaaagtaggaaccacaatgtaattaaatcacctcaatggaggggtgatgatgcggtattctggctgcctgttgtcatcatttgaggaatgtacgcggctgtcacctgaagtagcgctggtccagttgtagggagtttctagagagattggaaggtctctttgccactcctactggtatttcccatgcctgagttgacgccagacctcacgtcctatgtgcatggtagcatatgcacgcgtatggtgtgcggcgggatctgaagtagcactggttcagttgtagggagtttctagagagattggaaggtctctttgccgctcctactggtatttcccatgcctgggttgaggcctatgtgcatggtagcatatgcacacgtatggtgtgcggtgggatcgatcccgcaattgccacatttctgctattttttatgagtgatgagaaggaaaccatcgcttttcatgccagaaacaaatagaacttgagtcttcacctctcttgcagggatgcttgtcagtgttgccaacttgctgagaactgaatgtggcagatgcctttgcacgggcagccccaggtttagttcaactaaacccagatggtttagttcaggagaaaagggtcctggctgagcagtgagggcccagggctggcttggtgtcctggcctcatacttggcatctggcccacactgccccgtgtctgctgcagaatgagagaaatgccattttctgctccctcagtgtcagctgttaagttacctgctcagctctgcctggtgtctgtctgtcccaagcctcagtttctttagtgtccctaaagaaggtttagatctgagagccacgtgtttgtcttgaccactaataggtataatctgtgaagttaatgggcaaatggcaccaatccttgggaatcttatttttgaattaaaagctataattgcttcttcagttcagctgagccttgagctgagccacaagaacggcttcgtcgtgtgtgcatctgtgagcccctcgagcgcctgcttccccctgcccggtgcttctgtgtttcttcctcacacgaggccttatgtgtctgtccattcaggccatgtcctaagggggctgttggcatccccgggataatggctcatggtgagttgctgagtcagaattagggtcaggttcccccagggggcagggagcccccttactccatgaagttcatgagaggagcatcacccacatggtggtgtggccatctccacatggaagggtgatttgatcgtgggagtctctagaggacttcctctcgggacaggtcaaggcggggctgcctgggcacccagcttaggtgtgagcagggcggctcatgatggagacgtggaagtttctcctgtggtttcagtgttgccagaaagaggcttgagttggttgggtttttttctcttacctttcttcaacctctaaaataagccctcctggcctagaacacattcccaccttcctgggctggtggagcagcttggctgcatggccacacctcgtggccaacatgcccagcccagtctagaaggctctggcctcagcacctggatgggccacacgggcctcatcatgctgccctcagacccccaataacatcagcagggagaaagggctgagaaggcttcttccaaaacagcctgggagcgttcgctgcctgtggcaggcattgtggggtcaagcgtcaggaagcaggaagagctggcgacgtgcgctacccacacagaggcggcctgtgcaggagtgaacatggttccttctgagtgaggagatggcctcctggaccgtgaaaggcaggctcagcctgggcactgctgcgtgcatgggggtgcccctcgagttctgtgaatgcagcccagctctgcaggacccaggccctgcctgcctgtctctgtgcgcgttcgccctgccttctaccaccattccctggaactgtgcattccacagagatgggagagacccagttcttcccaaggaagacacttcccctgcagccgtcctgcctgtgccggtacccctgcgtggacactgacgcgatgtttttcttccacccggtttccctgcctgtgagcactgtgttggcatggtttgctgctgcaccttgtattcaaattgcacttcccaaagatttctttttttccccgtgtcttcttaatttatgtatttttttccttctcatttcccttcattctggtcattttgtaatcttcaaccgatagaagtatataaagatgtacacgggcggagtgagctcattggctgagcagatagccaatcagcttcaaaggaaagaacaacccaaagcccttctagacaagaaggaactggtaagagacgcctccaggcactgtgtagctagacccagcacagccatgggaaacacacctgtgtgctgagtcacttatagcttgcatagcccgtgtatgctatgcggtaattgcttttgaggttgtctgggttttgataaccaaattcctaagactgcagtagttgttgtgtgagtccagggacccacatatattcatgtgaactatgtcaacacggaatagatacagatacagctaccctcagaacagaactctgctagcatttccatttgagctggggaccctcgggccccttcctgccttcttccatgtgtgtgttttccatcatgcccctcccatcccttctcgcccctctccctccattgctctttctctaagactctttcttgtcgatatttcccggcgtcgccaggctgtatcatagcattactcaagtctggtgtgaagcactgtgatgctggctccctcgtcagcagcaggctggcccaggctttcgcggttgtgccaagtgttctctgtcagtgcgtggaggcagtgactgtggcggtgccgtcactctgtggcagagccaagagcacagttgaccgtagccagttagaagtctgtctcaaagcagaccccttagtgagggttggctttgctctcgcaaggctgtgcctctaggagggcctgtgtggcactccctgaggtgctccccttcctcccgaccgccacctcctgcagggctccatgaagaaggagttcccgcagaacctgggaggcagcgacacatgctacttctgccagaagcgggtctacgtgatggagaggctgagtgccgagggcaagttcttccaccggagctgcttcaagtgcgagtactgcgccaccaccctgcgcctctcggcctacgcctacgacatcgaggatggtgagacaccctgcgcctccggccccactgagaaactgtgcttggacagtgtttccatctgagctgggcgcctttgggccccttcctgccttattccatgtgcgtcttttccatcatgcctctcccagcctttcttgcccctctccctccatcactctttctctaagactcttacttatcagtatttcccagcgtcaccaggctgatgagaatggcatgcatttacctaagtcatttccctgacttcagggacacttacttgctttctgacctcggggtgggaacttgagataaaaggaacacaataaaaataaggttttttgtctttacggaaggggacttgcacatccatagaagtcacatattttgcctaaggttgatgatgacagcaagttggagctgggtctcaggcccctgggttctcagacctttgctcttggagatgtctgcaaggtggcccgtgttaacacctctctggcatctgtctgatctctctctggtggattgcgaaccattgcacagggcctgaatctgatttactgtggtgttcaaggcctggtctttggcaacatgtgctgccagtttttacagtgaaaagaccttgataaggtaacagtagagaattctgcacacagacgatagagccatcgtgatgggcagaggcaggctggccgccatctgaggaccctgcattgaggacccccagccccattcctataggatgctggagggacttcgtgggaggcagtcttatagattccagagtaatgagggggcctagattaataggagaggcagtaatctttataaggtggcataaagaccttgacattgatagaagattgcgtgactgtgagattataaagtgaggtcatataggagagggatgccatgccgttaggacctagtcacttcagctgtcctgagggtgaacaaacagtcacctctgttagaaggagcaaggaaggagcccagagaggtgagccgagaaaggctgactcctgtcatggtgcctggcccttctgctatgttggtaaaaagcactcccgagtcggggaagaatgaaagaattaggacgctgtttagataaggcaggcagattgtttgctgtcaagtcttctgttccacctctcacacacacctgctctctggatagctcatttgatctcaaggatggggcctggcagagggagccacccaacctcgctgagctgtccctgatgctcagggtgttctagttagcctctcaccgtggagtctgcccggaaagaagatgtcgcaaggtgcagctaattgatctacaggtacttttgcccatgggtgtgtgtgtgcatctttgctgcattctgtgaaagatgcagaagtgtaatgtgtgcctccaggagctcactgtcctatggggatgagacccatgaagagtagcaggcgacacgagtgtgtgcagcgaaaggctcggttacacagcctaggttgtcgctttgtagaagcacaggggaggaggaaatctgtgaagttcaagagcatcttgggatgacctccctgacccttggctagactttgagagagaagggtatggtgactgagtagagggcagaggtgcgcacctggtgggagatcgggtggcagtgagaggccgagacaggatgaggccagcctggttgagtgcagtattgttaacactggagcagagaagacagccgttctaaaccagctccccaaattttaacccagataaaattttcatcagcttagcccctccacagtccttcccctcatctgtcagaggacagatggactagagccaggaaggaactttaggggcaccgaagttttagcctgttttttatccaagttgccaagtgtctcagaagtctaactgaagaggctcagagaacaaagaataagctggggaggttgtggcaggaggaagtaaccgaggccttgtgctgcgccccaacacatcacgccctttgtcctcacaacaaccccattaagtaactttttattactgtaattagaagtcaggaagctgagttcagagaacttgtatgttgtttgtccaaattgacacaactagtaatagctcacttgcaccagatgacacctgagattcattccaggtcagagattcagggattgtgactccaggcctgctgccaactccatactagtaaattaagaatcatatttgaagatgtccccatattttacttgtggtgctatttgttctgtcttcagctctttctggaggatgccgtctgctcaaacacagagctgctgtttctttttttgcaaagcattagctcatttgtgatcgctgccagctcttaagacaaggactcaaaattagtgtcaggcccttccctgtcatcttgagaagagacatacgctacctccacaggtggtgtgtgcagggtggccctcgtcagtgatgagcctgagactgtctccatccctgcagcagcctccaagccagccatgcatcttccacttggaccactggtctccttgcctctgttacaccccagtctgtttccacagagcaaccggagggattttaaaaggtgtgacttggatctcaccagtgtcctagccgctgccgtgcagacagagcccacaaccttgtcccaggtggagagagcattgcgtgtccaccccagcctctgccgtcagctgcccccagcatgctgcactctttgctccagtgtctttccatcccataagcatgatgaagccactgctcccttaggacgtggctctgctgtgtcctctcctggagcacaccccctggtctccacagggtgagacgcctgtgtttcacatctccatgtggcgctcctcagagaggggtctggctcttttgatagaaggcagctgcccaggcaccggtgcgcctgtgtggttctccatgcagggctcgcactgtctcatccatgcgtctgtggagaaccattctgtctgcttgcctgggggcactcagtggagaaccagtctgtctgcttgcctgggggctctcggtgttcagattggtagctgtcatacagtggcactcgggcctgggtgaatgaatgaatgaacggcccacttgaccttgggtttgccctgtggccacctgttttctccatttcccttttccagttactcccatattcagttatcaggattccttaatttggaccattgagaatcagtcacttgactgaatcacccacaattcatagctaattaaaaacatagcaaggctgggtttaccactgaggcaagcatagtagtgtcatggtagtgcaggctctggcaccagcatcctggaccacatccgcctctgcggttcactgactgtgggacacgctgggcaggtcactcggcctcctgttcctcgctgagaaagaggtgggtactaatggcacctgcctcaccagcttgtttggggattaaatgagttgatagatggaaagcagttaaaatagtgtctggcacttggtaaatgttaacattaaaattagctttttttttttttaatttaaaaagcaaaaagtgccatcgtgttgagtttgggaaaggatatggggagatgcgtacacgtgacttgtgccacctcattgaatatctccacctatgaggtgggtactgtgttcttctccatgggaggagatattttccaaaagacagatgagttcacacggctactgagcagttgagacagtgttggaacggagatcacacttagcgctcacattgctcgcatcatctatactgccttcctagagaaaacagttttctggaactttttgattaggcttggaggacttgtttctgaaatgtaaacctcttttctttattagtttaggataccaaagcagagttcaaggaggattcagttgagttcaattgagttatactttaagatctgggtttccacttttgcaaaaacaagcaaattaatgtaggaaaaaaatagaaggaagaaatgaaagccatgataacattttagttttctgttactgtaataagcaaggctcttggttacaagtaatagaaacccaatgcagatgacagttgaagccttaactttatagcttccatccagagagcagtccccagggaagggctgccccttccctcacctccctcaccatccccataacgtctccagcgagcctgcctttggccacatgccagtccccagagcaccctgtcctgggtggggtggagggagtgagttgccgagcggcctgggtcatgtgttactggtggtggaaggtcaggccacgtggttgccagcccctgtcagtctcatggaggaaggaggggtatttcttaaagaatgagatacaaaacagaccaaaacaagtagcgcatgatccaagcactcatacatcttaccttatcctaattattggtggccaacatttacaaaagctgagtggcttattcagatgggaaaaggaagttgtggccaggctccaggcaacaacccgtggctccactcccctggtggagaaacaggcggtaagactggcggacttttggctgtcaggtgttgccactgtagagtctctgcatcctggccaagtgccagtggccagtgaaacattctgtctgagaaagtatactaggcattatgaaaattatttaaaatctgtgtctttctaatagatttattcagcattggatagggagtgcaggtaaaacaagtcagtttctctgaaggaaaagaagaaagatataatcagatcatcagggaaagggaaagggaagaatgccatcttacctttattttctttgacttttaggtcctcttattgtagctttgagatcaggaaagctcatttgtctaagaagcactctctacaaatgaggaaaatgaaatgggattacttctgtttcaacagtttctatagtagggtttatcacttgagattcaaaagtcgtcagtcgctctttaagtgagagtaaaaaagagtcagaaaaaaatgactgcgtgggttaattccattaccagagtcatgggaaaagccaagttcagtggtgttcagatttttctgacgacaccccccacggggatgcacgttacattgagacccagacacagctgcaagttccaagaaataacgttttattctcatcatgccacagtacactctggattctattctattctattctatattctattctattctattctattctattctattctattctattctattctattctgttctgttctatgctgttcccttccatcctactcatagtccattgcagtattttttgtcttctaatgtcctttcctgctgatcctgaccctctgaggggactgggagggggtgagagatagggtgcgggagggggagcagcagagatgggcctgtcagagccaatgccaggcgatgccccacccctgcagcctccacgcctccaccctgcacttgtattcattcttggtttccccagcaatgctactcccagcgtttcatgtgaccacatctttgttcctcacacactgccactttgtttgctggccctgccacacaggcctcacatctttgctctgggcactgattgggtgatggctcaatggccttcacattcccaaaggaaaagacccccttcaggccaagggagaggagagctagaatcaaagtttacccggaggaactggcttctctggacaagaaagctgggcccagggaaggctgggtggcttgatggccttgtgaggctggaggagatggaaaggagtggctgagaccagggaggcacgttcaggatccgtgcctggctcatcgcctctgtccctgcctcttgctgtctgcaggtaaattctactgtaagccacactactgctatcgactctctggctacgcacaaaggaagagaccggcagtggctcccctgtctggaaaggtaatggtgactctcctgtaagtgggggagaagcagtgggtgttgcagcagtgtggctatgggccgggggcggccaacctgcaaatgcccctgcgtccttgcctctcctgggaacggggagggcccgaaatgcagtggcagtccggggtggagagggaaccatcttttcatggatgatctgaggttgcctcgctaaggtaaaggctccacctgccccctgagtcggacccaggagatgatgcagctctccatctcagctgcgtagacatctgccttcgtcaacacacatctttctgagaggacaccctgccactggggtgatgccgcctcatgttccacatgattagagcctcctccagaagggcagggtgggagaggagactgttgggaggatccctcggtggccccaccctcactccccacacccaaagggcgccctgcctgcggggcctttcactagttctgtgagttatttgtctgtgaattttttccttccttatcctctttttaatgagggtggcttctccacctgtctttgtcgcggtgaacccagcagtctcttcagcatggttgccaccttgtcagcacgcctgcctgtcagtcccccttgagggcttctgttgcctgcagagggactggcaggaagaggtgcacctaggtggatctagactttgactccgggtgactcaggaggctgaggtgggaggattgcttgagcccaggaggtcggggctgcagtgagctatgatgatgccgctgcactccagcctgggtgccagcaaggccctgtctcttaaataaataaataaataaataaataaaatttaaaaccagcgtgtcagattgtcagtgcctctagggatttgaggatttgagtgcatcagtcagagtcactcttctttttctcatgaactttcctaggaggccaaaggacccctgcaggatggcgccaccacagatgcaaacggacgggccaacgccgtggccagctccactgagagaaccccaggtagcctcacttccttgtttggctgggtggcgcgtcactccctcggcctctgtgacaaggccaagggcatgagccagcacctccaaagcaacatttcttcattcgggcaacaagtggcccaaaaccctctggactcctttttcatgtgccagctgcttgcgttcggagtcccctttctctatggcctgtcggaggtgctggtgcaaatcagaggggagttccactggcaggctgtggcccagtgatggggccgtccggtgggcggcagagccgtgaagtgctgtccctcagccccgtcccgcaccatcacacctgagggcggcccaggtcctgtgtaggtagacaggagctcgcaggcgctcagacactgctcccatcacccgccctggtgaggccaaggccactcggccttcatgcagtttgcttccaagctcctctgacggcctggagctgtgttgattaagccccgtggtcttgttttgggttcaccttcacttaagattctgcgtcctgttccctgtcactgtgtgtggatgagctgtggctgctctcctgtctgccctgcaccgtgatgggacatgccctgtcctgaccccttggccactgggcttgtcatgaggtccaagccctcacctgtcccactttcatgaccacttccttgtgttgggaggtgaacagtaccatctctacctctacaaacacatttattcttgtcatagcatgacaggactcgcagggtttgtgggtaccaggcctgttgggaagaattatgtagattttccttaaaatggcctctctcagcaacttgtaaaacttgcctgtgagatgcgtccagagctccacaaactgctgggtgttctgaatgtcccacatacagctccaggtggttcacggcccagggtcactgtggcaagagggggccagcagggctgtgtttctgtctgtcacactttcctcttgttcaaaacacatgtatctcaagcagctatatacaaaactcataaaaattaaagatggtcagccagtgccaggaaatgtggaggaggagttggtcatagaatttccatggtgggacaagagaattacccatttggccttcaacgagaggttcccagagttgcatcctttcccttccctaacagctggttcatgtaggccttgtggtgctcattctgggagagggaagatgcgcccagaggctaggcggtgtgccctgggagccatgagaacccagccaagccaggtgaacgcagcttctgctactgcacgtgcccttattatcatctgagcaagttttttaagtaccctgcaggtgggaccaacattttatagccatgtttcaaccattaatgacttttaaaccttctacaatcttgaagatctttataatccatctttctcgtgaagtacccacaggcctttgcagctgacactctcagagcatgggcagaatcactggtagagaaaaataaccaaaggggtctagacagagactttggctttatgctatagaatgtacattcagttggagagagcaccaccttattagtctgggccctatttcatcagagatggattttctgaggaacctgactactcagtagaacaactcaaaagaaactaaactttccatttcggtttggagtacagaacattttttaaaaagaattaaacacagtgaagtttaggttattcctgaatgacgccaggtttgctgactttcccatctggtcgaggttgccattcttgccatctaattgaaagtataatgggtttcaggtttttaggagttctaaagaattacgctttccatagagaataagaggaagaatgttctacatagtggggagagaggatgagggttggcagtgtggttaaagagcaaaaccaccaagaaagagtcagagccctgaggacgtctctgtccgcgtggttcttgattctgagccagaaggtgacttggtatagcacgggagttcaaaatgtggtgtcccaaaggaatcacagtgtggacctttacagttaatgacaggcactgtcccccagcttgggtggcaaaggccagtgagctcagggctgaggggcttaccctccggcagctcagagtccagaacatcttagtccggcagctcagaatcagggcaccttgcctcccggtgagctcactctgctgctagccttggtagaaaaggaacaggattatgggcagtattttatggctggcatgaaatagatacccttttctcctttgatagagatttccttctttaaatatgaaactgaagctttgaggacttaactagacttccttttgaaaagtttcagaaaagctcaggtgtggccaggcacgatggctcatgcctgtaatcccagcactttgggaggccgaggcgggcagatcacgaggtcaggagatcgagaccatcctggctaacacagtgaaaccccgtctctactaaaaatacaaaaaaattagccgggtgtggtgtggtggcggatgcctgtagtcccagctactcgggaggctgaggcaggagaatggcgtgaacccaggaggcagaggttgcagtaagtcgagatcacaccactgcactccagcctgatgacagagcaagactccatctaaaaaaaaaaaagaagaaaagggaaagctcaggtgtttcagggtcccagaatgtatgttgtagagaacagtcattagctcaggcccatggtaaccgcctctactgtgcactcgaccagtagaggcgatgatgacggcacttgattctcttgtgtgtaactcagccatcctccctagacccacgtcccaggaggcagggctggtaaagctatgactgggcagtgtttgacccagctgtgcttttactctgtgcctcctctttatattgtggcatttctctcttctcctttatgttctttttctttttatgccaaaattcttgctgttgccaaaacaaaaacaaaaaaacacacccacacccaattacaacctgcagttcaaagaaccactctaggtcggctttaaagtattgtctttctctggtaaccaaatctgtacctgctgcctaatttagtgtttgggggcattgtttacagtatttctgtttgtaatgtgcttttaatatagaaatcctcttttttgttcttaaatctatgaatgctgtgtttccaagcttatacttactactgcgtgttagtggtcctggcacagattttcttaccctggccttgtactgtccaccatgactttagaaaaagcttgaacaataggcagagaaaggaaatccccaaaagggattattttccccttggacatgagaagtttagttacaggtttcttgaattcgtttttgtccagaggaatcctctttttatctgatacggttgatgaccaaaaatgaagtagggaagccgaaggcatagccggaaaggaacagaagagctttttccccgagtgctcatcaccgggttcattaccggccagagatggacggggagaagcacgttagtttcctgtcatcttatggaaaagatgatctgaagttaaaaaatgaaggtcacaagtggcagttgcctgacccctgtccccagacattccttgcccgataaccatgaggttccatagttcggatcctgaatgggcctttaggaaatgcaggcctttcccacaccagctagaagggtagccaggcagtagaatttcattcaaccctagggttcccacctgacagagggaagttcggaagtcttactgcttcccacgtccccttcccttctaggcatttatggaaagctttttagtggagcaagagaattctacaatccagcttacctcccaccttaccccaagagccatagctgacggtgatgtgtgaatgtttatatataggtacacgtttgtatgtatatagatctaattgcacatatatgggtagatatttatttatatgttgcaccctaaattatagtaattataataattgtgaagctgtttctaaagctgcttgttcctggttctgagaaccacgggagcctcacactggggagccgtactccaggtcagggctttggggatgcacagcagcgtacgggcagcacgcctgtaaggaggtgagtgggtgggtgtctcagaaaatgggcagcacacccccaagaaagggccccaagagcagactaggaacgcagggggctgctgctgccaggacaccacggagagccgggcacccgcctcacatgtctcctgtctggctccactgagttagccgtttgagcccactcctatcttttggtggttagtgcatcttcagctcttttctgcaagacactggaacattcctaggctgtcccaaaaggagttccaccatagcctttaaggtccgagcagggcaccaaggggttcacttttctcccgagccattcagcttggggtgcctgcgggaggggcggacagccagccggcttcccggcggcggtacgagagcccaacaggagaggattagctgtgccaaggaacacgccactgctgcctgtctactgcccgccttctctccacttccatttttgcctttgtttttaacttgtgctcttgtgagttcttggtgtgtttctttgtgagtttttatttaattgtgtaactttgtttttgccgttgactgtgaaaccaagttgtcgtgcttttaattttttttttaacaaatgttacattcttatttaagagaataaattccaaacaatcttcggatttctgagtttttcttttccttccctttctcttgaccagagggtgggaaagggggaggctcaggcaggtcttgggagtgagcttgaggccactgtggctcaggactcccactccggggggtcagcaagacagcagaggtgcaaagtgggggaaataggtttttatacctgacatag[450 bp omitted]gcattaaaaacagactattcccttctcacacacaccgctgctggcattagcagccgtggcactgttcccgcattttgtcagctgcagtgggcacaggcctagcctcatgctgaattggcccaagagagggcactgtgctgtagtgggcaaagcactcagccccgagtctgcacctgccgggccctaggcacttgggtgttctcacatgaaagagccctctctggcctccgtccccctgaagcagctctcttggaacgtgaagaggtcttggcttccccatagatcagagcagcaggtccctggggtctgcttggcattctcgacaaccacagtccaggttagggagggcctcaccccccagtagctcacagctctgctgtgacaccgtcattttcctcagagcctcgatggttctgagagtctgggcggtgtctcctggcctgctcatgtccttcctcccctcagccccccaggtctgtagcctctggctcccctttctctgaaataagtcagtcagtatcctagtgcctgcagaagggagagaaggaattgggatgtggggggcgcaataagtgacaaattaactaagcgtcagtaataaggatggatacatacgtgtgcataattttcaaatctcagcccctggctgctgttgcctgcccatcccccagtaataaaggggaggggaccactgctgttcacagcgatgcctgaggcttccagcaggaaggtggggacacccaacgtgattctgtgctgcccattgggaacaccccagaaaatcccttttggatctcagtttccttctgaaacttcttgaaatctgttcttttttctcataaattccctgtcagtttccctaattaacacactgcctaagagggaggccgtggcacacacatggaaggagagcggctgtgaaaatgggccactcttattttcatgctaaaaaatagggcaggatgatgccgtataggacccggtcccacaagtgctccccgagataaaaacacccatgtggagctctgaacggcagcagccaggcagagatttcaggagaagtctttccgaattccagcccctttcacgaagccctgaaacctcctttagactcaaaaaccagcccttaccttgcagctcacccagccaagcgcctcacaagtgccagcaagtagattagtcataatgaaacaaggggtggtgaggcccattggcactcctgcccaggtcaggtcatggcactgtgggctcctctcaccaccgcccggaattctcagcaccctgttggctgccaacacctctttctttataattgctccttgtctcctcaccgcttaccttggcgggagggggtggtaggcttgtacgcagaaacacgtttcattgcccgggaggggatgcgggcctccaggtggatgggactctccatcaattacttccgggttctaccagccacgtgaacaccagctccattttacttcctgtgggccaacttccacatcactttgcaaaagcagtttatgaacactttctgaatattttgggggccctttaatgggtctccaagaaggacagtgggcaagaggttgaatcactgccagcatcttcaccctaactcaggctagctaagcccaaccttgtcactgatgtgcttttcctcccagcaataagaagtatgccgtgcataggcagaatgtgcctaaaacgggaagaaggcacacgcccctcagaaggcccttgctggcatgaaaggaagttttggaacacccttccacagacagggaatctagggccccagctccgccttgctgcagactcttggggccatgctgggacagctactagaaaaatccttacagaacttctcttggcctcttgtgttttctttatctctatttctttctgtacttacccagctctttgtgcttctacattaatcacatgagactgcccaggtgtgactgttaagtgactgatttccttattctgtgttctgtgatcaactctcctgcacctgcgggagaagagccacgccgcaggccgtgttccccaaccttgctggcaccagggtctggtttcgtggaagacagttttttcacagactggggtgggcagtggttttgggatgaaactcttccacctcagatcatcaggccttagttggattctcataaggagcatgcggcgtgggtccctcacatgctcacttcacaataggttcccgctcctgggagaatctcgtgccgccaccgctgatctgacaggaggcggagctcaggctgtgacactcactagccagccactcccctcctgctatgcggcctggttcctgacaggcggtgggtctatgacccagcccgggccacagcgcagggggtggggactcctgccagagtagttttcatggacaaagtacaacctggtgaccaaggaagagctggtatcgattaacaggattatggcagcaatttatttattgttgccctgttccccagaactaagactctaaaaagaccaggttacagtgagaccagctataaaatttctttcctatcattttactaccgagagactaggtcagtaggttcttttaaaagtaaacattttcggccgggcgcggtggctcacgcctgtaatcccagcactttgggaggccgaggcgggtggatcatgagttcaggagatcgagaccatcctggctaacaaggtgaaaccccgtctctactaaaaatacaaaaaattagctgggcgcggtggcgggcgcctgtagtcccagctactcgggaggctgaggcaggagaatggcgtgaacctgggaagcggagcttgcagtgagccgagattgcgccactgcagtccgcagtccggcctgggcgacagagcgagactccgtctcaaaaaaaaaaaaaaaaaaaaaaaagtaaacattttcttctagagtttcatctaacgtgaattactctgaaccagctgctgccttccttttggccagttcagccttcttggggcattggcgttggtagaggcacgggaacgctggggtggagggtgcagggaagagggctctgcgatctcagagaaacaggaagcactgggtgcttagagaggagaatgaagggccagggaggtaagagtccgcactggcttgctgtgttgccgagagccagcagcaatccttcatgctgctcaaaagaccatgcttagggcttgtctgtgtttgcaaccaagaaagccctcttctctgccaaaatactttccccaaataaaaattgacagtaaagcttgcagtgccgtcactcctgctgttttccccacatgtgactgatgttgatcagttagccctgggggcccttgccatactcactcacagaagacgatgctgggagacacacagtagcggcagcagcggtcgctaacatgtagcacgcactgtgcacaggccctgagcagatgctttgtgtagctgaccttggatcctcacagcagccataagggaggcaggccccatgttgcacatggggaaacaggcacataggagttaggcaggcttggccaaggccacgtaaccaataaactcagagttgggcagaggctgtgcagaggacacaggagctgcccttcatcattctctgcagcctgggctcggcagcgtgggcgagaggcaagaaccctatgtgtagatgccctggagaagccagtgagtttccatttcattattcctggaaaatacaggtctcccaatttgacaaccatcccagagttgggaatgtgcctctggaaagacagcacattaaataaaggcaaaggatttcatcactgaggtgcaatgggggaagtcattaaagaaatggaggaagagaatgacaaccatccgaattgactgtaaataatatgaaatggactttctcttcattttctctatatcatccttcgttttggtcctctcgaatccagcctgaggttttgttatgaagagtaagcccttcctccatccgtccgccctgccagtgatgtggaggattggggaacatgcttgggggatgttttttctttgagttctggtgtaactgcttctagcttataaatctgttggcttttcctctaccacctcattttctgatacgtttcaaaggcctgagtgaaggtggagctgacacttccattgtgttacagcttcacagctgccattcacagtcctcttaagacattgcctgccctgggcctctgtagggttagggataggggaaggaagggatgattttgtacctctttttgtgctgaatatggacattctgatctactcaggcttgggccactctgtactgaactcacacgtaaagtgattgactcgtaagtctttgggctaagtgtgcatgggaagtcctggttgtgcctgccagctgcaacatggttcggcatagagaggttttcaggaagcctcctgggcatgtgtggcacggcctggcctgacctcggcaaggcacactgtggcaggggcactcagagctctcaggttggaggtttctggaaaatggggaaaaagaggagttgagaacacagcacaaaggtaggtgtgtttttccatgccatgttctcccgtcagttttcttcctgggtttagtgagacgtcctgctgtaatatccaagtggaacgtcccgtctgtcagaggcttctagcatccagccaggagaaagtgagtgaaaggcgagaagcccatcagattcatctctggtggtctcctttaattcctgcggcctcatgcacatgacaaacatggacggaggggtaggggatgtgcaggtgccctccaggggcattgccaggaggagcagaatcaccttccatcagtagagtcgcgtcatgagacaagggaaagttcaggcggctcatgcagctacttggggtgcaggtgctcagcgagtggcagtgaccaagtttgtcacagcatgcacctctctcatggatttcctgtctgtggacggcaagcccagagctacctgttcaccaggcagttctcggttggtcctccatgtactgcactcctgctggtcaggcattgcaccttggcagccacggtgaagggtcgtgagcttaccacgtcagaccttgtggagagttggttggtcggcctgtttggtaagagattagaaataacttgatataacttctaagccagggcttctccagcccagcactgtggacgttttgggctggatcctgctttgctgtgagggcttcctgtgccttgtggtgtgtcgggtgtgtccctggcctctccccatcagacatcagtagcacccccctccccaagctgtgtcaacagaaaatgtctccagacattgccaagtgacccaggggaaaaatcaccccagttgagaatcacggatctagactaaggttagaagaaaggacatgacattgacatgctgtcagcctcagttatattgtgggagaagtgggcgtggggtagaggaggccatcaggatagaggatggtgagaatcagaaaagtgatcctgaacagtgttgccagctcccagcccaggcctccagacctgtcagcccccacaaaaccgtgaacacacttcctagtggctgtgctttctcacacgtcgggaccctgtacgaagactgcatgccataggacgggcgggtgcagatcattttagaaggcagacctgcaaaataaaagcagagatcctgtgttgtttctgtaccccagtggatgtgcacaccctttggtggtggccccagcctcagagagtggagctgggtctcaatggaaccagcacagatcttgaaacagaagatgtgaatttgagtttcagttctgccacctgtcatgcttgctgtcataacctctgtgagcctcagtttcaccatgtgtaaaatttttaaatgaagaaaaatgctacctgctcctctgtctgctaaagttgttgtgaagagcgcataagttaagatgtatgaaacttgtttatttaaaagcattacaagaatatcaaatgtgattgtcattggcaaggattccaggaaattctggaagaattagagtgagggtgaattagaatcatttctactggctgtgtacgggcctccctctctggcctgtgcctgctgtggggttaggacaaggtggcccgttgagatatatcttcagccaacagaagctgggggaagcagaagaggtgagagcttggctgtctccaggctgcagcagagtgggctgggggagtggaccttcgttgcgtgccagctgttgtgaagcacggttaaatctccatggctgcttggctaaatttggcattgctttttccctcagcctgcgtgaatgggatgtgaagtcacctactgattctatgacaccctaggggctcttcactatagtaacaaaagcacaaacagtcctacacaggatttacattaagctaaatattcctttttttttttttttgagatggagtctcgctctgtcacctagggtggagtgcagcagtgcgatcttggctcactgcagcctccatctcccaggttcaagcgattctcctgccccagtctcctgagtagctgggattacagtcacataccaccacgcccggctaatttttatatttttagtagaaactgggtttcaccatgtcagctaggctggtcttgaactcctgacctcaggtgatcctcccgcctcagcctcccaaagtgctgggatgacaggcatgagccaccaagccccggccttcattaagctaaattttcaactcctaacctgaaagtcggaaatgtgagtaggagccaggtagctttctcttaggcagagcaagggtttatgcgtggtcccagggcctgtctggggttgctggttagacccaggagcctcaggtggcccctttggaggaaaggagggtacctgatttcctcttggaatcagtgcaccaatgggtgttttatgggtgatgatagacccgcagctgctcagctgctgctgatgctgtagaaagggtgccccgagcctgggctgtgcgctcctgcaccatcagcctttgttcttagtgtctgtctgcttgtttagagcctctccattccgagacactaatgattctcttccaggccagcctcagtggccctctgacaggtgaaaacagaagtgtgactgtgatcgatgtttctcttccaggccagcctcagtggccctctgacaggtgaaaacagaagtgtgactgtgattgacgttttacagggtagtcatgggcactgcggcaggcaactttagtttctttccaaaaacacatctgcagctagccaagggagtatgtatatgtgattttgtgtctttaaaagaaaggcatctgaacctatttaagagaagccttttgttggaacgtgggtttgtctctgtggatcctgcgatgtagaccgagcctgcctgaggctgtgtggctgctcacaggagggtcacatcagagctggctttggatgcattccggactgagagtgtcaggggcactctgctctggaggacaggagggttggaatagagcctggagtcttggggaaagcacgtcagcctggacttgctcgtgctgacccatgtcctcctctgcccttcacccgccacgtgtcaacactgggcccctttctggtgagcaagctgcttcccggaaccaaactcctctctaccgtgaagtgaagtgcttgtgtcaggacatcgagccattcgaggtagtctcttttcagaactttgatgtcctctgtgccattggcgtcttcgtcagaatttctctcctgagtgctgtgagaactcttgccgtcttggtagacttgcccttttcatgaggcggccgttcccatttgttcttggggaactgcgtagcaccaagctacctgacaggcatggtggtcatgaagtctctgtgttaagatcaggaaaccaaggccagaatatgctcaacattatagtggagcgaagctcagacagaggattagaactctttatcctgatcatttattcaaaacactttattgactgcctaccctgatgcactgatggcttcaggaacacaaagatgatgagaataatccctctccccagcagagcctctggttttaaagtccattcagacctgaacagaaggggagagatgccctaataaagacgtgtataaaagcccttcaagggtgtcaagtggagccggaagcaggatcgggtaacgacggcagaagtaggggggaagccatccttcctgtcttcacctgccccttaggatttgagagatcagccctgcaactattgacttgacagattacttgttatgtaactgtatggaacctcccggttcacgagccacgtatttgaaccaaagagttaaaatatttcaaatcccagcgcataaccgctaccctttctgagatcttacccagctacatccaggtgggcaggtaatgaaggtagacagctagagcgcagcactcgtgcaatttaagaggagacccagctgaattccagtgctttagacatgtccacagcctcccaacgccaagaagcagccatcaggaaggatggcctggccagttgatacaaatcaagtcaaggtttacctgtgagatggtataacacgtgaaaaatacgttttcaggagagccgcatgacacactggtgagttgtatgttactggagagtcgggcttgtagcttaaaagaaacctctttgccttgaccagatacattgatgtgtaccaggatttccatttgccaaaaaggcaccttgggagatgatgtaatcataacagtaaaaataacctgacagtaaaaaactaactcggccaggcacggtggctcatacctgtaatccctgcactttgagaggccaaggcagatagatcacctgaggtcaggagatcgagaccatcctgaccaacatggtaaaacctcatctctactaaaaatacaaaaattagccgggcatgatggcaggcgcctgtaatcccagctactcaggaggctgaggcaggagaatcacttgaatccaggaggcagaggtttgcagtgagccaagatcgcaccactgcactccagcctgggtaacagagtgagactccatctcaaaaaaaaaaaaaaaaaaaaaaaaaaaactaattcaaaagcaaaagttccacagggtcacacagagtgagagcaaaggactgcggtgatggggagctcttgtcccccctagcggtgtcctcactgcaggggtgtcctcggcatgcttgggaaacagtgtttgggtctgaggggtggcccccctcccatttgggtggttttccctggtacagaactggtttgttccctattgggttttttcctctttggcctctctagcatattgtatttaactcagaatttcccaattcttctgataagtatcttcaaagcaactgaatttcccagtgagcccatgtcacctgctttcccactattctcagtgccccgacatacaagtaaagttaccccaaatgaagaatagttcatgtgtagcaggcagttaaaaattccatcctgggactgggcgcggtggctcacatctgtaatcccagcactttgggaggctaaggcgggcggatcacgaggtcaggagttcgagaccagcctggccaacatagtgaaacccgtctgtactaaaaatataaaaattatccagcctgatggcgcacacctgtaatcccagctacttgggtggctgaggaaggagaattgcttgtacctggtagatggaggttgcagtgagccgaggttgcaccactgcactccagcttgggtgacagggtgagactccatctcaaaaaaaaaaaaaaaaaaaaaaaatacacacacacacacacacacacacacacacacacacacacacattccattctgggccaggcacagtggctgatgcctataatcccaacactttgggaagtcagggcaggaggatcacttgaggccaggagtttgagaccagcctgggcaacatagcaagaccccgtttctaaaaaaaattcaaaaattagccaggcgtgatggcgcacacctgtagtctcagctactcaggaggctgagacgggaggaccacctgagcccaagattttgagtctgcattgagccatgattgcaccggtgcactgtagctgggacaatagagtgagaccctgtgtcaaaaacaaattctttcctgcatgattgattggaaggactcttagagactagggttatccttagctctggctcatgtgagtctttggacatgttattcaacatcactgactcagagccctcaatgtaatcacagggacttgtgggatttgtgatgtttaaggccgtgtgtagagcctgcctgtcgtcgtgcccggcacaggtagtcgctcaacaaacactgctgcttatccctcatcgcctgcttcacaagcaagaaatacctcatatcatgtgatcttggaaaactcttgtgaacacactctccctgccagtaggaagccacagaagaagtttgttggagggcagcgtgtggggatagaaaccaccctgacatagcagtggcttagaaacttcctttccacacatggctctggggcttgccctcctggaatgagaacatagctgtcaacggtataaaaatgtgagccccatcaagcagcctctaaggctagtgaatggggcagcagaggagaaaagcccaagttgatggcaccaggtgcctgagaataagtgcaggaagaccttttgtacactgtagggccctttaataagccctctgaatctttcctacccaggggtgacttctcctaaaaataggctagagcccttctcccgcagataccagttgatgtgcagcttgaccagaggagtggtgaagtccccgaggcaggtagtgacccatcccactactttaggtttctaagtcaggatggtagccatgttgccaatgggatctcctgtgggaactttagctcaaagcaagataggagtgaaccagtatccaagctgattcttcactgtattttgaccagcccagatcaaggcagtggggtccctctgcagcttcatacattccataggcctggccctaaactggaaaatgtctgggccagacatggttccgaatgtttcggaacagccacacttcacgtggtgtcatccccgtttcccagtatgtgaggacgtgtgggagaacatagggactgtactgtttccaacttgaacgggatcaaacagatggaggcatggatcccgcttacagccctgtccatgatctggactctgtgcaaagagggcaccccagtttcccagggtgattttgtgagtttctgagaactgtggatcaggcagcacgaacgtcactgtgaccgattttgctgcagatctggaaacttaggctcatgctgccaacctggccgtttcttcacatttctcttccttacatctcccctgagacgttgcggttcagaatgggttcatggcttggtgcttcctttagttcaagaagatcggggcagggaaggctttgggaggacatatggggaaggtagctgaaatgacgttagctgggctgggtgtggtggctcacgcctataatctcagctacttgggaggccgagctgggaggatcgtttgagcccaggagttcaagaccagcctgggcaacatagcgagaccctattcctacaaaaacgtaaataagagaaataaccaagctaaaatgatgttagttgatctttcttcagagtcacagcgaaaatacccagtaccgcctggtaaaaacagtaggaatgagagggactacttaaggagaatctctgaattccaaaatggcaggagcacacttctcaaatggatgagtcatttcaatcagcgccattcttgcgggaaggtgacgccggaaggtggtcacggtcggccccttttatctccctgaggtcatcagcctctcttagcagatgggtgacacccataggctatcagaatgtgggctgccccagggcacagatcttgtctgctgtgtcactggtgtgcctgagcgcctgcagggtgtctggctggaagcaggtggtgaagaaacatttgttgaatcagtgattggatgaatgaacccctgcagccatcctacttacagacatgggaaacaggatgggaatcagtctgtgtacacagcacctttctttcagtccttgtcagactcggattccattcaaactttcccaagctcataaagaaggaaaggaaaaagaagtgggaggacaggccagaaagaggcagaagaggcccttgacatcctgatttcctacgcgacacccttctcagcggcgcggagccctgaagtgtcttcagcagctgctgtgccgagtacaggggggctttgccaccactgcagggaggaggaagaggagctgcctgctgaggccctgggaagaccctgcctcttagtatcctctgcacccgccgatgcctctccaggagtcaggtggaagcaaataaagccccctgccagctcttgcccagcagccgagagcaggttgtcctgttaggagaaacgtttcttccagaatgatgtgtggagctcatgcaggcagtgactcttccaaagcagaacctgaggtgcggcccagagcctctttcctatttaggatatggcccagatcctgggagctgtttccttgtggtatgtgtggggctgtaattggcctccctgtgacctgagagctgcctgccctgacttagtgaagacttggccttggaaattattgcagatctttcatcccgctttaagctggaaagtccctgttgggctgttgttgcactaaggcatgtggagtagagggcgggaggtagggccagctagcccgacaggcggggtgcacttcggcttggcaatccagcaccttgcaaagcgcttgtttacatctgcactcctgctctctcctcctgggttctgccattagttgatgagggaggaggtcacagggctgtcttcgctgcccaggcccctgctgttaccgctctcactatcttggtttctcatcaccgcctgattcatctgacagaaagccccttgctcaggacagagaatcaaggatgctgattgttccgatgtgtttgtgcgtgtggttttttttttaatttcccatggtattttgaggtgaagggctgggaatgtggagcatattttggcagttggtgagtttggggtccttgcccagtgtcctctgagtaccaccttccctttggaaacactgaacccccggcaatggcctgccagtgtgcttccgtgtccttgtctctccacagggtgagctggagctctgtgtggacctggctcaatggcctggtgggtctggcacaggagaggcaactgctgcctcccagctccccttttccaccgtccccagcacagcatttctgcaggctttctccagggactggcgtgtgaaggatctgaacagttcccagtgcttctggtttcttttttgttggttgtagccaagcccaaaattaaatcagcatttccccttccagagctctggccctgggcttggactgccaagttctgttgcctgacaacccattagtctgcgggatttgcagaatctccagggcaataacagtgggaagactgagtgtctgtcattccagatgccagattctctgctccaagaagctttcatgaagtgctgtgtccctcacctagaaaattacagtggggaggagacaatggtgaagatgcccaaaggggaaggcagatagggctgttgcgaacatgtgcctggtttttcttcttgttgtaagtcttgggacagcatggtgatctcctgagtgatgcctttcctcctcatgttcagatcttggctccagggctcactagctgtgtgacctgaacttcagttacttcatttgcaaatgatagtgcctacctcacagaatgttttttttttgcagccggctaactccatatgcctccagaacacctttcttgactctgccaggtgtgctgactcactctctctatgttctcccatgagtgcatacgtggctcatggtacttgacacgtcgtaccgaaaggattcctgcagggccctctcccaggtgctactgaagctcttttagagtagagagtgttttaatctgctttgtttcccgtggtcctagtagaattcttgccagacagtatgcgttccccacgttacccacgtcaaacagacgcctcttggatgttttccttcccaagtttcgttcactctactgtaaaatcacttccctctgaattgatggctgttagttgtttgtttccctgaagtgatagttcttatcctgtttttcttctcccatctaaaagaaataccactttttgttccgtatttatggaattcccagaaagctgattcttgggtagttgcttgactttatctccctttctcatctgctttccattgaatggcagttgtcaaaaataaatgatggaaagaatcaaatggcgccacagacagtgtatcctcagccctcccctgttcattatggggtggccgccatggattttgatgaggagaaggaagggatgggaagactggtatttgggaatgatgagctagtgcagttagggcctttgctgtcccaggcctgggagggcaggtttggagaaacttgaggccggatctatcaggattgccctctgcctcttttctgccattacctctagtccacatttcctcatcttcaagatgccctagcccagcatcatagcatattctttttgtgccctgagctcggtgttgaagaatggagcatgatgtttaaaaaggtcccccagcaaggatgcaaaggctaaaacaagtgggcacgtgtacagggcacaagtgaactcaagtattcgtgttttgccccttcatcacaccattacctgaatttgtatgtgaatacgccactggatcttgctttgttagtaaagattctctagtgaattcgaaagatgctatttggtggaggatgccagtaattccaacagatgtgccaagaccttatcctgtgactaccagggttcattaaaagctctgtctgaggctgccacaaagacgttcaaacactgcacacaacagaagtgcaggccttcagaaaacactttgtgcacaacctgtcgtgctacaaaaattgctgaatcacctgccgctttcctttagccaggttttgcctgatggaccacctgtctctcaacactggcttgtatgatgtggcatgccaaaacccagcgttgtctcctagagcttagaatgttgcaggaatcggtgacctgcccagccaggatgccagcccagtcatgacctgctccctccagcacctctgccccttctctgcctccttgaaggtctggtaacacagccgggcatggtggctcccgcttgtaatcccagcactttgggaggccgaggcgggcggatcacgaggtcaggagattgagaccatcctggctaacatggtgaaacccgtctctactaaaaatacaaaaaaactagccgggtgctgtggcaggcgcccgtagtcccagctactcgggaggctgaggcaggagaatggcgtgaacctgggaggcggaggttgcagtgagcagagatcgtgccactgcactccagcctgggcgacagagcgagactccgtctcaaaaaaaaaaaatgtctggtaacaccaggctgctaccacatggcactgtgcctcagccctgtttctcagtaacgactgttcgctctccagagcctgtggatgcagctttccaggagtatgcacacagtggtggggaaatattactggacaccagacttgctgcttcactcatgtttcctgggcactccccaggtggcaggcgttaagtggaagaggaaggtgaccgtgtgtgtggggtgcagggtcaacacgcacccccacatgagtatgtgtgcatcgtgtcactcggtgtccatgacggctctgggaggtgggtggtgccatcatttatctatcaggaaacgagctctgaggagttctgtaaattttctaagacccttcagccaactactggtggagccaggcatctggaagatgaggaaatctgacctggggttgcccgcctccacctggacccggtgctactcacattacaggggacacaccagaggactcatgacagcctcctctgaccaggatcaggaggacaagggacgtcaacagagaatagtggtgatgataagggaggcagcagaactgttccatgttaaaggagaccaaagcacagttgtaaaacacattttcaaaaatccgagtccatagcagtacttgaaagtataaagttaaaaatgggaaaagtgcttctttaccaaagaatggtagtggaggaggagtgatgggatttttttttttttttttttttttgagatgaagtctcgctttgtcacccaggctggagtgcagtggcgcaatctcggttcactgcaagctccgcctcccaggttcacaccattctcctgcttcagcctcccgagtagctgggactacaggcgcccgccaccgtgcctggttaattttttgtatttttagtagagatggggtctcactgtgttagccaggatggccttgatctgctgacctcgtgatccacctgcatcggcctccccaagtgctgggattacaggcgtgagccaccgcacccagccagagtgatgggattttaaaatcacctggtgtgacgccctgtgcacacaaaggactccggccaagatcgccgacgatgctgaaaccacagggtgaaaggacgcaggcagggcaccccgtggcttcagaagcccacggaggactgatggggaagtgtgcctgtgcatcgcagagaggcctgggtgccacctctgtgagcggtcgggcctggtgtccttcctctgagcagcggtgctgcggtaggggcagcatcgcccacgtggccttatgaaaccgaaagtgccttatctaactgtgaggagacagatccgcagcatgagacgttcttcaggcagctggccaggccccctcagtggtggggcacgtgcctggtggggacttggatcccggggcaggcattgggggaggcacctggtgggggcctggatccctggggcagactgcaccggggatgcccttctcaggcaaggctgcttcaggggcacctggctcctggctgcctgcggtctggcccacacccctcaccaccagtcactcttgtggggagactgcgtctcccctctgggggccgggttcagggtgatgaaggagagagaacgctctgacctggagggcagacagggccaccttcctttctcctgcagagtgaaattccctctcacatgccagggtccttctctggcctctggcaactctgcaaatgctctgacctttgtcctgccccacattctggcaggagggcctgcagcctgggtgtcagcccccacccccacgccccgtctgtggttggacctcagtgcagtgcttctgtgcttgtcccgcaggttcaggcgtgaacggcctggaggagcccagcatcgccaagcgactgaggggcaccccagagcggatcgagctggagaactaccgcctgtccctgaggcaggctgaggcactgcaggaggtaccggaggagactcaggccgagcacaacctgagcagcgtgctggacacgggcgccgaggaggacgtcgccagcaggtcagcacgcagggctgcagggcgcccacccgccacacggccctaagagcctcctcacctctgtgtgtctcggtttcttctcagtgaagggaggcctcctgtctttcctgctgcccgcagtccattctccccagtcccttttaggttcttagcctcatcttctagtcagtgaggactcctccatcagactcaattcagagattcaggaagtatttattccttgaggacctgacatgtccccagctccaagtctgtcattgggaaggaaagtggcaggctctgcccccgggttattcacagattcagcagagggaaggacgggcacacggggagggactctgggtgattcagccaccagtgcaccgggccgtcttgagggaggcctagtccgtcccccaggcatctttttttctcctgtaggtaaagaaagggactgaaaatgtgtgccccaggggccgcatgcagcaccagtggatgcatgcttaggcagttccagagctgtaatcacatccagctgggtgacacctttggggatgtgcatgctataaccctaggactccctatatccactgccctgcaccccagggcttccagtatcagcgaaggcttcaaagtgttcagccgattacagatgatcaagagagccaagaatcaaaagggggtccggtgtcctgtggggcttcaggacagaaacacaggctgcaaacccgaggggcagaggcctcaagtggccttggagagcatttgaatcacacaccttgatttagccatgatgaagggaacatgtggggataaggagagcagagcagtttttttaaggtccaagaacgctttccagaaggtgtttgctgggccgagctgctttcagctgcacccgccacctcagccctcatgtcagacaccctctgcctagattcattcttgggctgcctcacagaccgctcctccgtgcatgccgggggcagcctctgccttggtgtctgcagttccaaagctgtcactgatggtgcatcctcatccagaactctgcttccctatccagagcacccatggaggccccactctccccactgtgcccagatgagggggagcccactctctctctccactgaccctgcagtgagggtgagagatgctgtgtgtcaaaacacatttataaacccttgagcagagctactggcttgaccttgggctgagtgtgggtcagcaccattttctccactgtaatttataaattgtgagaggcagtggggcagcaagttcatgtaatgtagcaaggacattccaggaaggctaacccctggcatttatggcaggtatgacaggagggcagcacagaaaacatgaaatcagtcagcatctatgcaatgcaatacatgcctcatcttactcagattgaagttaaaaaaagattttaaaactagcattcatgctgggcgcagtggctcatgcctgtaatcccagcactttgggaggccaaggtgggcacatcacttaaggtcaggagttcaagaccagcctggccaacataatgaaaccctgtctctactaaaaatacaaaaattagctgggcatggtggtgcacacctgtaatcccagctacttgggagggtaaggcatgagaattgcttgaacctgggaggcggaggttgcagcgagccgagatcatgccactgcaccactgcactccagcctgtgtgacagaatgagactccatctcaaaaaaaattaaaattaaaatcaaaaaataaaataaaggccaggcacggtggctcacacaggagaatcacttgaacctgggaggcggaggttgcagtgatctgagatcacaccagtacactccagcctgggagatggtgagactccgtctcaaaaaaaaaaaaaaaaaaaaaaagataattaaaagtagcattcagtgctatacagaatgaaaaacagtctcttaaaagtgaagagccgggtgcggtggctcacgcctgtaatcccaacgctttgggaggctgaggtgggcggatcacttgaggccaaaagttcgagaccagcctggccaacatggtgaaaccccatctttactaaaaatacaaaaaattagccgggcatggtggcggtcgcctgtaatcccagttactcgggaggctgaggcaggagaatcactggaacccagaaggcagaggttgcagtgagccaagatcgtgccatcaaactccagcctaggcaacaagagcgaaactgcatcttaaaaaaaaaaaaaaaagggaagagcccagctaggtgtggtggctcatgcctgtaatcccagcactttgggaggctggggtaggcagatcacttgaagtcaggagttcaagaccagcctggccaacatggtgaaaccctgtctctactaaaaatacaaaaacttgccaggtgtggtggcacgcacctgtaatcccagctactcaggaggctgaggcaggagaatcgcttgaacccaggaggcagaggttgccgtcagccagattgtgccactgcactccagcctgggcaacagagggagacttcgtctcaaaaaaaaaaaaaaaaatgaagagcccggcctggtgcggtagctcatgcctgtaatcccagtactccgggaggccaaagcaggcagatcacctgagcccaggagtttgagagcagcagtaacatgatgaaaccccgtctctacaaaaaatatgaaaattatccggacctgcctgtaatcccaactactcaggaggctgaggcaggagaaccacttgaaccagggaggcagaagttacagtgagccaggatcatgccattgcaatccagcctgtgagacagagcaagaccctgtctcaaaaaaaaaaaaaaaaaaaaaaaagcatctaggggaaggagctataaatgttgtcttacttccctgggtggccgtaggacacaggacgggaagtgcgtggtgtttttctctgtcttccctacagcaccaagcacagaattgggtgcctttccagccgtcggtccttccttgctgagatgttagactggaagatgagaaatggcatcattttaaggcattaaccgttccagccaaggaactctcatttcacaagttcagtgaactcttaactttggcctctgctgcaggggacagcagcgtgatgtttcagaacctgactttggagtcaaacaaagcctggatttgaagcccagttctgccacctgctagctgttggcaatttacttaacctctccctgcttcagtttcctcatctgcaaaggtgctgcacttcataggtttgttttgaggattaagtcgtataaagcacggacgaagccttgatgcccggagttactgctcctgttactctcctggtacagcacaggtctccctcaccacagggccaggggcagggccaggcagccttgtattggtttccttaaacggggttgatgccgggacttgggtttggctcaagctcaccctgtccgagaatgttggtaaccaagctttcccatgccagagtcacccagggcttgtgatgaaagcacaacacgttgggctgagtttctgattcagcgcctctggggtaaagccccagaatttttagttctcaaaagttcccaggtgatgctgtggtccaaagaccacaatttgagaaacaccactttaatgtttctaaatttctctgataataaacatcacctgggatgcttggctaaaaatataattgcagccaggcatggtggctcacacccgtaatcccagcactgtgggaggccaaggcaggaggattgcttgtgtctaggagttcaagatcagactctgcaacagagcaagatccagtctctacaaattagccagcgtggtggtacgctcctgtggtcccagctcctcaggaggctgaagcaagaggatcgcttgtgcccaggagttcactgcctgggtgacagagtgagaccctggctcaaaaacaaaacaaaacaaatgtaacttctaggcgcaccctggagtatctaattcagtgggtttggggtggaggccaggaatgtcagtgtccaacagaccccccaggtgagtctcataatcaattcatggtttagtcacacaagcgcctataaatcccaagccttgtcacagacccttggcccaggcctaatcagcttcatgcctctaccttgcaggcaaggtggggcctgtctcctggaggagaccctggaaatagcagctttgttttcactggaaaggccagtgggccaaaaccaagggagggctggctttgtgatgtttgtgttgttttccctgactgccttcctttctggaagaatgtgccccgggcagcaaaggcagctggtgcagtgcccacgtgctgaagttctttagcatttccacattcttggctctagagagaagtcaggagggctagcacacacaggtatgttttctgatggcacaggcgaggtcacagaaaagtggatggcaggcgttgctgtctgtcagaataacacgaaagtgagagaaggccgctctttcagaataacaccacgagtgggagaaggccgctccctcagggctggccatgaataaatggggatttctgcctgttctctccctcccgcctcactcccttttcctgcagaggcagctcctgagccattgccgagcaggatgctagttttagcatggattacatttccaccgtgtaaagcctgctgcatgatgtgcatcttctccagccgcctcctcagcaggagagggtttgcacagttgtcagggaagggaacctaggggcatggcccaacgggacagaggatttgagtccctctgattatgagcaggttaatttaaaagtgaaaaccatggttacccattgccctttaaaaaccacccaggggccgggcacagtggctcatgcctgtaattcccagcacttttggaggccgaggcaggcagatcacaaggtcaggagatggagaccatcctggctaacatggtgaaaccccgtctctactaaaaaagtacaaaaaattagccaggcgtggtggcgggccgagtagtcccagctgctcgagaggctgaggcaggagaatggcgtgaacctgggaggcggagcttgcagtgagcctagatcgcgccactgcactccagcctgggtgacagagcaagactccatctcaaaaaaaaaaaaaaaccacccaggaacttcaagtggttcctggcagcagcctgctctttcatggtagggtctgcttgaattcctggtctgcacttctcaggttgcatccaggcaggcaggagcttgatcaagaccttcttcctgacagtagccaccctgacagaggctactggctgggaactcttgggttctgggagaagcacccaggaaggcacagcatgactccgtgtggaccctggtgggaatcccgacttctccttatgcaaatgacccaacttccttaggcttcggtcttgtcatttataaaagcagcgcagccccgtgacctagagcatttgtgcgattaaatgagctacccatgggaagcactttgtgctgcgggcacgcggtcagggctgccctccgtcaatcactgtcatcctcggatccgcccctcttgacacagcagaggactgcagagcacgtgaagtggagcaaaccttgtctgtttagaatcaagtgcatgtgcctgttggatttctttcccatgctaggtctgccagtgtctcagtgagaagacagctggggggaaattcagagcaggtgctttgagttgagtagctgggtataaactgagacaaggagggattttgctggacgctcttctaactggaatagccagcaccttctgatggaggctttaccgggggacagtcggggtgcaacctctgacatctctgaaagtagcgtaagcctgccctggctttcaccgcagcccctggcacattcctgctgtcctggccacacttggccctgtgaggagcacagtggtgacccggcacctgcccttggagagagtgtgaccctgggggaggcagaccccaatcaagcaatctcacaggacagtgcgttgtcaccagtgccaaaacagatcctgtgaggagggcaaggtgatcctgatgactagatctgaccccgtccctcctgggaggcagttctgaaaagtcagcctccccagagggagggagaagttgtctgtgttgcatctgtttctggtatagtgatcctctgtgcttaagaagtttccaggctaaggtccaaagggtcggccacactgcagcttcctccctcctctgcacctttcctccagagatgcaggtgctgggagcctcgaggtactgaattcacactgtgaatcttgtgtgtgacgcacaggacctgggccaacccagagactgccctagtcctttgaaaatcatggactggaaaggagttggaaactcctgccgggttcctctgtgtccttcatgaagagagggtggcctgtctgggagctgcagaagcaagcgccaaggtgtctgggaggtgggctgggtttgcagctgatgcacggaggtgagggttgctttctgctgtcttctgtgctcccgtggtccttgagctgttgtgaaaccagctgatgcacggaggtgagggttgctttctgctgtcttctgtgctcccgtggtccttgagctgttgtgaaaccagctggtgcgacacggctgtgggctggcctcgctggcctcatctcggggcatctattcagtgcccacattgtgcctgtgcagctatcctcacgacatggcgcagggtgaggacaggcctgtgctgaggccccctcccagtgaactgcagtgcggccctgccctgctgccaactgctgggcagccttgcacaggccccggctgctcagctgggaaagaggaaccagggggccttcccttggcccagcgaagatttaagatgagcatagatgcatccttagccttattttatgttcaaacagtgttaaatgacatgcactaggttatgtattgttgttcattaataagaaagtaaattaatgaaaacacaagcgtaaggcagaaagaataccaataaaggtaatgctgaaaaataaccaaaatccagatgccaagttttccgtggcccagattcttaggtttgcccactttcgacctctcctcctggccctccgcccaccgtgcttgtgttctgctgcgctttagcatgatgtgcgtacacctttcctccccttgagaataaggagcttttgttatttttaatttatttttatctttattttttgtagagactgggtctccccatggttgcccaggatggtctcaaactcctgggctcaaatgatccacccacctcagcctcccacagtgctgggatcacagatgtgagctactgggcccagctgagcataagagtcttttctgtgtcacctttgtgttccctacagtgtctagcaagtgcgttgtgaggggaagataattgaataaattttatccaggtaaatgaacaagtgaagctgattcactaccctgagctccttgcagtatattcttttgtccactggctgagctgtaggtgctcagaaatgttcaccgagtgaatgaatgaatgtgtcattgagcaaactcagagagcacaaataatcaactcacagtcacacagccagccagtagcagagctggtgtggcacagtgaggaaatggccagctgaaaagagggaatacagcccacaagactgccccacttctgaccccagtggcgaattccggagtctcccagaatcacccacaggtttgatagtttgctagagctcgcagaactcactgaaagctgttgtactcatggttatggttcgttacagggaaagggtacagatgtcagtgagccaagggaagaagtacatagggtgagtccaggaaggaaccagactcagcttccattgtgctcactgtggggccaggacagctgtactctcttggtctcgatgtgtgacgatacgccaggagtattgctcacctgagcaatactaagaccctgtgtttggagtttttattacataggcaatgattgattgattatccacatggttgatctcagtctccgggtcactggataccgtgctacccaaagcctcaccctaatcacattactagactatgcaacatgaaccggggtctccggcaaacagtgacagccccataggcagggcaccccaggcgtgtctaggttactttcgtggagccaaggacaagggctggagtcctctctttggacaaggcgagattcttcacctggcagtgatcgccctggcagtgcccctcagtgctcatcgtggtgtatttactggttcgccctctcacacacaagcaggctaggggagagcctgcctgggcagagagaggacacaccctcgcaggaggtcagggcagatgccctctcgtgcctgatgcttcttggattttgttgggccagaggtcgggccatggctttaacgtgaaagctgatttcccccggcctctcactgcaggcaaggcctctcctgaaaaagatgctttgggaattatcagaccacgaaacactcagaaacatctccatttgtgcagcaatgttggggttttgcgtgtattggagccccacaggttgcaaggaacccggttttgttcctgtcctgcctccctccacagggcaggagtggggtacactgcagcaggagggtggccagagcgaggagctacggtttgggtagtgtccgttgtggcatgtgcattcttacaggtgtgcggcttcctatgtcggccacgcttgcctgcagctgtgaggggagtgcttggcagtgcagcagctggcaggagcgatggccctggggttggaggtttgtctccaccctttccccatcgtctctgtcctgtggctttgcagtgagcggtgcctttgccgtcatttccctgtgtgtccccacagtgtcctgctcagggattggcacgtggtagggttctaaggagtgccaggaaatggaatctgtcgccccaccccagcacacagaccttgatcatcagccagttaagtccaggcctttctgggtcccccctccccccaccacacccacagctctcctgagaggcttctgacaggccgcagtcacacagaattgagttcctctaactagacagtgggccaggatgagagaagactttccattctcaattcccagggtcatgggtttatatcagaatgagtccactgccctgcttgtgccctcgaggccgtctatgaaacgtaaaccagcgatctcagtgtttgctgcttgaagcaccctgagggatggggctgtggcttgagtttgagcggctgcagtcaggaacttccatgggctccgtgaggagctgctctcccagttctgcacactcccctccacaggcagaggctgggccagacccacaggcagccttcggtggtcccctccctaccccatccacctgaggagaagtgcgtgaggtctgtgagcaggaggcattcttccctttgtccccttagtcgggcttgggtaggtggcttctcatgcccaggtaccctgtcctgctgatgccgctctctcctccctcctgtctctctccgcctgctcagcagctgctttgcctgacatgcattgtttctgatggtggcccttccccttccccttctcagtttttcttcattccctcactctggctatgtggttatttcctcacagtagttccgagtctgagatggaggaggagggagaggaggaggaggaggagcctcgcctgcccccatctgacctgggtggtgttccgtggaaggaggccgtgcggatccatgcccttctgaaagggaaaagtgaagaggagctagaggcctcaaagagctttgggcctgggaatgaagaggaggaggaggaggaggaagaatatgaagaggaggaggaggaggactatgacgaggaggaggaagagtccagtgaaggtcagaacaaaatctctgctccgaactctgccctgccccccaaagtgatctgtttcatgcgtgagtgtaagaggtttctggggctgacgtcacacggacgtgcctcctgcacagcccagggaccacccctcctgacataagacatggggggcagaggggaggacaccgtagcgttgagcaggcggttggcagtggaagtaatgtcccttgtgcacattggtttagaaactggaagtggaaggcagagagccagtccaagtactcatccaagttaggccactcctacttgtctccacctcgttttctctttttgccctgtagtttcagttgaaaaaattaataaggaaagggaatttagctttctagaggattccctgatcctagtctagggtttcggaggtggctatgagcttagtgcccactggatggggctcagttgatggcacgcagggcagcgttttggggacagtgtcctgaagggatactcaggcccaggggccagccactctggctggttctgaaatagtctcttgccttggacttgagatttttcaattctgccccatctctgggtgtgtgtggcctcaagtgatgaggagggacttgctgggcctgtgcaggagagaaggccattctttctctgctccagcagcgcagaagtctggggggtggtgaagacggagccagggcaggtggagatctgagtccccaaaagatagatgtggagtgagcaggaaggacatgacctttaatttctgagcaccagtgactccctgcagcggtcagaggatcggttgagttctcagtgaccccaggccctgcagagctggcactgtgctcatctctgcttctcctggcacctgtgtgcttgctgcccagtcccatccgggggtctgttttctctggcacacagggctgagcccttgcctgacagggctcatgttcctgatccagtcccctgggagctgtgcagctccaggatgttggccccagtgaggtgggtta

SEQ ID NO: 1856 - DNA, 1233 bp, Homo sapiens
gattaacgtgacagtgtcaggtggacccacagccatcccacctccccctctggggagtgctgagagtgaggcagcatggaggagaggaagcatgagaccatgaacccagctcatgtcctctttgaccggtttgtccaggccaccacctgcaagggaaccctcaaggctttccaggagctctgtgaccacctggaactaaagccaaaggactaccgctccttctatcacaagctcaagtccaagcttaactactggaaagccaaagccctctgggcaaaattggacaaacggggcagtcacaaagactacaaaaagggaaaagcgtgcactaacaccaagtgtctcatcattggggctggcccctgtggtctccgtacagccatcgacttatccttactgggggccaaggtggttgttattgagaaacgagatgccttctcccgcaacaacgtcttgcatctctggccattcaccatacatgatctacgaggtctgggtgccaagaagttctatggcaagttctgtgctggagccatcgaccatatcagtatccgtcagctccaactaatacttttgaaagtagccttgatcctaggcattgaaatccacgtcaatgtggaattccaaggacttatacagcctcctgaggaccaagagaatgaacggataggctggcgggcactggtgcaccccaagactcatcctgtgtcagagtatgaatttgaagtgatcatcggtggggatggtcggaggaacaccttggaagggtttcgtcggaaagaattccgtggcaaactggccatcgccatcacggcaaattttatcaaccgaaatacaacagcagaagctaaagtggaagagatcagtggtgtggcttttatattcaaccaaaaatttttccaggaactgagggaagccacaggtattgacttggagaacatcgtttactacaaagatgacacacactatttcgttatgacagccaaaaagcagagtttgctggacaaaggagtgatactacatgtgagccacggatttccttcaaaactctttcttattgaagtggttaatatcaccaagagaaagaattgtctgatgggtttttcctgcaagggaatgaaaatgagcactgaatgcatcttctggtaacccctgatgttttccagtttagcgtgaacaactcttaactatggctaatttcaaatgtaaataaaaacggggggagaatagtgt

SEQ ID NO: 1857 - protein, 353 aa, Homo sapiens
MEERKHETMNPAHVLFDRFVQATTCKGTLKAFQELCDHLELKPKDYRSFYHKLKSKLNYWKAKALWAKLDKRGSHKDYKKGKACTNTKCLIIGAGPCGLRTAIDLSLLGAKVVVIEKRDAFSRNNVLHLWPFTIHDLRGLGAKKFYGKFCAGAIDHIRQLQLILLKVILGIEIHVNVEFQGLIQPPEDQENERIGWRALVHPKTHPVSEYEFEVIIGGDGRRNTLEGFRRKEFRGKLAIAITANFINRNTTAEAKVEEISGVAFIFNQKFFQELREATGIDLENIVYYKDDTHYFVMTAKKQSLLDKGVILHVSHGFPSKLFLIEVVNITKRKNCLMGFSCKGMKMSTECIFW

SEQ ID NO: 1858 - DNA, 3933 bp, Homo sapiens
gattaacgtgacagtgtcaggtggacccacagccatcccacctccccctctggggagtgctgagagtgaggcagcatggaggagaggaagcatgagaccatgaacccagctcatgtcctctttgaccggtttgtccaggccaccacctgcaagggaaccctcaaggctttccaggagctctgtgaccacctggaactaaagccaaaggactaccgctccttctatcacaagctcaagtccaagcttaactactggaaagccaaagccctctgggcaaaattggacaaacggggcagtcacaaagactacaaaaagggaaaagcgtgcactaacaccaagtgtctcatcattggggctggcccctgtggtctccgtacagccatcgacttatccttactgggggccaaggtggttgttattgagaaacgagatgccttctcccgcaacaacgtcttgcatctctggccattcaccatacatgatctacgaggtctgggtgccaagaagttctatggcaagttctgtgctggagccatcgaccatatcagtatccgtcagctccaactaatacttttgaaagtagccttgatcctaggcattgaaatccacgtcaatgtggaattccaaggacttatacagcctcctgaggaccaagagaatgaacggataggctggcgggcactggtgcaccccaagactcatcctgtgtcagagtatgaatttgaagtgatcatcggtggggatggtcggaggaacaccttggaagggtttcgtcggaaagaattccgtggcaaactggccatcgccatcacggcaaattttatcaaccgaaatacaacagcagaagctaaagtggaagagatcagtggtgtggcttttatattcaaccaaaaatttttccaggaactgagggaagccacaggtattgacttggagaacatcgtttactacaaagatgacacacactatttcgttatgacagccaaaaagcagagtttgctggacaaaggagtgatactacatgactacgccgacacagagctcctgctttcccgagaaaacgtggaccaggaggctctgctcagctatgccagggaggcggcagacttctctacccagcagcagctgccgtctctggattttgccatcaatcactatgggcagcccgatgtggccatgtttgacttcacttgtatgtatgcctccgagaacgccgccttggtgcgggagcagaacggacaccagttactagtggctctggtcggggacagcctcctagagcctttctggccaatgggaacaggaatagcccggggctttctagctgctatggactctgcctggatggtccgaagttggtctctaggaacgagccctttggaagtgctggcagagagggaaagtatttacaggttgctgcctcagaccacccctgagaatgtgagtaagaacttcagccagtacagtatcgaccctgtcactcggtatcccaatatcaacgtcaacttcctccggccaagccaggtgcgccatttatatgatactggcgaaacaaaagatattcacctggaaatggagagcctggtgaattcccgaaccacccccaaattgactcgcaatgagtctgtagctcgttcaagcaaactgctgggttggtgccagaggcagacagatggctatgcaggggtaaacgtgacagatctcaccatgtcctggaaaagtggcttggccctttgtgcaattatccatagataccgccctgacctgatagattttgattctttggatgagcaaaatgtggagaagaataaccaactggcctttgacattgctgagaaggaattgggcatttctcccatcatgacaggcaaagaaatggcctccgtgggggagcctgataagctgtccatggtgatgtacctgactcagttctacgagatgtttaaggactccctcccctctagcgacaccttggacctaaatgccgaggagaaagcagtcctgatagccagcaccagatcccctatctccttcctaagcaaacttggccagaccatctctcggaagcgttctcccaaggataaaaaggaaaaggacttggatggtgctgggaagaggagaaagaccagtcaatcagaggaggaggaagctcctcggggccacagaggagaaagaccgaccctggtgagcactctgacagacaggaggatggacgttgccgttgggaaccagaacaaagtgaagtacatggcgacccagctgctggccaaatttgaagagaatgcgcccgcacagtccatcggcatacggagacagctgacacaagagcgtggggccagccagccgtcctgctgcctgcctgggcaggttcgccctgcccccaccccccggtggaaacagggctccatgaagaaggagttcccgcagaacctgggaggcagcgacacatgctacttctgccagaagcgggtctacgtgatggagaggctgagtgccgagggcaagttcttccaccggagctgcttcaagtgcgagtactgcgccaccaccctgcgcctctcggcctacgcctacgacatcgaggatggtaaattctactgtaagccacactactgctatcgactctctggctacgcacaaaggaagagaccggcagtggctcccctgtctggaaaggaggccaaaggacccctgcaggatggcgccaccacagatgcaaacggacgggccaacgccgtggccagctccactgagagaaccccaggttcaggcgtgaacggcctggaggagcccagcatcgccaagcgactgaggggcaccccagagcggatcgagctggagaactaccgcctgtccctgaggcaggctgaggcactgcaggaggtaccggaggagactcaggccgagcacaacctgagcagcgtgctggacacgggcgccgaggaggacgtcgccagcaggtcagcacgcagggctgcagggcgcccacccgccacacggccctaagagcctcctcacctctgtgtgtctcggtttcttctcagtgaagggaggcctcctgtctttcctgctgcccgcagtccattctccccagtcccttttaggttcttagcctcatcttctagtcagtgaggactcctccatcagactcaattcagagattcaggaagtatttattccttgaggacctgacatgtccccagctccaagtctgtcattgggaaggaaagtggcaggctctgcccccgggttattcacagattcagcagagggaaggacgggcacacggggagggactctgggtgattcagccaccagtgcaccgggccgtcttgagggaggcctagtccgtcccccaggcatctttttttctcctgtaggtaaagaaagggactgaaaatgtgtgccccaggggccgcatgcagcaccagtggatgcatgcttaggcagttccagagctgtaatcacatccagctgggtgacacctttggggatgtgcatgctataaccctaggactccctatatccactgccctgcaccccagggcttccagtatcagcgaaggcttcaaagtgttcagccgattacagatgatcaagagagccaagaatcaaaagggggtccggtgtcctgtggggcttcaggacagaaacacaggctgcaaacccgaggggcagaggcctcaagtggccttggagagcatttgaatcacacaccttgatttagccatgatgaagggaacatgtggggataaggagagcagagcagtttttttaaggtccaagaacgctttccagaaggtgtttgctgggccgagctgctttcagctgcacccgccacctcagccctcatgtcagacaccctctgcctagattcattcttgggctgcctcacagaccgctcctccgtgcatgccgggggcagcctctgcc

SEQ ID NO: 1859 - protein, 966 aa, Homo sapiens
MEERKHETMNPAHVLFDRFVQATTCKGTLKAFQELCDHLELKPKDYRSFYHKLKSKLNYWKAKALWAKLDKRGSHKDYKKGKACTNTKCLIIGAGPCGLRTAIDLSLLGAKVVVIEKRDAFSRNNVLHLWPFTIHDLRGLGAKKFYGKFCAGAIDHIRQLQLILLKVILGIEIHVNVEFQGLIQPPEDQENERIGWRALVHPKTHPVSEYEFEVIIGGDGRRNTLEGFRRKEFRGKLAIAITANFINRNTTAEAKVEEISGVAFIFNQKFFQELREATGIDLENIVYYKDDTHYFVMTAKKQSLLDKGVILHDYADTELLLSRENVDQEALLSYAREAADFSTQQQLPSLDFAINHYGQPDVAMFDFTCMYASENAALVREQNGHQLLVVGDSLLEPFWPMGTGIRFLAAMDSAWMVRSWSLGTSPLEVLAERESIYRLLPQTTPENVSKNFSQYSIDPVTRYPNINVNFLRPSQVRHLYDTGETKDIHLEMESLVNSRTTPKLTRNESVARSSKLLGWCQRQTDGYAGVNVTDLTMSWKSGLALCAIIHRYRPDLIDFDSLDEQNVEKNNQLAFDIAEKELGISPIMTGKEMASVGEPDKLSMVMYLTQFYEMFKDSLPSSDTLDLNAEEKAVLIASTRSPISFLSKLGQTISRKRSPKDKKEKDLDGAGKRRKTSQSEEEEAPRGHRGERPTLVSTLTDRRMDVAVGNQNKVKYMATQLLAKFEENAPAQSIGIRRQLTQERGASQPSCCLPGQVRPAPTPRWKQGSMKKEFPQNLGGSDTCYFCQKRVYVMERLSAEGKFFHRSCFKCEYCATTLRLSAYAYDIEDGKFYCKPHYCYRLSGYAQRKRPAVAPLSGKEAKGPLQDGATTDANGRANAVASSTERTPGSGVNGLEEPSIAKRLRGTPERIELENYRLSLRQAEALQEVPEETQAEHNLSSVLDTGAEEDVASRSARRAAGRPPAW

SEQ ID NO: 1860 - DNA, 4626 bp, Mus musculus
ttccggtgccctttctcccgcgagctctaaggccgccgatcctcgtgtgcaaggcgaggtctgtaagctggagcggggcagaggctggcgggcaccccctcctgaccgctggtgccgccgccgccgccttcgggaggatcagacatggcccagaacttgaaggacttagctggacgcctgcccgccgggcctcggggcatgggcacggcgctgaagctgctgctgggggccggggcggtggcctacggcgtccgcgaatccgtgttcaccggtgagcagcctccttccgctggccggacgttgcggtccccagacccacggtcctgctatcccccaggtgtccccgtcccacctacgctgaccagcactcgggccagtagcctgccctgactcccacccctctctccgcagtggaaggcggtcatagagccatcttttttaatcgtattggtggcgtgcagcaggacacgatcctggccgaaggccttcacttcaggtaatggcgggcagagcgaacaggccctgacccttcacccttgacggctgcagccagacttaacaattcggagctgctttaccccttcctcacgcctgctcttgaggacagtggctgcctgaaactccagcaatgcataaagggctgttctcgactgggaagagtccttgtggtcgtggggaggaacaggcccaaggacgagtggtgaggggaaccatcaaaatcaataaaactgcagtttcccaactcctgtccatgacctctcctctccaggatcccctggttccagtaccccatcatctatgacattcgggccagacctcgaaaaatctcctcccccacaggctccaaaggtaaacgtgggcaactgggagcctcagggcacgtggggaaacaaatgtaaaatgagcctggccaggctgccagaattggttgtgtttctgaggtcttggtttctacgtctgcaaaagagccatgcctcacggttcaaaaaacggtgcattccagtacttggcatgcatgcacgttttaacgttaccttctgcctagcataaaagggataagagttgcctttcttcctggctgcctaggtccaagtctgtttttaaggcctttttttttttctgttgatttgttgattacatccacagtacaccttgctctggagaaagtgcccccactcttcactagctgttgccctgtagaccatagttagaaggcctgcctttgagattccccaagcctgggcctcattcccatgtacacaccgaggcaagtagcccacagaagtgtgcttctctgttgctgtttgtggtgtgtgtggtttatgcgtttgctaagccataggccttggaaataaaacacagttctggttctcaaggccctaatggcaagggggaaacccaagattatgctgcttggtggaatccactttggaggaggagtagcaatttattaaaaaaaaaaaaaaatagctgtactggtggaaggtccatagaaaagattccacagtaaacaagggtctgcctcgcccatccatgttgttcacatgctctgtgttgacatgactatcttcctgctggagtgctaggctgtacagtaacactaggcatggtgggaagcactcctaggagaaagcgctggaaaagggggaatttggccttacccggcggccactgctgacctcttccctcagacctgcagatggtgaacatctccctgcgtgtgctgtcccgacccaatgcccaggagctccccagcatgtaccagcgtctagggctggactatgaggagcgagtgctgccgtccattgttaatgaggtgctcaagagtgtggtggccaagttcaatgcctcgcagctgatcacccagcgggctcaggtctgactcctatcactgtctgcacggcggcagcctgtgtctctccttggtcagggttactgggtactgaaagaaggtatttcgggatggggtgggacggatctgtagttcagttgatatgtacttgcctaacatgcacaagccctggttttattctcaagcattgcttaaaccaggtgtggcacatgcctgtaatcctagcactcgaggtagaggcaaggggatcaggggtttaaggttatccttagctgcatggactgtgggaaagctgtgctgtgactgtgggaaatgaggagaaaaacggtagaacctgacaccagtcgaccctaagaaggaagcatagtacagaaagtggcagtattgccttacatctccacagaaggtcttcctccgttaactggaaactaaagagatgcataaactgaaaagaagagattaggtctcagtgtgatgtggggcagtctggtgatgccacggctgtcacaggaagaaatggaaccaagttttttctagtgaatgtttgaggacttaagtggtgggtttgctgcccatattcaggagctccggtgttcagatggttacagcaatgccaccaccttccttccagttctctgatcccctcaaaccaagcctcccttcccctcccgacccatgcccccaggtgtccctgttgatccgaagagagctgacagagcgcgccaaggacttcagcctcatcctggatgatgtagctatcacagagctgagcttcagccgagagtacacagctgctgtagaagccaagcaagtgggtaagtccatggaggcaggcactggtcggggggcttctggaggtgggaggaggggggctacatgttcttgggcttcttacacctcacacttaatccacagcccagcaggaagcccagcgggcccagtttttggtggagaaagcgaagcaggaacagcgacagaagattgtgcaggctgagggggaggcggaggctgccaagatgatatccttgtgttgcacagagcgtggcctcatcccggggtcagcctgtttcccatcttccaccatgggccggttgatgagaccaaggcgaatgcgacttggcctactgactctttcttggcttgggaatgggggttggggggggggggacaactggtgagatctgaaatcttggtgggggtacctaaggcctgactccctgctgtaaggccagatcaatagcactactggccttgccctcatgtcagctgccacacagtactggcagcatcctgtagggaggcccacagggggtagccaacatgtgagtagccatgtgagcgcaaccttgaatctgacagcccaggggattcgagggcagagggagcttgccaccaatgtaacctggcccagaagaacccttaaccctgtctgctcaccttggagaagcactgagcaagaatcctggctatatcaagctccgaaagatccgggccgcccagaacatctctaaaacggtgagtggaaggcttcaccatccaagggctgctacacagtcacacagtggcattagaactggcttgagtttctacttaaacaatgtctttgggcacccttcctcctgcagagtgaccgaccccacagtgctccccgggttttgtttatggctgttacagagctatgacactaagccttcttgcatcgggtctttgtactagagcaggagcctgttctgttactgtgtcttccactgggtggccattgaatcaaagacttgaagcctgttaacacgtctgttccatgtcctgtagatcgccacatcacagaaccgaatctatctcacagctgacaaccttgtgctgaatctacaggatgaaagttttactcggtaagagatcccactgtccagagagcaaagcacccgtccactaccctggatcctggactatctagttaccagggccgtggacagtttctctgaacaccagtcagaaaagtgggtgtcagtctggttggcagttcctatcttgcatcttctaggactgactttataaagcaaagcaggatgtcttatgggaaaggcactttataaatatctaaatgagaagtgacgactggtagcaatttcacgtgagacccacgttgctgggaccgcacagatagtggcaaagagccgtcctcactggggagtgcgggtctggagcagctgagcctgtagctgactaacgatttatttctcttttcacatatttcctgctcacttcatggcatgctggttgcaggggaaggtaagtggctgcctccttgctatggggtcctgggggccatctgcttcctggacctgcccctacaccccctttctccccattgtcaggcctttatttaggaagaagctgtggtttggggtgttgtgcacctcacacttacatccccgataataggaatgttccctttgttctccagtgacagcctcattaagggtaagaaatgagtgtggacatcaagaaccccaccaccagagaagttggcacacttgtccagcttggaggagccagctcgggggtcaagcacagcccaccctgccccaggcatcatgtgatggacttttctgtatctgccctcttggattaaggaagactgagaccagccctttcagaggctttcctccttcctgtgttggctgggaagcggggtgggacaatgtgatttctccgtgatttcctacagccttgagcctctcccagagtgggggagataaccaccatgccaggaattc

SEQ ID NO: 1861 - DNA, 1328 bp, Mus musculus
ttccggtgccctttctcccgcgagctctaaggccgccgatcctcgtgtgcaaggcgaggtctgtaagctggagcggggcagaggctggcgggcaccccctcctgaccgctggtgccgccgccgccgccttcgggaggatcagacatggcccagaacttgaaggacttagctggacgcctgcccgccgggcctcggggcatgggcacggcgctgaagctgctgctgggggccggggcggtggcctacggcgtccgcgaatccgtgttcaccgtggaaggcggtcatagagccatcttttttaatcgtattggtggcgtgcagcaggacacgatcctggccgaactctcctctccaggatcccctggttccagtaccccatcatctatgacattcgggccagacctcgaaaaatctcctcccccacaggctccaaagacctgcagatggtgaacatctccctgcgtgtgctgtcccgacccaatgcccaggagctccccagcatgtaccagcgtctagggctggactatgaggagcgagtgctgccgtccattgttaatgaggtgctcaagagtgtggtggccaagttcaatgcctcgcagctgatcacccagcgggctcaggtgtccctgttgatccgaagagagctgacagagcgcgccaaggacttcagcctcatcctggatgatgtagctatcacagagctgagcttcagccgagagtacacagctgctgtagaagccaagcaagtggcccagcaggaagcccagcgggcccagtttttggtggagaaagcgaagcaggaacagcgacagaagattgtgcaggctgagggggaggcggaggctgccaagatgcttggagaagcactgagcaagaatcctggctatatcaagctccgaaagatccgggccgcccagaacatctctaaaacgatcgccacatcacagaaccgaatctatctcacagctgacaaccttgtgctgaatctacaggatgaaagttttactcggtaagatgacagcctcattaagggtaagaaatgagtgtggacatcaagaaccccaccaccagagaagttggcacacttgtccagcttggaggagccagctcgggggtcaagcacagcccaccctgccccaggcatcatgtgatggacttttctgtatctgccctcttggattaaggaagactgagaccagccctttcagaggctttcctccttcctgtgttggctgggaagcggggtgggacaatgtgatttctccgtgatttcctacagccttgagcctctcccagagtgggggagataaccaccatgccaggaattc

SEQ ID NO: 1862 - protein, 101 aa, Mus musculus
MAQNLKDLAGRLPAGPRGMGTALKLLLGAGAVAYGVRESVFTVEGGHRAIFFNRIGGVQQDTILAELSSPGSPGSSTPSSMTFGPDLEKSPPPQAPKTCRW

SEQ ID NO: 1863 - DNA, 25965 bp, Homo sapiens
tttagtttagggttcttccagttatccattctaacactagtacaaacataaaaatccacatttatgccacaggattttgcctgaaccagtcacatttctgcctttaaagcctattttcatgtatatatgaaatatatttatgattgataggtaggtaggcaggttgataggtaggtaggtagatagaggctgggcacagtggtttcacctctataatcccagcactttgggaggccgaggtgggaggatcacttgagcccgtgagttctagaccagcctggcaacatagagagactctgtctctacaaaaaaatacaaaaattatcagacatagtggcatgcatctgtagtccaagctacataggaggctgaagtgggagaattgcttgagtccaggggaggtgggtcaaggctgcagtgagctttgatcacaccactgcactccattctgggcaacatagcaaaatcctgtctcaaaaatatttatcagtaggaaatgcaggagggcacagtggctcatgcctgtaatgccaacgctctgggaggccaaggcaggaggatcactggaggccaggagttcaagaccagcctgggcaacatagtgagaccccatctctacaaaaaaaaattatccaggcaaggtggtacatgcctatagtcccagctactcaggtggccaaggcaaggggatcgcttgagcccaggagttcaaggccacagcgagcaatgactatgcctctgtactctagccggagtggcagagcaaggccctgactctagaaaataaaaattaaaatggtaaaaaaaaaaaaaaaaaaaaagtttaattgccagaagaattccttcactgagaacttgtccatcctgtgtttcagcatcaattcaaccaagaaatgaaggagcagattcaaagtggttatttttattatcttacctccactgggttttcagtcccaatggagattgtgagacctggcaagaccttgagatcagtagcatccctgaggggtaaacacaagactggtccactgtctgctgccctgactttcctacaactcttaagaggtttgcagtccccattcctcatagccagccatagaaatctttccctgaaacaggaaacactttgggcagcagagcttctcatcccattccaggtagacaaccacacccctaaacactcctctccataactgaaggtcagagggtgaagggaatagtctctgctctctgtgaccaggaacttcactcgttcctttccagcatcattcctgctctcaagcgcctgagtctgggccttttctacctagtgggctacacactgctcagcccccacatcacagaagactatctcctcactgaagactatgacgtgagtgtctactaaagcagcagcagcatgactgcaccagagctagaaaatggacaggcaaggatccctacagatagcagagaagtaggaaatatcatctacaagtgcatgttggttttgctctagatctgtgagttgtcaatgccagccgtgctgggacatgttcatcagccagcactgaacaaccttcgcgggcacagggctgtgccaggtgcacatttagcacccgttgccttctctaggagccgctcctagcttgccttatcacatccacgtgacccctcagagcacagcagcttctgattctccatcctattttcttctcttgactgatacatttgggcacttctagggaattcagaaaccaagggaaggggggaagtgctggcttttgctcctgcccagctgaaaggcttgaaaacagttcagtaattctgggcaggtttctctccttaaattaaaatccaatatgggcccctctgtacttaacattccaaatgctcattccaaacactttgccaacgaaggcaaacagtagagaagttaaatacagtgctgcccttgaggctctccaagggaaaggcgaatgaatattctccaggccctctgcttattcctctctgcctattgtgaaggcaatcaggccagactattgagggcatctggcagcaggactcaggcaggtatgaagtagccagccacaagtgtgaaaaggaagagtgctgagagaaactgcctagtcatgtgatatccctaatgcactgtgctttcttccctcaagaaccaccccttctggttccgctgcatgtacatgctgatctggggcaagtttgtgctgtacaaatatgtcacctgttggctggtcacagtaagtagaaaagttgaaacaaggtcctatttagacaagccatgggggccagtatggggagtggcaagagccctaactgagctattccctctcaggaaggagtatgcattttgacgggcctgggcttcaatggctttgaagaaaagggcaaggcaaagtgggatgcctgtgccaacatgaaggtgtggctctttgaaacaaacccccgcttcactggcaccattgcctcattcaacatcaacaccaacgcctgggtggcccggtgagctgctggtggggagcctggaccctggttccttccttccactgtcttcccagattggagggcaggggtgtaccatgtcacccctatgcgtctttcccatctgggcagaaccccctgtcgctcacactgactttgacccccacctatacccccctcccaaaaaaaccattactgtcatatttgaaaaaaaggcaagatataaaagtgcgttaagacctgggtgttactccagctctgccaatggacttatgtcctccactgccctgtttatcaacagctttacttgtttgtccccaccactagagtgtgggcagcttgagtagagtgtctggttcaccactgatctcagcatcagcctcagtcactgctgctgaaccaagtggctcgtgcgcacacggtctccagctccgccttgggtctgctttccatctctaaaagtaatcagtcagcactgcctcctgtaccctctgggggctacacgtgggaacccaccagcactccaatccaatcctcagggtgaggacccagaggcaggtggcgggatgcaaggaccagtcagtttgagggtcgccccacccacccttttctccagctacatcttcaaacgactcaagttccttggaaataaagaactctctcagggtctctcgttgctattcctggccctctggcacggcctgcactcaggatacctggtctgcttccagatggaattcctcattgttattgtggaaagacaggtaggcctccagggtgggggtgaaggggaatataagggacaagatgctgatgagctcctcctccctccccaggctgccaggctcattcaagagagccccaccctgagcaagctggccgccattactgtcctccagcccttctactatttggtgcaacagaccatccactggctcttcatgggttactccatgactgccttctgcctcttcacgtgggacaaatggcttaaggcaagtgaaggcctgcttgtgagactgggagggactcactgcaacctcaaaggttgcaaaggacactccaggcctgtctaccttagtggcctctctctccacaggtgtataaatccatctatttccttggccacatcttcttcctgagcctactattcatattgccttatattcacaaagcaatggtgccaaggaaagagaagttaaagaagatggaataatccatttccctggtaagttaatacagctaaactaaaactaccaccaggttacagaatagagcaacagactggaaaaaaacaatagtattagaaatctggggtgaattccaaggattagcctggctactaaggaacacagtatgggcaatgactactgtgacttattgaggcatgctaggaaacatctggaagggctatagaccaggaattacaggagtaactaaccagccttccaaactcctcttgtcttgcaggtggcctgtgcgggactggtgcagaaactactcgtctcccttttcacagcactcctttgccccagagcagagaatggaaaagccagggaggtggaagatcgatgcttccagctgtgcctctgctgccagccaagtcttcatttggggccaaaggggaaacttttttttggagaaggcgtcttgctttgtcacccacgctggaatgcagtggcgggatctcagctcaccgcaacctccacctcctgggttcaagtgattttcctgcctcagcctcccaagtagctgggaatacaggcacgccaccatgcccagctaatttttgtattttcagtagaaacgggatttcaccacgttggccaggctggtctcgaactcctgaccgcaagtgatccacccgcctccgcctcccaaagtgctgggattacaggcgtgagccaccgtgcccggcccaaaggggaaactcttgtgggaggagcagaggggctcacatctcccctctgattcccccatgcacattgccttatctctccccatctagccaggaatctattgtgtttttcttctgccaatttactatgattgtgtatgtgccgctaccaccaccccccccatgggggggtggagaggggtgcaaggccctgcctgctccactttttctaccttggaactgtattagataaaatcacttctgtttgttcagtttttcaccactagcattcctgactgctctctttcacagttcttctccatcatcagggttctctcctttagcacatgggaatctgggagctaaagcctgccttcaaagcatggaaccaaactgcaaactctgtaacctcctatctgtccctgaagtcccggggaacaaacagttttacaccactggatactttaggaaccccaaaacaaccaggtttgcaagaacagtattcataggataaacaaatagcaaatgtacagccttggcttccccaaactccacagtctcagtgcagaaagatcatcttccagcagtcagctcagaccagggtcaaaggatgtgacatcaacagtttctggtttcagaacaggttctactactgtcaaatgaccccccatacttcctcaaaggctgtggtaagttttgcacaggtgagggcagcagaaagggggtagttactgatggacaccatcttctctgtatactccacactgacctaagaaaagaacagttttgtcagccaactctgtcactcagtagctgtttcagcccttctttagggcaggaaaactatggctgagctagtatttcagctgtgctgttgaatatcaaatccctacaaaggatgaagaaggtcctaactgtgacttccaattatggcagcagccctcaaaggatgtgccctggggcagggtgtggaactgtcatgtgtcttctagctcattgtaagcattgttaaaatgcctactgctctgggaattctatactaagttcagctctaccaagaatttcagggttgagcccagaccttaccttgccatgggcaaaggcccctaccacaaaaacaataggatcactgctgggcaccagctcacgcacatcactgacaaccgggatggaaaaagaagtgccaactttcatacatccaactggaaagtgatctgatactggattcttaattacctaaagtaaaaaagagagaaaagtcagccccagaaacattcccagaaccagccttcaactaacaggtttcaatacctcaccttcaaaagcttctgggggccatcagctgctcgaacactgagcttgtgtaaaagttgaactagaagggggaaaaaagagttcagagctagatggagaccacagtccttctgtccagtcatcgaacaaggaaaaccccatggataagatgagttccctgtgtgctttatatctagactggactcctgaaatgttaggaacaaacagttgccaagcatatggctagctgtacagtgatgggttcagactccctctttcactcagccaggaagctactgcaagaacaggagtggagtttccacaaacatagaaaaataataacagtccttgtcctggtattaatcatgttgttctcccattttctcgcttaaaaatccacatttagttctcccttttcctcttcctcccttcttccctactgacaagttcattctaactttgttctaaggcttcttacccatgaggccacaaaagcggtcaaaggttctgggaattcgggtctggggattcacttcaatcagaacattcttctgtgtatggatataaacctgtagcaagccagctcggttcaggggactatccatcagcatcagcaaactctgagcaaagcagaaaccgagacatggttaaggctgaagagaggcagcactcagctgccaacccttccatacagaggctcaaagggttgtgagcactgtccctggagttacctggtgggtgatatctggccgcgcttccccagggtcccgtccattcttcaacaatatagacttgtgcttgtcacagttgagtagctcatatgtcttccctacctgaagaacagggaacatgacgagagaacagcataagcttctgttacctagccccgtggttcttcaagtgtggtccccaaactaccagcagcagctgcacctggaaacttgttaggcaaattctcaggcccaccctagacctactaaaccaggaacactgggggtggagcccagcaagcccttcgggggattactgtgcagccttatttgcactccccagtgaatggtctgagagggaaacaggaggaagggcacaacctgtgacttcacattatctactaatacactggatttaattaaaaaacctgtggctgttaggcaaggccaatgagacatcctggaactaggcaggagttagtagttagcaaggctgaatgctgtgtttattacaggagcagtaagtaggtactgtgcaaaatatcgagtcaccaccctcagtttgcgtacaccaaacatgcactaagtgaagagctgcaaatctgaacaagaaatgtgaaggccgggcgtggtggctcacgcctgtaatcccagcactttgggaggccgaggcgggcagatcacaaggtcaggagattgagaccatcgtggctaacacggtgaaaccccatctctactaaaaatataaaaaattagccgggcatggtggcaggcgcctgtagtcccagctacttgggaggcagaggcaggagaatggcatgaacccaggaggcggagcttgcagcgccactgcactccagcccgggcaacagagcgagactccatctcaaaaaaaagaaatgtgaaaactaatgatgcaggaggcagtttaatcaaagaaaactctcagaagtaaaaggaagaggggttattcccagttttaagacgggcatgggggcagatgcagtggctcacggctgtaatcccagcactctgggaggccaaggcaggcaaatcacttaaggtcaggagttcaagaccagcctgggcaacatggcgaaaccccatctctactaaaaatacaaaaattagctgggcatggtggcacatgcctgtagtcctagctacttgggaggctaaggtgggaggatggcttgagcccaggagacagagattgcagtgagccaagactgtaccactgcactccagcaagaccctgtctcaaaaaaaagaaaaaagaaagactggcatgagcaaaggtacagatggaatcaagacaaagtagccaggtgtggtggcttatgcctgtgatcccaacactttaggaggccgaggtggaaggatcacttgagcccaggaatttgagaccggcctgggcaacacggtgggaccctgtctcacaaaaaaaaaaaaaaaaattagccaggcgcagtgccatttgctggcagtcccagttactcaggaggatgaggtgggaggactgcttgagccagggaagtagaggctgcagtgaaccatcacaccactgcactctgttgcccaggcaacagagcaagaccctatctcaaaaaagaaacaaaaaagaaaaagtggaaacgaagaaaggaaattttgaggaaaattgggagctgagacactaaagggcagtgattatatatgaagctgctttgtaaaccacagaatcctaatgtatcaagcacaaagccaaaaataattctggagtaagcagggcaggatgggaatgactgacagacactatcctaacaactctctgtacactggaaaagacatcagaagtttgatgttaaagaagtggactacatctgtagcagctaaaagaaataattccaagttgcaatttggagtcccaaggagcattagggtggtcagtaaaaagtctaaaaacaaactgttatatacaaatacaagttttggaaggttaagtttttatgtatcactggaatgtatatgtctagcaacattcttgagatatatggctccaaaaagtctgcgaaaaaagggatgtagattttgaaattgaatagttgaagtaatgtcacagagagcacaaagaacaaatgaccaagaactaagtccatgagacacccttagttatagaagaaaaaaaccttcttgaatgaataatacagtttcaacccattagtaggatataatcatgttttctattcttttaatagattacaggcgcaggcctgtaatcccagctactctggaggctgaggcaggagaatcgattgaacccgggaggcggaggctgcagtgagccaagatcgtgccactgcactccagcctggtagagactgagactccatctcaaaaaaaaaaaaaaaaaaaagtgtatttagaacgaagattaaaatcctggcctgacttctaaaccaatgcgatttcttctgggcctattcaattagttctaacgggtaagagaaaggaggaggaagaacactgcccaaggctttaagatagagaactgctggttctattacatgtggggaaagagatgaatgatagataaaaatgcagatgtaaaagttttaaataataaccaggtctggacagtgtatcataggtggatattagagagaggtgactatggatactaatgaattgaaacacgaagcccttacaaaaagtgtgggcagactaggctacataactacgtttctcatctgcccagtaacttgtcttgggatgtggaatgacgcaaggaacgaaactttcctctgcttagactactataccacagaatcctggtaaaccaattggaagcaaggaggtgagggctagaatatcattcaaaaagagcaaaagaaaatgagtactaccggccgggcacagtggctcacgcctctaatcccaacactttgggaggccgaggcgggcggatcacttgaggtcaggagttcgagaccagcgtggccaacatggtgaaaccccatctgaactaaaaatacaaaaaaattagccgggcgtggtggcacctgcctgtagtcccagctactccagaggctgagtcaggagaactgtttgaaggcgggaggcagaagttgcagtgagccgaggtcgcgcaactgcactccagcctgggcgacagagcgagactccgtctcaaaaaaaaaaaaaaaaagaaagaaaaatgagtactaccatcccaggatgtcaaatcaacgcaaagccaaccaagccaccttccttcaaaagcatctttcacccctctctgctttctacatccactctgggccccttaccctcattccacggagtcccaacctatcgatttactacttctccacttcctgtcccaaactaccttgactgtctccagactggccccttccagcaccacaataagcctacggcctccgatcttgtttcctgcccctagtcggggccgcttgggtggcagagcatcccagtcctgtgcctgctccccaccgcttcgttcacgaggcttgaatccatcactgggcgcggccatcttgcaacaataccggaagttgcgctaacgctcttaaataagaacagcgcggcttctaatcacaaatttccttccggctgccattttgaaagtgggccaggaaatggagatgacttgctgtcttgcgctgccctccctgggagggcagccttccagaaaggggcgggacttccgtatgcgcgattcctgtgcgcgaagttcgggtccgtagtgggctaagggggagggtttcaaagggagcgcacttccgctgccctttctttcgccagccttacgggcccgaaccctcgtgtgaagggtgcagtacctaagccggagcggggtagaggcgggccggcacccccttctgacctccagtgccgccggcctcaagatcagacatggcccagaacttgaaggacttggcgggacggctgcccgccgggccccggggcatgggcacggccctgaagctgttgctgggggccggcgccgtggcctacggtgtgcgcgaatctgtgttcaccggtgagcaacctccgcctgctcgccggacgcttccagtccctcccccaaaccccttgccctgtccccgcgcccctccacgggcctagcatttcctctgagcagcggcctggcctgatcaccacccatctccccacagtggaaggcgggcacagagccatcttcttcaatcggatcggtggagtgcagcaggacactatcctggccgagggccttcacttcaggtaatggcgggcagagcctgctgaccctgacctttcacccttgacgccgacccagcagtggctatagtcggacgtgcaacaggattcaacgctgctcttttcccaccctcctcatccctgcccctaggatagtgggtgctgcgcgaacctccagcagcatacaaactgttgttttccagagggacaagagaatctctccttgtctgtggtcgtggagaggagcaggccaaaaaacgcgtggtgaggggaaaccgggcaaggctagtgaaactgcggccttttctttttttttttttggagagggagtcttgctctgtcgcccaggctggagtgcagtggcgcgatctcggctcactgcaacctccgcctcctgatttcaagcgattctcctgcctcagcctcacgagtagctgggattacaggcgcccgccaccacgcccggctaatttttgtattttagtagagacggggtttcactatgtagatcaagctggtctcgaactcctgacctcaaatgatccgcccgcctcggcctcccaaagtgctgggattacaggcgtgagccaccgcgcccggccgaaactgtggcctcttaatacctatccctgtcctctccaggatcccttggttccagtaccccattatctatgacattcgggccagacctcgaaaaatctcctcccctacaggctccaaaggtaggtctgagcacttggtaatcacatggcaggtgggatgatcaaggtagctggcaagaaaccccaggggaatatggtagtgtcaggcctttaggcctctttccacatctgcaagagctgtaacaaaaatacctgcctcctggggtcaaagcagcaaattctgaacacactgtgtttgcgtgctttttactgtctcctccctgacgtgtattcaataagagtattgtttgtccctcgtcttgttcactgcctagatcaaagctttgttttaaagccttttttttctaactgcttgacttactatatctacagttacatccactagtacactctgttctggagaagtttgtccctaagcttgactagttcacctgttctctccttctagaccatacataaaagccgtgcctttgagttccccagacctcttcctcctccccacccacgcacacatatacaccctgggtcaggtagctcacctgtaacctgtaatgtacttctttgtgctatacctagtgcaggtcgcttattcatttactagactgggccctgggaataaaagattcattaaacacaattcttgtcccccaagtccttacaggagacatgattacggtacagcacgaaagcgcccacgttagaggttgcacagagtacagagggggaaagagtagtcagctctgctggtgacggggtttgcagttcaaggcttcacagtgggtgagggtgcatttcagctgtgctgcgtcttgtcttccttgtcagcctgattaactctcctccccccagggtagtgccaggctgtacaccattgcacagggcatacagggaggaacatgaaggagaaaatgcttgggaaagggtgtttggccttgaccagccactgctgacctcaatctcagacctacagatggtgaatatctccctgcgagtgttgtctcgacccaatgctcaggagcttcctagcatgtaccagcgcctagggctggactacgaggaacgagtgttgccgtccattgtcaacgaggtgctcaagagtgtggtggccaagttcaatgcctcacagctgatcacccagcgggcccaggtctgactcccaccaccatctgcgtggtgtcagcctttccttcctaggcccagagtattgggaattaggaaaggcagcttattagaaaagcattgtcaccctagtgccatttccacctaaaagctgtgctaattgccactgtgaaataaggagagccagcattagaactcgatagcactcggtgttaggaagcacagaggaaaatggccaagtcttggcttttcctgcacctcttcgagcagagaggcttatgttacaggtttgcctgacaggaagctaaggcagtgcatgttgtattgagagtgaagggttaggggtcgcaaccttcctttcagctccccagtcccctcaaaccacccctcccttcccctcttcacccctgccctcaggtatccctgttgatccgccgggagctgacagagagggccaaggacttcagcctcatcctggatgatgtggccatcacagagctgagctttagccgagagtacacagctgctgtagaagccaaacaagtgggtgagtcgcaagagccgtggggtgagggcttctgagatgcaggaggaggaaagactccatgggtggggctcctgacccaggacagggtctccctgactctctcccaccacagcccagcaggaggcccagcgggcccaattcttggtagaaaaagcaaagcaggaacagcggcagaaaattgtgcaggccgagggtgaggccgaggctgccaagatgatatccttctgctggagagatctcagcccagcccctagggcacctgagttccccattctccttcatgggcaggctgatgagactaaggcgaatgcgactccgtgctctctggcccttggctccttgttgggggtggggactacagatgagatctgaaatcttagtggtagtacctgagccatgactccccactgtaaggccagatcaatagcattggtggccttgccttcatttctggtgctgcccctagttcctggcagcagcctgcagggaggcccacaggtggggtccacggtagggctgggcacaagccacctgagcgcaaccttggatctgacagcccagaggaggactggagcaagggagtgtggtaaggacagggccagggattgagacctgcccttgcgtgtaccttaaccctcctcaccttggagaagcactgagcaagaaccctggctacatcaaacttcgcaagattcgagcagcccagaatatctccaagacggtgagtgtgtcagcccagcgtctctgatggggctgccttgagaaagtgctttcagttaaggcacattgaggtgagggaattcgaaccttgcttgttccggtttctactcagattggcttctctggccggcgcggtggctcacgcatgtaatccccgcactttgggaggccaaggtgggtggatcacctgaggtcaggagttcgagaccagcctggccaacatggtgaaaccccatctctactaaaaatacaaaagataatgagcccgctgtggtggcgtttagctatattcccagctacgcaggaggctgaggcaggagaatcacttgaacccaggaggcggaagttgcagtgagctgagatcatgccactgcactccagcctgagcaacagagcaagactccgtctcaaaaataaataaataaaaaattggcttctccgatactcctcctgtcaagaatgattcctctgggttccctgaccttttgttctaatcatagctgctgctcagcgctctggatccctaagtgcgagcagaaaccatgtgttactcattgctgcacccctgccctaatctgcatgtgttccatgttaagtagctgctgaattgcaggggtcggaattgaggtctttgcttaatgcaagcatctgtcttatttcctgccctgtagatcgccacatcacagaatcgtatctatctcacagctgacaaccttgtgctgaacctacaggatgaaagtttcaccaggtgagagatgtggccacactgtggggtatcaccaagaacgtgggacctgagtctggttgtttgggctctggagcctgctacagctattcatatggctcagagacattgaaccaaaattagaaaagggggtggttgacagtttctatcttgcatctcataggattgattttatgagatcaaataggattattcacataaaaagcactttaattataaagttttcatctaaccaaaaagtgatgaaagatgatactcagttttcttactcaagagccctcaaactcctctggtgaatggagggatgttaggaaaggagatgagaaatagcagtggccatgagaacatgcctcctcctttcatgagcctgagattcctggctgtcaaccctgtttatcttttctcttgggagcaaaggagggttcaaagctgagtggggcctgaagctgtcaattaacatgtgcatttctcttctctgtttcttgttcatctggcgatctggcaccacaggggaaggtaagctgttgttgcttctgtggggtcctgcaggccaccttctccagtacccgcctcctaccctaccccctttcccacctccccgaagacaaaccctcaatcagggtaggagggtcgtagagggaatggcctagagtgtcctgcctctcacatttatgtcccctaataatgtcattatctatcttttttttcctacagtgacagcctcatcaagggtaagaaatgagcctagtcaccaagaactccacccccagaggaagtggatctgcttctccagtttttgaggagccagccaggggtccagcacagccctaccccgccccagtatcatgcgatggtcccccacaccggttccctgaacccctcttggattaaggaagactgaagactagccccttttctggggaattactttcctcctccctgtgttaactggggctgttggggacagtgcgtgatttctcagtgatttcctacagtgttgttccctccctcaaggctgggaggagataaacaccaacccaggaattctcaataaatttttattacttaacctgaagtcaaggcttcacgtgttcatgaactgggtaactggcagcaagcatgcgcacgttcacatgtgcgctcctgggtctgtctttgtgtgtgccagcagggggcgcaaaagaatctggctggggcggctaaggggaagcaaggcctgggctccgaaacaggacccaagctgggaaggctggccctgagttctcgaggcccagctgtgctcttcacacaccctccatttctcccacatcacccatttttttaaggctggacagccatggctttgctgagccagattaaaaatctgatgaccccaacaggagctgcttccttggcagcagggttccttgtggctgtggggagcctgcctgtgcctgttgaggcacttctgtgcccagaagcccagtggatcgcgtggcctgctgtaggccccccagactccatttctcagtcaccaggcgtgaggagctgctagctaacaggcctcccctggggaggtgggcttttcatgcccgcagttccggggccaacagaacaggtgcctgtctgttcagtccacagataagctgacacttatcttcccaagacaggccttcccgaatctcaggcaccagagaaacagagccaccgtttatacctgaatctcccactactgcccatttcccatccctgcggggagacaaggaagatgtggaactcagacaaaacataggtgcaaagtatgtccaggaactgccaaatgcagatagggcagcaggtggatctgaacagagggactgggttaatctgcttcgatttttaagatatttttctctgcttggggttgagtatcatgaaagacaaagcagacgtcgcagccccaatcctgagttgctgggaggctaagatgagataaacaactagacaaaagacaggtcaagtgacttggatcagtcttcctcatgttccccttcacactttatttatttcatgctcccaaggcgggaagacaatggaggtgcctagggaaccagtgtttccacatcttgctgcagctgtaaaggcagccattttgtctccttcccattgttcccctttgcctagtgattcgtcccccatccagaggggtgaaggtcagaggttgttggtcagtagtcctccatggtcttcagggctccctgaaggttactgccgagagaacccacccgggagccatctttaccagacagtgttaggagcttcacaattagaccatccaacactgtactggaagatggacccagggccggccgacagagaactacggtgcgcgctcaccagttgctacaggggaccctggccacaggccaggtgaggtctcttgagagggggcgagccaaccccaagctcaaggtcgactgtgggttctggatccaccaggtgacaaatcgcactgggtgggaggaggggctggggcccattgtgtcccttagtggcagccagccaacaagaaccaccccttgtgcaacgctctcagctcaagacgaggggcttccggggtgcgtgggaagtggggagggggctgcagccagctaagggctggggacctgaggcgatggatgttgctgacacagggacaggggcctccatcattacccggcagtattagagactcccaaccgcacccaaacactgctgggtaagacgagggcccccgcccagcccgcccaccttgggtcaggcagcttcaggcccaggatccctgcggaaaagctgcagatccctggctcccatccccccaccacccgagtccctggggacacttcctggtgagccctgctgcccgccaccagccacaccctgggtcgctgatcacgaggcccaggttgcagtccaagcaggccctccgaagcccctcgaccgtcggcccgccgcctctgagccaccttcccctacccccggcagcctttcccgacccgcgacacacaccgatttacccaccctcatcccccctctgcagtcccaagctcagcccaggacctctcccctggtggcctttacctgtcaccgggcccacctgcccccagagagtgggtgctggggagacgaaggggctttaaggccccagattccacggcctagagcccgccctggcctccgctcttcctccttccttctccgcctgccgggcagccagcgcaggctccttacctgggccccgcctgccaccctgcgcacaggtgtgtcctcctgccataggctgcccccccactgccttaaccccttccctcccagcgccagccacgggcacctcctctaaggcttggccactcctctaggcctcccaccctctcccaggggcctcttttctccaacctgcctagtctcacccctgtctccagaggtacaaaaagcgggggctgtccttgggtcccctccccacagcagatgctgcccccaggactagcccattcctctgtggcctcagaccctgcccacagcggagctggcaggccagagagatccctgaggtcagcgaggggtcagctgggcaggagttgggctgtgccgccccgcagtgcccagcctgtgctgggatcccctgagggaaaggggagggagaaggccccgccaggcctgtgaagggcaggcgggtcccagcaaggtgtcgctagtgtgaagttacccaccgctacccagagaccccagctggcccggagcatcagccttgcccctcgattgaggcctgcagagggaacgatcgcgctccactctccggaccgagctgctcccggacccacctcacagcacagccctcagtggagtccaagtcccaccccaagggcaggtagcccaagggcggttagaggaggtgggacttgcctttgtgcagctgcggcttgtatagaaagggcgttgctgggagaggggacctgggcccgacaggtgattgccccacccgtgccctggagggccacagccccagggagctattgggttgctcaatccctcgctgttctctctcccaggctttgtttgcttccttcttaatacccgcctgcaattatttgatgcttgtgatcggtttgtgaatctgtctccctgaccagcctcctaagttccaggaggtcgggggactgtgaatgcctgtgacgccgggggctctgtaaggatttgctgagtaatgcacgcccagcctctgggctttgggacctgtgctgtctcagcctttccaggagtgggcgccagcacttcctgagggatgactcccaccggctttactccccaggacaccagtgtttcaaataaagaagaaaccccactcctgacatgggggaaggaagaggggacaaaaaacaaagcactcttcacgtcagccagctcttcaaactctgcccaagaggataagggcagcagcggcctggatgaggggaggagctgggcgtgcccgggtgctctgaggagcctgtccctgttcccgccagaggggacgcagccgggctggcctcaggtctgcgcttccggctgttaactactcttcttagttcagatctggaactcagcatcaggggagtgtgatcagggcccccctgagggtggccccagctgcaactccagggtaaggagtgtgggctctggggtcagacagcctgggttcgaatcccagcctcactgttccatagccctgtgaccttgggcaagtgaccaagttacttagtttttctgtccctcagtttccgccacggtaaaatgagaatgacagaagtgcctagactgaactaacgtgtgtagtcttttagtgcctgggcacatggcaagcgtgtgatgagtcactgtgcccgtcttatcgtcagccgtcatctcggtgcttttcacaaccaccctgttatgatcgccctccattttaaagaaggagactggggagcttcacccacggtcaccctcccacgtgcgaggcggagtcccgacccacgtccgtctgacggaaggcggagctttcacgcgaggcacgcacggaggcacacacagttacccatcctgccctgccctctggccgcccactcactgggcaagcaaagggctcagaggcgacacacagtgatcccagggctttatttacaagaggagaagggttggccctgcctggggcctggctgggctatatacagggtcagggagaggtgggggggatgcagccatttaaattacaaaagaatggggcactcctaggttcaggttgtgagtctgtccatcgcgaaatgcttccacagggtcagggctgaggctgccaagagaagggagtgagggagtgagagggtagctggaacctggaggtggaacaagagggtctggggcagctgggaagcacagaatgaggctgcggccaccccatccacccagggaaggcagtggagccaaggacacagggcagggcagggaggacacccaggcagaagagctgtaccatggccacctgaggacagcaccgctcacttcctcttgagggaacccttgctcttctccttgtctgctgaccgctgcttcttcactttctcctccctcttgttcttagtgtgcaggttctcatacacatcctccttgtgtctgcagccgggtgcaggggggcaagtacaggcagttggtgcaggtcaggagacagcacagggggacccggcactggcagtcccctctggccaccccgtctcacaggtgacgcagccacggtccctgcactagactccaagctcctagaggacagaggctacatctcatacacgagtgcgctgctggtacctagcagaggcccacacgtgtgggcactcaggaaatgcttatgaacagaaggggtgagaaccaagcctgaacttgaagccaggtccccccagctgcaacacttgtcctctccagaaagtgaggattgggctgggcaggacaaaggggtggatgccgggcggtggcagtcagggccactcacttggacgaggtgcgggaggccttggcatgggcattcttcatggctgggggataggtgatgttcccgtactccgactcctggcccttctgcgactgtgggcagagggacagtgggaaggtggtggtcccagcagggccaggtggcacccatcctgcactgcagcccccccccccgccaggccctgctctgcacgcacctgcaggacctccagcttcttcttagtggtttcaatgaactgggcgatggccacgtagatgaacttgtactgcgcctccgtctgcaccatgcccgagcgctgcgcccgcaccatctggatggtcttctggatgtcaatgtcacagtccaggcctgggtggggggcagtcaaacctcaggtccaggcataggcggacaccgaggggctgctcaccccccacccccaaacccccaggtgcccctcacccttggtggagatgttctccatgagcatgtcgatgacaatgatggtgcctgtgcggccgatgccggcgctggggaaagacgggggtgccatcagaggccagtcaagccctccccgggaaggggggtacccagcgctcagctccagccccaggcaccacaggagcagcctgagcctccagtgatgggagggaatgtgcccagggtcaccgggcaagtgatgatggaggtttgcccagctctgcatggacacgctccacctcgggctctgcggtgctgacgctggctccccagctgccaccatccttccctcctccactcctcgcgccgactcctcactcctagtgagtggctgcccccaccccggaagacctgggacccccaaatcccaccactgtcctgccggctcccaggtaccctgagccctccccgcctctccctgaaggagttatggagcgtctctcagcatggcttcacttcccttttccttcaaaccctgacgtcagggaaaggatagccctgagacagcagggtgcgggggcacagggtcaggggactcaggggagcagtgcagtaggaagtttctctcctttcccagccctgggcaaacagacctcagggagaccccaggcccaccctcagctgagcccagcaagctgatgccctgagtcgcgctgtctaatttcaaacccagattgtcaaaaataaccccccacacccacttccttcctgtaacgtctaaataaaggccatggggctttcaagaagtgtgtgaatgtgtgtgtggcgggtgagcaggagggtagctctcggggatgggcctgtccctgagagagcacaggacagagccgcgtccccggacagcccatcgggggcacctctagattcagccgacttgccctgtcccaggacaaacagctgctgggggaagaggaggaagccagaggccgtcgcaggcctggggtccacggagggagtgggaagggaccggggcaaggcaggttcccattcccctattctctgcctgatgtgagttactaaactagtaacagcgcccagtttttgagggctgacggaattccagccacaacgatagggtctcattgagttctcacgacaaccctgagatcctgattttacagatgaggaagctgagggttagaaaagttaagtaatttgtccaagaccacacagctggtaagcggaggggccctgcacccactgcctctcatccacccaggccaggccagctcagtgggctcacctgtggaacccctgctcctccttgcagcccccacctctgcaccttaccagaggtctcctgatcacaaacatgcgggtagatagacagaggagttatgtgcagccccaaagaagcatcacccatccccacacagccctgggggccaggatggggcactgcctggggaagctgggagagagggcagagtcaggaagaagccgaagccctgcggctaccgatggaaaaagaggaggaatggggagcacatgcctcatagatgttcctgggagaagaaaccaacagaatgggacctcgagagaaagcggagcagccgggacacaggcctactgtgggtgcctgcctggccttgccctgactagcttgggcctggccagcaactgggtcccgggctcctcctctgtatttggcagggttgggcgagatggtacatccggagagggctctgaggaagatacccacaggcagagggccaaagtggggctggttccagccacgatccacccagggttctggagccatgaggggacccaggagaagccgggggtgagcggagggcactcaatgtgcgagctaacgtttatattgcttataacagctcatggcacttagcagtatttacttctcagctgtcactactaccatcaggattatcatcctcacctgcagtgcacgatgatgggccctgcgtgaggcagactttcctgccgctggttgatctggtccaggaagctgaggacacccccaggctcactggggaccccatggtcgggccagctcaggtactggtaatgccagatctcccgaatcaggtctccctaagccgaggacatagggtcagtgccccctcctctctcggaacacctcatccatctcaccctacccgaccagagaggagaacaagtccagggagggactcccggaatggggcagggcgtgggggccactcacattgtccagcggggagacctgtaaggtacggagtttgtattcggttgtgtcatgctccccgcagttggtcacagagtagggcccataagcacgctgcatgcccacctcgggccagtatgggacgcatttgttctggaaagggagggtcgggtggggatgaggcacagagcagggcactgtggcccatcccaggtcctgctctatgttctgagtgcctggcaccggcccaaacatttgttggatggacggatgggctggcagagaggcaggagacctgggctctcgtctcagatcaaccaccaacaggtggtgaggcctggccagccacttcaccggtacatccgtttgtcattcaacaaacgttgccagggcaggcattgtccccgaagctgtgcaaaccacacagcttcacagacacaaataacacccagtctgtgcccctgtgcctcgaggagctcacagagacaggtgaccgggggagacaccgcgctgaggagcgtggctgggaaagacgtaattctccctctaggtcctggaggaaacaagacctggattcacagaggaggcagcgctccggctgtgtcttcaaaaacgaggcatctgccaggcagagatagtgtggagagagtcatttcctagcagaaaatgagcttgtgcaaagaaaggctgggaacctgaaagagctggggctgctgggggcggtgagccttcaagagaagcgtgcgggtcagagggaagccaccagaccttgaatgccaggccttagagtgcgactttatcccaaaggtgaccaggagccatggaagagatttcagaaaggaaggaacttgacccagtttgtgtcacggatgggatcacttcaatggcagcacagagggtgctgtgtagggggagcctgcagggtaaggggcagactccagagagatctatggggcagggaggacaggaggggcctggatgcagacaggtggggcaggggtaggaggaaggaggacagcctggaacctgggtctggagctcagaagagcccagggatgcatgcagggatctgggggtcacgttgtgtagtcgagactttgtcactagccctcagtttcccaacaagggccggaccctcacccctgagatccctttctgccctggcatctgactgctcttcgacttaatggcatgaccacaagcacgggggcggatgcggggaagggggggcgccctacccggcctttctccacctctcgggtggtcatgacgatgacacggctgttctcctgccacgccatctgccagaagtcattgaccgtggcctccagacagccctggctggcgatgtaggtcttagcgttctcatcagggcctagcagctggttctggatgcaagcgtggagagacgcaccccaagacagtgagccccttggcccagcacaggccctgaaccactgccaccctcacccatgcaagaagccagcttcggctttgcccagctgtctctggatctagggtccccccaccagacagggaattcccagggcccagcctctcctctcacgtggcccacactgctgaccttgatgtagttggcattgatgtagtcggacccggggatgttactgtcccgtccctgcaggatcactcggctgtggtcaactgggagtgggcggagaggaggcaagatggtctgggttagccagggactcaccacacctgggtcagaccctcctgagctaacaggccattctggtctcagaagccatgaggcttgcgggggactgtgggcagcaggggtgggggatcatctgtatggagggagtgagggagttcacaaggaggttgggagcagggggcaacctgcctgctggtggtggggaggcacttctgggaggagtagaggccttttggagaagggggaggctctgtggggggtgtggggagatggcccctcctggcgtggagggtggagacctgtgagatgaggggaggcagctggggcaggggcggtatcctgggtgaatggggcagcctgggtgctcacaggggagaatgttcttgtagcggttcttgcccttgttctctggccgctgcccttccagacgctggtgcaagttcttcacctcctgcttctgcaaactctgagatgtgggtggggaaatgagcatcagctcccaaagagggcatccatcgggggagctcacgtggggtgggtcaggagcagaggtgggcaaggaggggaaggtgtccgcctggggccccaggccgctgccaccacctcagctgccccagccctgccggtccccaccatgcacctcaaactcctcccagaagccagccttggctgtatcctcggactcctgcttcttgttcagttccaacactcggttctcaatgtcagccgcattcaccctcgtggcatagtacggctggggtggggaagagcgagaagtcagcaactcagagatcccagaagctcacatctgggggacagctcaggggaagtggggaggcagctgggcccacccctgacctgccgcaggtagacaaaggcgcctgaggcctcctcaatccccgtcttcttgaaatgctccaccaggtccgtgaggctgtcgaaggtctccaaaccacccactgtgtagcgtccaccctggggggagccaaattaggccattcacaggacttgagtctccctccctgggtccccagccttgaattcaagcccaggcagaccctccctgccacccacactgtggtcacagacaggagcctcagcagaggctcccccgccgcctggctgccttacctcgcacatgaccttgatgtgggtgaccctgagcggggagcctgggccagccttgggctggtcactgagcacagaaagcacgaagtctccaggctggctgaggctctcacgcacaa

SEQ ID NO: 1864 - DNA, 2009 bp, Homo sapiens
cattttgaaagtgggccaggaaatggagatgacttgctgtcttgcgctgccctccctgggagggcagccttccagaaaggggcgggacttccgtatgcgcgattcctgtgcgcgaagttcgggtccgtagtgggctaagggggagggtttcaaagggagcgcacttccgctgccctttctttcgccagccttacgggcccgaaccctcgtgtgaagggtgcagtacctaagccggagcggggtagaggcgggccggcacccccttctgacctccagtgccgccggcctcaagatcagacatggcccagaacttgaaggacttggcgggacggctgcccgccgggccccggggcatgggcacggccctgaagctgttgctgggggccggcgccgtggcctacggtgtgcgcgaatctgtgttcaccgtggaaggcgggcacagagccatcttcttcaatcggatcggtggagtgcagcaggacactatcctggccgagggccttcacttcaggatcccttggttccagtaccccattatctatgacattcgggccagacctcgaaaaatctcctcccctacaggctccaaagacctacagatggtgaatatctccctgcgagtgttgtctcgacccaatgctcaggagcttcctagcatgtaccagcgcctagggctggactacgaggaacgagtgttgccgtccattgtcaacgaggtgctcaagagtgtggtggccaagttcaatgcctcacagctgatcacccagcgggcccaggtatccctgttgatccgccgggagctgacagagagggccaaggacttcagcctcatcctggatgatgtggccatcacagagctgagctttagccgagagtacacagctgctgtagaagccaaacaagtggcccagcaggaggcccagcgggcccaattcttggtagaaaaagcaaagcaggaacagcggcagaaaattgtgcaggccgagggtgaggccgaggctgccaagatgcttggagaagcactgagcaagaaccctggctacatcaaacttcgcaagattcgagcagcccagaatatctccaagacgatcgccacatcacagaatcgtatctatctcacagctgacaaccttgtgctgaacctacaggatgaaagtttcaccaggtgagagattgacagcctcatcaagggtaagaaatgagcctagtcaccaagaactccacccccagaggaagtggatctgcttctccagtttttgaggagccagccaggggtccagcacagccctaccccgccccagtatcatgcgatggtcccccacaccggttccctgaacccctcttggattaaggaagactgaagactagccccttttctggggaattactttcctcctccctgtgttaactggggctgttggggacagtgcgtgatttctcagtgatttcctacagtgttgttccctccctcaaggctgggaggagataaacaccaacccaggaattctcaataaatttttattacttaacctgaagtcaaggcttcacgtgttcatgaactgggtaactggcagcaagcatgcgcacgttcacatgtgcgctcctgggtctgtctttgtgtgtgccagcagggggcgcaaaagaatctggctggggcggctaaggggaagcaaggcctgggctccgaaacaggacccaagctgggaaggctggccctgagttctcgaggcccagctgtgctcttcacacaccctccatttctcccacatcacccatttttttaaggctggacagccatggctttgctgagccagattaaaaatctgatgaccccaacaggagctgcttccttggcagcagggttccttgtggctgtggggagcctgcctgtgcctgttgaggcacttctgtgcccagaagcccagtggatcgcgtggcctgctgtaggccccccagactccatttctcagtcaccaggcgtgaggagctgctagctaacaggcctcccc

SEQ ID NO: 1865 - protein, 289 aa, Homo sapiens
MAQNLKDLAGRLPAGPRGMGTALKLLLGAGAVAYGVRESVFTVEGGHRAIFFNRIGGVQQDTILAEGLHFRIPWFQYPIIYDIRARPRKISSPTGSKDLQMVNISLRVLSRPNAQELPSMYQRLGLDYEERVLPSIVNEVLKSVVAKFNASQLITQRAQVSLLIRRELTERAKDFSLILDDVAITELSFSREYTAAVEAKQVAQQEAQRAQFLVEKAKQEQRQKIVQAEGEAEAAKMLGEALSKNPGYIKLRKIRAAQNISKTIATSQNRIYLTADNLVLNLQDESFTR

SEQ ID NO: 1866 - DNA, 23474 bp, Mus musculus
gactgatatgagtttaaggcttcagctcttgggggtagggcaaaactgaggagacctgaatgagcagaccgagaagcagacgtgataaagcctaggccaggactgtgagagatgtgggcagtaacacctaggctgtagtgtgattggaaaggttttattcctaacacccacattaaaaaggtgggcatggccgggtggtggtggtgcacacctttaatcccagcacttgggaggcagaggcaggccgattttgtttatttggtttggtttggtttggttttttggttttttggtttttcgagacagggttcctctgtgtagtcctggctgtcctggaactcactctgtagaccaggctggcctcgaactcagatccgcctgcctctgcctcccaagtgctgggattaaaggcatgcaccaccacacctggctaaggcggacttctaagttagaggccagcctggtctacagagtgagttccaggacagccagggctacacagagaaaccctgtgttggggggtcagggggagtgggcatggcagtggatacctacagccccagagctggggagatagagctaactggatgtgtgaggctcagtagctagccagctctgcctaattggctagctccaggtcctggtgagagatctaccttaaagaaaaccaggggggcggggcagcaagccttgagaaacagcatatgaggttgacctttggccatacaccctcaaccatacacacacaaaagttcccttaggctagcaagcctgtggtatagtcctatcatcccactgcttaagatgctgaagtaggaagatcaaagttcaagacctgtctgagtggctgggtgacatcttgctttaaaagggaaaaagaagaactaggtatgttggttccagtctgcaatcttttttctttgagacaaggtttctctgtgtagccctggctgtcctgaactcactcgctttgtagatcaggctggccgaactcagaaattggcctgcctctgcctcccacgtgctgagattaaaggcctgcgccaccacgcccggcccagtctgcagtcttaacttgagaggctgatgctggaggactgccataagttccagactagcctaggctaggagcactggggccaagagaagcggggacttagttgagtggcagaatttctgtaacacaagtaaagttgtaagttcaatccccaggaccccactcagtcacttccaggcctgtcagtagagcctgcggagctgtggtaggctgggtcttattagactgcatgtaacccctgtgtcagagagtgctggagggtttgaagtgaggacatttcttcttgaggaaatgaggggcatgttaaaaatgcctgagcctggagctgggagcccaaggaggctcctggttgagctgtgaggaagaattggggacagacagaaacttggaggctttgccaggccaaaagactgatggactattggggaaagagttcccagggctatggtgggaattaggaaggaaaggtgataaatgaaatgattttgccggagctatagaagaaacttctgttcaccttccaaataagggcatagccactaaaacaaggttcagagtgcagcatggtgatgtgagctcatgtaacacattgtgggctggggcttgggagaggtcaggactggacggccagccacaccactgcgaagtctcaacccttgccaccaaccttcaattttactgtttattttttaaaatgagcccaacttgctatgtagcaaaggatgactggacttcctgttccacctctcagttgggagtacggtcacgtacccccatcctatactcctacgcctggctcttatcaaggtttctgctagcctcagcaaacactgtccagccatgggaaggacagggtttactacaggctggcacacagtacagctaaatggagttttgttgcaagattaagttactttggctgaattaggacgatttctcctaacaagggagtcacctctgaggcaaggactcagaaaaagccttctggggaggtggtgggaggctgggagggacctgagcagtgaagagaatggcagccttggagggaaccaggacagaaggcagctgccagtgcagtgccattaagtggaccccaagcctgggtgtagttaggacagttatcacttatctcctgtggcacacatctgtctgtcacctgctctcaccaggcaggagaggtgaccatccgacccatttaaggaactgggcgtgccactgcacttggtagttctgttttaaggcatacaccaccactgccaggcaaagattttaattattttatgtatatgagtatactgtagctgtcttcagacacaccagaagagggcatcagatcccgttacaggtgattatgagccaccttgtggttgctgggaattgaactcaggacatctagaagagcaatcagtgcccttaactgctgagccatctctccagccctgggtaatttttttttttttaattattgcatcttcttgtcgtcgggccctgccattgtgcacacgcagagacagcaggcatcgtggggtgattattttccttctactatgtgagtcctggggaatagaacccaggtcttcaagcttgatagcaagcatctttacctacagacagaccactgaccagctcagatatgtgcactgatgatcccagctctcaggaggatgaagcagtagaggaaaaagtctgaggacggggctggcgagatggctcagggggtaagagcactgactgctcttccaaaggtcctgagttcaaatcccagcagtcacatgatggctcacagccacccgtaatgagatctgatgccctcttctggtgcatctgaagccagctacagtgtacttacatataataataagttaataaaaaaggtctgaggacagctttgtctacgtagcaaatctctaactgaatagcaaaaactgtttggtttttttttttttaacagggttttctctatgtagccctggctgttctggaactcactctgtagactaggctgacctcaaactcagaaatccgcctgcagaaatcccaagtgctgggattataggtgtgcaccatcactgcccggcagcaaagacatttaatagcctaatcccagagagaagtaggcacgtgtgctgggtgacccagtctgactttggctgcccatcagtttagctccaggttggggggagaggaggctgcatccaggaaagtgatgctgttgttctcttttccacagcgcctggcccacgagtgcctttcacagagctgtgacagcgccaaacactctccaacactggtacccacagccacaaagccagatgcagtgcagccagacagtctgccctacccacagtacctggctgtcatcaaagcccagatcacctgtgccaaagacattcatactgccctgctggactgtgccaacaaggtcactggaaagactactgcaccctctactggccctgggggcagcctctgaggtctttcggggaggggcagagaatgaagtatggcctgaggcaaaacaggtggttcctgttgctgatttgtccgtgccacagtaatgcagctgaaaccagcagggggcagcagagtcttgcagacagcacagacctcaaaccccaccaccaccacaccactgttgcctccacccacgctgctccccaacctggagtggaccttcccactgggccgatgattacctctgttctggggactctgactccccacctggccctgggttagcactaactgagccctttagaccttcctcagtctgtcccagtgtatggatttccttttaacccacctttttccagtcctgccatcctatctcaatcagtccccttttgttgcccccaacacctaactgggatcgtattatacaagaggaaccaaaatgcctgggttactagggctacaggaagggactttctggctcacaaaagcagcgcgtgaacgtaagccctgacctcagcacagacaacctaggagaagtttgggtccacattggaccctgcgtcagcagagctctctagctgttctggggaggggccgaggggggatattgtgcaatgtgtggggaggcctgctcaacaagactccttggtctctatatttttagctccaaagcagaagtgaaaaggccccagcttgagtgaatcatggattctggggaagaccccagctcctccgggaaacaggccctggggagggggctttggggagggaggggaggccccagcctgtgggcctggacaagtgctggatggaactacaaaccaggcccggctgccagtggaaaggctagcgtgacagactggttagggaactgccccaccccatatcttttgggccctggttcccatgtcaccaggttcctgtgtctacaaaagtcccagagactgtggagacctccatgatgtacaggaacccagatcatcacactaggaaaagtggaaaatgatcaaaatgagaatgtatacactgttcaggcattcctccctgcctagcttgactattgcatggtctttctgcagggaaggcgagttccaccagtttgatcatgggcctcatttcttttcatttggagttgtagagacagtctctcactccatagccggggctagccttacagtatagtccaggctgccatggaacagaacctacctgctattacttgccaagtattgtgattatatcgtgtgagtgtgtggggagtgcttgcttacacgtacagggtgtatggaagggggtgcctgtgtggagatagagaaagccttttaggccacagtttctcctgttttcaggcacggaggttctcttgccatcctgttgcttggccctttgcacacaccggccggcttaggcgctcccactttgctgtacacgtgttggttgcaggtgtgcactttagctggtcttcagtgcactgtggttctttcccctaccctttaccctccccgacccagttttacctcctaatactggataaacaaggcagagaggaattaagaaaacctctgaatctgatttctttccttttgtttcgtctttgaccatggttgttttgtctttgaccatggctactaacaaaccgcagccaacctccctaaacaatcaacaactacccaccaagcctgtctgggctctaccacttctatgccatctgaaaagttccagaattccaaacatcacacagtcgcagaaactatctgtagatggctaagccatgcctctgctagagcacgaggcaaatcatagtccactgcctcaaacagtccaaagcagcccccatgtcccacccctaggattaaaatggaaacgttcttatatttctgtgttttaaaagaaaccaaaattgccactacagtgcatcaccatattcatcttgcttcttgagttagggtctcattgtgtagctcaaactagtcttgaacttggaaatcttgcttctggctcccaagtcctaggactatagggctgtaccaccatggactttaactatacttagaaaatgccttgatgtcttgaggtggaggcaaggaaactgcaagttcaaagccattctgggtgacataagacctcatctcagccaaaagagaaaagccaagccttcattcagcaatccctagactcctatgtggttagcaatgagctgggtcccaaagtgctgcatcagactcacgggtcttgtcatctgtgcaccgggcgcacatctccttcaccattctttgttaacgttagtgttctggcctaaaactgaaaacactgatcctgtccaaggcagaacacgtcagtttccagccaggggctcactatacattggctgggttatggcagtttgtggctcaaggagacaagtatagctggccccttggggtgatgtcgacacaccacatgcaggtaggcgtggcacccaggatacaaagccttactgcttaaaaccacactctgggtgacaacagaccatggggtgacaggtgtgtttttcacaagcccacaccatagaagataagcaccaatttatattcattcaaaaaacatggcagtttttgagctgaagattccagagatgaacaagatacaacatggtacctaatcctgtaatcccaacatgctggaggaccaatacaagttcccaagtcaggcagggctacatagtgagatcctgtctcgtaagaggaaaaaggagataggtgtctgggctgttgaggtagctcagtgggtaaccacacttgctaccaagccaagtgaccttagttcagtccctcaggcttgcatgttggaaggagacaactgactcacacaagttgtcctctgacctctacacacatttttaaaaggagtttgatggcctacattcataatactagcatttgagagcctgaggcaagaggatggtttgagaccaggctgaacaaaaataagctgatgtgtcaaagaaacccttgccaagccagtgacagcagacttgaaggagaaggaattaggtcttctggacacacagcaaaagtgaaggaactgcagagcacgggccagcctctgacaggaagagtgaagagtctttagctagattcagggagcgcacgggagaaagcccgaatggatcatgaaggtccttgctaagactagccttctccctgccttacaggcacagaggaaggctgagtaggcatgtacgataaccccacactagggaccccacactagggacgatgtgtgtgagatgaaaaaccacagccagccaaagtggcttatgcctgtaatctcagcatttgagaggcagaagcagggaggcttgcggcaagttcgaggccaacttgcttcacattctacaggctgcttcccccaaagacaaagactgactgtgggcacatgccccaccccccagcagagattagcacattggccatcctcccacacacatggaccctgctcgatgaccaagtgccacaaacactaaagcaactatctaaccacgtgactacccaaccctgtaaccaccatttaacccactatctctcaccccatcaagactttgcccatcacaggctgactcagctctgcggcagagccgcctcattcgctggggacagataagattggctcaggcactcagcatccagatgccagtgtgtgcaagtctgttctgcccacagaagcagacacagaagcgccgcacagcagccctccccatcacgcgcctgcagctacgtcaagcaccaaagttcactggtttcactgccttatgacgggtccatagaggaactatgtccagactcaattctaccacactgtcaggaacaggcaacctttaagatagccacataaagggcacagacccacaaataatatttgtacacagagtctaacagtgctgagtgagccacagaaagctatgtgtacaatcctgccacccaggcacctgctaggaatgacacacttagcacagatcccacggtggctcagttacacacagacgggtgggggtggggtggaagtgacagttctcatgaagtcccttcaaagacagctgcagtagttacagttgacaattctccagaggccacttgcagcacatgaggagtagtcagtgacacacatagaggtggcttcaaatttatttaccctgtttgttctatggggaccttaagcactggttcacaggcgcgtccccgcacccgcgcccacaaatacataactaggaacttcccgtaacacatgccgagtgagcacagctccccatacagtgggcacagtacaggtggcatactggttgtcctcccatgcaacaacctccctgcctggaccacactcacaggcaatcacgactggcacacacacacacacacacacacacacacacacacacacacacacacacacacacacacacacacacacgtgctgcgagtacacggcccctgcccgcccactggctctcacacccccgcgtttcccgtccctgcttgtttttctggaaactcagctcagagttcacctccccctaggccggaagtgcttgctatatttttagcctctctggtttccgcccctttctctaccccagcccccaaccccagcgcgcacaggacgtggccgcctgccctgagggaccttggccatccccttccccaccgtcattccagaggggattcccggccactgtctgggccgcggattttccccgctggctacgtggggagcagggaggagtcaggctatgaacttcctcctgggattggggcacacaagcgggggctggacagaaccccggactcctagatccagagaaaaggggcttggggcctagatctttaagtcttagacctctaggtcggagggaagagggccgcgagtctaagggagcataagtggggcctggattcctggtgctgaaggaggtgatctgtgtgtctggaccactggacaaggaaaggaacgggttgagagccaaggcacaaggtgtggggcagaaaagagctagcacctggccccgtattttagatgacgacacactttgtgagtcctacggcttaaagtcttcattttcagaggggttgtcctgcttaaaccgtcttctatccccaacgcccgcatcctttagagagtagcccaataccaggcatccaagctttaatcccagtgactcagcagatagaggagggggccaggctgagtcaggaatggcaaaaggttcccagtctccagggaatcgaaactggaattactcctccatgatccagtccctgctggcctccaaaaaaccccgacatgccccaccccaaccctcgctttttgcgtttggtcctaaaattggctggctcagggatttgtaaactgggcgggaggcaagtttttgtgcccctccttcccttcttttcccgttgtcctcgagactgtttacaacagactggaaccctggttacaagagaaggaacccaagcgtccgggctgagcgtcctcgtcacggcttccaggaagccccccctcccccgccctaagcgagtgagtcacgggcgagcgggaggccgcaaccgtgccacagcagcctatggcccgccctgctcacgggaccagcccaggaaggccccttggccccagaaagcgctgcaccagggattccccccaaccccctctcctatgaggcaagccagtaagtagcctggcagaatctccctacctcgatacgcaacgcaccgtgtgagaacttcccagcatggtaattacactcctggcaatgataacccccatacacaagaactctttttcactggagatatccttgaaataacacttttgacttgggtgtggcggccatgcctgtaatcctaacactacttgggtggtggagactggaggatcgcaagttccaagccggctaaggagaccgactgaaaagcaaaaaccttacagatctccagagagttgagttaagactgcttgcattactagaaacccattcaacgttgaaggtggcccattctttcaatagagcagagcttcctccctaataaaagacgtaagctgttccaaccttgagttttcggaagcaaaacctcttaatttaaactgcagcttgggtaaatgtgctatccagccatgctagactagggggttggaagggcactgctgagctacagctcagagcggtccctacctggaccaactgtcttacaggttctgtgccttcaggtttaagtttttatttcgcctttctatctttctgtaacccacttcctcgcctagatttgtttcccagtcccctctccctgtcttactgtctccccactttgtaaatgtcatctttttttctttctataatagggttggctctaaggagtacataccaagtcgctgagacttcgttttacttcctccttaccttcgtggtttctctttttttttttttttttttttaaaagtaggacctggaactcaatcaatagcttagtctgacattgaacgcctgatcccccttcctccacctccaaatgccaagattacaaccatatgccactgtcttgtcttttgttttgtttttcaagacagggtttctcagccgagcatggtgacacacgcctttgatcccagcactccggaggcagaggcaggcggatttctgagttcaaggccagcctggtctacaaagtgagttccaggacagccagagctatacagagaaaccctgtctcgaaaaacaaaaacaacaaacaaacaaaaaagacagggtttctgtgtgtagtcctggctgttctggaactcactctgtagaccaggctagcctcgaactcatagaaatccgtctgcttctgccttccaagtgctgaaattaaaagtttgggccatcagtgatctggcatctttttacttcctaagaaaagggtctcaccaagttactcaagctgccctagaacccactgtatagtggagccaggccttgaactaccagtctcctgcctcagcctccctgaggggccggaatcacagtcctaaaccagcagatcctacttgtgaatgtctctcactgtctctttgtttttctctcggcttctggccatctctgtctcttccaacttgtctctccccgcccccgtctgtctcacacgcacacgccctcagtctctgcccttgtcaattgtccctagagccctgcccccacttctgccccagttctcttcccgactgccttccacctctgaaaaacactaggacgccccgctaccatcacctccagttggtcgtacacaaccctccctactaccccccgagaggggccggagctgcgggagggccaagttcaggcacattttgcatgctaaccagcagataggcggaaggggcctagtaccaggccggccgagctacgccgcgggggcgcgtcccggaagctctagtggccacgcccccaggccgccccataaaaggagaaagctcctgctgcgggccacagcctgacttctgcgaaccgacagtcggtctcttcaccaaggccattcgcgccaccatggatctctctgccatctacgaggtgagtacctgttagacagcatcccgggatccccgacgcaccaaacttaggcccgggacgcctccgtaccttctcagactagccctggctggctggaaatgagagagggagccagcgagcctagcgcctcggtccagataccggcgatccccttgggacgaaaagctggcacactgctgtcactcgcgtagggcggaagcggcatcacacctgtctagtgcccttcgctgcccatggcgcggtttggtggccaagcaggtgctaaggttgaggtagggggggagttgacagggtaagagttctagagagatctggcctcctgggtcagctttggccggctccttcaagttgtgaaacgagcgcccggtgggcggtcatatggggggggggggagtcctagaggcccaaagttggcgagcagcagtgtgctttgatttgggggggaaccctctctcgatcggggatactgggcttcctagatccttctggattaccttcagtcatgtggaaacactcaaatctctgtagtcaggttctccctggagtttgtgtgagccgggtggggctcaggccgagaacccacaaaccggactggcaagctcgtgaagtgctttacaacaggggcggggcgacgtcaccttaccttttctggtggcctaaccgaaccctgttcctctcagagcctccagtcgatgagccatgacctgtcatccgaccacggaggaaccgaatccctcggaggactttggaacataaactcggactccatcccgtctggggtcacctctcgcctgactggccgctccactagcctggtggagggccgaagctgtggctgggtacccccaccccctggttttgcacctttggctccccgcccaggccctgagctgtcaccctcacctacttcgcctactgcaactcccaccacctcctctcgatacaagaccgagctctgtcggacctactcagaaagcgggcgttgtcgctacggggccaagtgccagtttgctcacggcctgggtgaacttcgccaagccaatcgccaccccaagtacaaaacggaactctgccacaagttctacctccagggccgctgcccctatggctctcgatgccacttcatccacaaccccaccgaggacctagctctccctggccagccccatgtgctgcgacaaagcatcagcttctccggcttgccctcaggccgcagaagctcgccgccacctccaggcttttctggcccttccctgtcctcttgttccttttcgccttccagctccccaccgccccctggggatcttccactttccccttctgccttctctgctgcccctgggacccctgtgactcgaagagaccctaaccaggcctgttgcccctcctgccgaaggtctactacccccagcaccatctgggggcccttgggtggcctggctcggagcccatctgcccactctctgggatccgatcctgatgactacgccagcagcggcagcagcctgggggggtcagactcacctgtctttgaggcaggggtgtttgggcctccccagacccctgcacccccaaggcgtctccccatcttcaatcgtatctctgtctctgagtgacaagtgcctacctacccagtatggatcagctagatctcaaagagagggcagggactgctcattgctgtggggacctggggcactcctctaagttaataagtcccatcttctggacattccaagatgcaataacccatttccctggtgctgggctggggcaggtccctagtttgcaaattcagtgtttgggtggatccgttcctagggtacctaagatgtttgagggagacagttgacagttggtcttccaggccccaagtcttctgttgtttttgagataggagcttattatggtaccccaggctggctttgaactcaatataatcctgccttagccttttccaagttctggggttacaggtatgcaccagcccctctgcaactctggtctcctggaatcttaagtgctgtgaagagccggctcccacaatactatcctaatttttactagaccctgaagttcagtgtccggtggtcgaagcctctcctgagaatcctggtgctcaaatttccctcctaaagcaaatagccaaagccattgccaaatcccttctcccccaaccagtgggccctttatttatgacgactttatttattgtattaagattttatagtatttatatatattgggtcgtctactccgtttttctttttgtaatgttaaaactgatactgtattaagtatatgctataatatattaatatattgctaccgtacaagtctattttttggggggggttggaatttttaaataaaatcttgagtgtgaactgagatgaaatttgtctttttcgcggctcacagccttgtgatggtgggtaaactgacctccagacctttccgtgagcagtgctgcctgggggcgcttacctggcaggaagtgacgttaccagcccgggtgttcacctgaggaggcgtggcgagatgaggtcacccagtaggaacaaggagagctagttctggcgtaaggggtgctctggtcctgtccctccggctcttgacccagctcgggcaggaacgggatgtttccgtccccacagggccaaggaaggagggcggggtggggcggggcggcgaggacggaatgtgcgggaaggcgagcccaggcggccagggtcaggggtcacccaaagccgggggccctaggggactctgaaccctgcgcagacagcttgggcggacttgatagaggactttttttagtttaactttttttttaaataaagtcgaccctagctcaaacttatctgaactctcagcaacctcctgctgggataacaagctcagatcaccatgcctgacttgtaaatgtgtagtgttagtcaagaatcgggtctcttccacaaagtgggtcccgggatctaactaggtcttatgccttcgtggcaagcgcatttacttgctgagccctctcaccctttatggactttttgtttgtttgtaggggagggcagggaaaaagggaagactgggtatccttatgaaccccgagcaactcctggcaatcctccagcctcaaccctatgaatgtttaggattatagatatgaaccctcccggtttgggacagaggctttaaagacgtgtgagaattctaggctccatttggaatctccggccccccgcaccaggcaacttgggagtctccagacactttaagagtcttggccagaattcgagcatctgcagaccccgatcgggcatttccggaacttcgtctggttcggctcgcggggcgcaggagtagggcagcctcgtcgtccgaccatacaaggaaaaaggacgcgacggcagccagcctaggctgggcgggccgcgcccggaagctgcccgcgtcagggcccgcgccccgcccctcttcgttttcctccgcttcttcccctcctcgcagcctcctccctctccgccctcctcttttctttcttcttctccccatctcctcccacccactgctgtagctcctccccgtttcccctctgtctcttagcccctgagacttttgttccgcttgtttttgaaatgagctcccactgtagccctccctgctagaccctttgcttccctcctaactgtatactcttaacctcactcttcctctcaccctgcctctctttcactccattctgctgacctttgatctcctctcccaggaaactgcctcccttgtgagaccgagctcgggccctggtatgtagaacaggggtgggtgagggaaacaaactcaaaattccccgaggcacccggaaggtagaggtaagaagcaagcactggacattgagaggaagaaacggagggacactagaaaacagaagcacacagctactaccctggcactggtgccttttaaaaagtctctcgggggctggagagatggctcagtggttaagagcactgactgctcttccagaggtcccgagttcaattcccagtaaccacatggtggctcacaaccacagcaatgggaatctgatgtgtctgaggacagtgacagtatactcataaacaaaataaagaaaaaaaagaataattaaaaaaaaagtctctcgttagccggtcgtggtggcgcgcttgggaggcagaggcaagcaaatttctgagttccaggccagactgagttccaggactgccaaggctacacagagaaaccctgtctcgaaaacttaaaaaaaaaaaaaaaagtctcatgttccacgtgcacacacacacacacacacacacacaccacacacacacacacactcactcactcactcactcaccatgggctgggggtgtagctaagtacagagtgcctgctcagcgtctgcaaaaccctggtctagcccggcagtagtgacctttaatcccagcacttgggaggcagaggcaggcagatttctgagttcgaggccagcctggtctatagagtgagttccaggacagccagggctcagggctatacagagaaaccctgtctcaaaaaaccaagaacaaacaaacaaacaaaaaacccaccaccaacaacaaaaaaatcctggtctaagtatataacctctccaggtcctggacagatggctgagagattaagagaatgggcttgcttctcttgcaaagaacccacatgacaggtgacaactccaatttcacaggatccagagtcctctcctggcctccttggacactaggaatgctgtgacaccagccccttagacctgctccggagacacagccaagactacagctcactccagcctccagggccctctcatcgaaagcccaccttactagtatccagttctaaaaggacctgtgtagtaagttgctcccggaagcttgttagaacaccagaggcaaatcacaaaggtcaaaatcctcaccacagccaacagcctgcatctccacacccccacctcttctcacctgctccacgaacacacccatcttcagccttagagtgttatctggaacatctctctggtgttcccatggctccttcccctcctccaggtgtctgtctgttcaaagatctcccctggggccggagagatggatcagcagttaagaacactggcggctctgacagagcacctggtttgattccctgcaccataaccctctgaaactgcagttccaggggatctgccgccctcctccagtctctttggacaccaagcatgaacatggtacacagacacacttgcaggccaaacacccatacacataaaataaaaacagtccatccatgacagctatgataatctgcatcccaccctacttatccatacttatcagtagctaatctaacgatacagttacactcccagatggtgagggagccaggagtttaggccagtctgggtaacatagggaaagtcaaattttaaaaaaaagtacttaattcgtagactttcagtactcagtctccttagtaaaaagtcaagtcctcagagacagaggatacagttcctagtgagtggtcagtaaaaaaaaaaaaaaaaaaaaaaaaaatctgttcagaaacctgtagaagacaaatatccataaagagtgtgttgtaagcatccatccatccctgggatctgagatttggattttatctgacgcccaggccatctaataagagacgttattgccctctggcgaccagaatagaaactgcaactttgggactgttccacagaccattgcaaaaaattcacaaagaaatgttcattcttcaaaaattctgtagtttccgggtacagtgacgcacgtctttaataccagtactagggaggcagaggcagaggcagaggcagtggcaggcgctctctgtgagttcgaggccagcccggtctacataatgacttccagaccagccagagagttacatggtgagaccctgtctcaaacaagccaaaacatttgattgaaattataaaatgtgaagacttctaaactgatgagagaacaccagaaaagaggtagatgagttaaaaaaagaagtgctccaggtgaggatcgaactcacaacctcggcatcgcttacgcctagcactgacatataagtaccgcgcgctaaccgattgcgccactggagctccggccgcaccctcgcgccacaaagtccttcagtcagttgtagtcgcaggactttgttgaacggctcggcccaacattgcatatgcaaatataaagcccgccgatcgaccaataagaacaagagtgtgagactattccagattctcacgcctcctgggcccttgctgtaaaaggtaaaaagtcctcccggctctaggctcttggaatgtgggcggtgactcgccgttggaaccgcttgcttgcaattattcagagtagggggcggggattttaaaagcctttacgggagggcgtgccggaaggcggcccctccccccagcaggcgggaacaggatgtgagccgcggcggcggcaaaggggaggagaagccttgggcggccgccccccgccccacatctgggacccgactctccccgccccagatgcggcgttgccgctgcccccagagccccaggacactcatcccggagcccgaggcgttcatagtcttgggcccaggcgtccgggaactctgtcccgcgttttaagagacccgcaagtcccggctcccgcagaggggccgggacctctgatgtccagcgccccctcctggaggagcccggggctcgggaagtcagccccgaggctggaggcccgtcccgtacccggcttcgaagaccgtaggatctgtggccgtgcatccttcccacggggtcccaactctgagtccaagaccccctcctggagccacttggggacaggacctcgcgcctcgacttagggctgcagcatccatcacctccaggagaccgaggagttagccagtccttgcggtccctcccggaggtgacttcactcctgcccctcgggttctggaaactctggaatcccggtgctcccgacaacacacagccctacctagaagactgaggagtttgggtccccagcgccctggtctgagactcgagtagagggttgcagcatcttctatttagaacaccgagacttcggactccggatcccaactctccccggattctggagtccgagaaccccaagttcacgaccttaagtctgggttgtgagcctccccagggatcgcgcgttacggtccagacgcgcgggactcccgaccccaaggcccgtggctccccgggaggtgaggggagcgaggggcccggggctgggggagggggcggcgccgaagcggaacaatgagggggcgtgccggcggggggtagcggaggcgccggctggagttgggggctgcaactgcacaggggagaatccaacggtggggaccgcggttggggcgccgagggaccgactggagctgggtggaggactcggggccagcgccccagtacgccgtcttgggcggggtaaggaacagtctgtaggaccctggcatccggtcccccagcctccgccctcccctgggaccccgcggcctctcccgcccacggtttttcccagccctgcccctcgccctcagcttcagcctgagcctgagagttcccaggatccctgagccttgggaggggggcccccagacagatgggacttgcagactcaggcacttttgctgtcttcgttctttgtctcaacctttttccatctttggcttgtattctcagccccttcttcctgtcactttgtatcttcttggggcccctccttgagtttagatcagcttccagcaccctatctgtgagtaggagcggccgagagaccggtgaagtctagttcccaagaagtgggtctcttctgtaggtcggagttgtgccactcaatcatgcccgagggagcccggggattgagcctgcccaaacccagccttaggctcgggtgtggccaccaaggtgaagtttgcgactgcgcagcagtgagtgacactccaacaggtgagcagcccagacaggtggagcctgtgggcatttgtcccttccttcaggacaatgagcatccctctatagctggcctagtgctgagcatggccaacatagcccagccctgtcaccacggaggagactgctaagctgagaattcaggagaaaggagttggactcaaagaagaattctgcatgcagggagcagtatgtgcagaggctcacagctgcacctttaagtaactggacaaagttgagtgtgaagaggtggggggctgttgagagctgagtggtggaaagggaactgggtgaagggttctaccatggctgcattagatggggccccgtgcgtgtgaggaatttggacttgaacataaagggcctgtgcttatgtgagtgacaaggtcagttgggcagattcacaacgataggtgtggttgatggaagatgtgaataaaagcactggaggtttaggtcccagagaggaaggagcattgataggtactgaatcagactggagaagtagaggagtggagcagagacctgtggggactgtcacctgagtgtgggtgaccatggggaccgtaagaccgtgtgtctgggaagccctgaccacttgctccctacctcagcagcgcaggcagccaccaccatggcttctccaaggggttctggcagctccacttcgttgagcactgtgggctccgagggggacccatctccagcctgctcagcctccaggccagagcccctaccggagccccccatacgcctgcacctgttgcctgtgggaatccagggttcggtgaaaccctccaggctggaacgagtggccagggagattgtggagacagagcgggcgtatgttcgcgaccttcgcagcatcgtggaggtgaggtgggcaggtacctgaagacagtggggacccaagccaggccctcggcttctgtaaccagtcatccccacaggactacctaggccctctgatggatggcagggccctggggctgaacatggagcaggtgggcacactgtttgccaacatcgaggacatctatgagtttagcaggtgagggacaggaaggggaccacaaggggactggctgctgtggcaggggaggggctgtggcctaacactagcctgagtgcctcttagtcagtggccttgtgtgggctggcatgggaagtgtggtgacatgatggggacagtgaggacctagcgtgggaagaagtatagaaccatacagatgccatgttgggctctcagacctccagtctgaatgtccagtcccaaattactactgcacttctgtgagcctaggacaccctgagctctggacaaacctagttggttgtttgccctagtgaagaagacactggggcccaagtgtagcatctcagaatcccaagagaagctcttttagggggaatggagctgtcaagacatggtctttctgtgtagccctggctgccctagaactcactctgtgcaccaggctggcctcagactcaagagatctgcctgcctctgctttctgttatgctgggattaaaggtgtgcgccaccaaccacccagtaaaagagaagctttttaaatttgtcttattatttgagacaaacagagcctctcctaacaaggcttggagtttgctcggtggatgaagatacagagctcattatcctgccctcacttctccagtgctggaattacgggcatgtacgaccacacctagggtctcctggtgtggttcaagctggcctcaaaattgagatcctcctgcctcagcgtccagagctatgtcttcagctcttctctgttgttgttgttgttgttgctgttgctgctgctgctgctgctgctgctgctgctgctgctttaagaccagaatctcactaagtagcccacagtgatcttgaactctctgtcccccttccttgcctcccaaatagctgagatcacaggatagtgccaccactccctggcttacaacacattctaagctgcctaagttagttgggcattaccaacaccccctttcccagggctgtggtgtcactccctaggtcacgacatgccagccatgccagggttatcaggctgaatagtacgaagccgtgaggaggcagaatttctggggtagccatctgaggctccttcctacctgtctgttgccctctggagtcttgtcatgggacaggggggcaggcaagccctttaccttcccctttgcccgcccacagtgagctcctggaggacttggaaggctgcagcagtgcagggggcatcgccgagtgcttcgtgcaaagagtgagtaggacagcttgaggctgggggacggacgctgggccgggattcatggggccatggggatctaggtggtgctgactcccatgtccccacagagcgaagattttgacatctatacattgtactgcatgaactacccaaggtgaggcaaagggagtccctgtttggcccccgggtattcccacgagccaatgtgccaaaccactaccccctaccctttaccgcccccaaccctgtgcccaggggcagccccttctagaccttgatagtcactggcctccttaactaccctgacctgatcatccctgaccctggccacctcctcccagccctgcctgctggagtgccagccaccactgatctatgctgtgccccccagctccctggccctgctccgagagctgtcagtgtccccgccagccactctgtggctacaggagcgtcaggcccagctccgtcactccctgcctctgcagagcttcttgctgaagcctgttcagcgcatcctgaagtaccatctcctgctgcaggtcagctgtgcccctgaggcctggcttgtggagagggggcatggttgggtctaacagccacccctggtaccctgactgtctgtggtctgcccctcccctttcatgttgctctgcctcctgtctcactcctcttttctctttttctcccccatccttctaccctgctggatgactgtcaggaactgggcaagcactgggcagagggcccagacagtggagggcgagagatggtggaggaagccattgtatccatgactgcagtggcctggtacatcaatgacatgaagcgcaagcaagagcatgctgcacgcctgcaggtggcccccggggtgggctggggcacctgagctgggggatgttgctcagtgtgtcccggtcactaacgcctctgttttggcttgtatatgtgtgccaccaacctgggcctgtctctatgcctgatgtggtcccagcaggaagtgcagcggaggctgggtggctggactggcccggagctcagcgcctttggagagctagtactggaaggcactttccgagggggaggcgggggaggccccaggcttcgtgggggtgagcgcctcctcttcttgttctcccggatgctgctggttgccaagcgtcgggggcctgaatacacctacaagggccacatctttgtgagtatagagtggggtctggctcagagagtcagaactaatgtatgttcccctgagttcccgaaaggggacagactggcttccaaggaccatatttagctgcgcccagtgacatttgacctttgattccagttactgggaaggctgagacaagaccaaaagttcaagactaacctgggctacagaaaaggttcaagaccagtcccggcagcctgattaaaacaacattaacggctagaagtagggcatggtagctcactggggaggcaggggggttgaagtaaaagcctgaggccagtaagaccgacaggtgagctcaaggccagcgtaggttatgtagtgagatcctgtctcaggagggcacactgatctccaggttctagggtaactaggactacaaagagagccagaccctgtctcaaaacccagccaaaaaagcaacagtgagcgtagctggtggccacaggaaccagtgtgtgaagatgccacaaacttgtccgctgacctccactggccacttggtgatgcatacatgccccatacacacgtaaaatagatagaaatgtaagggctggagagagagctcttgtagagcatccagatttgatcctagtgtttgtattagattgctcgaaaccactaaactccaactatagggggtccagagcctctggcttccagggacacatggacccacatgcccatagcctatctcccagatacacgtgacatggtctcgtatagctgtgcatggcctctaacaaacacacagtacctctgcctcccgagtgctggggttaaagacgagagaggactttagaatgtgagaaagcaaaggcagcaagcccaga

SEQ ID NO: 1867 - DNA, 2794 bp, Mus musculus
agcttagtctgacattgaacgcctgatcccccttcctccacctccaaatgccaagattacaaccatatgccactgtcttgtcttttgttttgtttttcaagacagggtttctcagccgagcatggtgacacacgcctttgatcccagcactccggaggcagaggcaggcggatttctgagttcaaggccagcctggtctacaaagtgagttccaggacagccagagctatacagagaaaccctgtctcgaaaaacaaaaacaacaaacaaacaaaaaagacagggtttctgtgtgtagtcctggctgttctggaactcactctgtagaccaggctagcctcgaactcatagaaatccgtctgcttctgccttccaagtgctgaaattaaaagtttgggccatcagtgatctggcatctttttacttcctaagaaaagggtctcaccaagttactcaagctgccctagaacccactgtatagtggagccaggccttgaactaccagtctcctgcctcagcctccctgaggggccggaatcacagtcctaaaccagcagatcctacttgtgaatgtctctcactgtctctttgtttttctctcggcttctggccatctctgtctcttccaacttgtctctccccgcccccgtctgtctcacacgcacacgccctcagtctctgcccttgtcaattgtccctagagccctgcccccacttctgccccagttctcttcccgactgccttccacctctgaaaaacactaggacgccccgctaccatcacctccagttggtcgtacacaaccctccctactaccccccgagaggggccggagctgcgggagggccaagttcaggcacattttgcatgctaaccagcagataggcggaaggggcctagtaccaggccggccgagctacgccgcgggggcgcgtcccggaagctctagtggccacgcccccaggccgccccataaaaggagaaagctcctgctgcgggccacagcctgacttctgcgaaccgacagtcggtctcttcaccaaggccattcgcgccaccatggatctctctgccatctacgagagcctccagtcgatgagccatgacctgtcatccgaccacggaggaaccgaatccctcggaggactttggaacataaactcggactccatcccgtctggggtcacctctcgcctgactggccgctccactagcctggtggagggccgaagctgtggctgggtacccccaccccctggttttgcacctttggctccccgcccaggccctgagctgtcaccctcacctacttcgcctactgcaactcccaccacctcctctcgatacaagaccgagctctgtcggacctactcagaaagcgggcgttgtcgctacggggccaagtgccagtttgctcacggcctgggtgaacttcgccaagccaatcgccaccccaagtacaaaacggaactctgccacaagttctacctccagggccgctgcccctatggctctcgatgccacttcatccacaaccccaccgaggacctagctctccctggccagccccatgtgctgcgacaaagcatcagcttctccggcttgccctcaggccgcagaagctcgccgccacctccaggcttttctggcccttccctgtcctcttgttccttttcgccttccagctccccaccgccccctggggatcttccactttccccttctgccttctctgctgcccctgggacccctgtgactcgaagagaccctaaccaggcctgttgcccctcctgccgaaggtctactacccccagcaccatctgggggcccttgggtggcctggctcggagcccatctgcccactctctgggatccgatcctgatgactacgccagcagcggcagcagcctgggggggtcagactcacctgtctttgaggcaggggtgtttgggcctccccagacccctgcacccccaaggcgtctccccatcttcaatcgtatctctgtctctgagtgacaagtgcctacctacccagtatggatcagctagatctcaaagagagggcagggactgctcattgctgtggggacctggggcactcctctaagttaataagtcccatcttctggacattccaagatgcaataacccatttccctggtgctgggctggggcaggtccctagtttgcaaattcagtgtttgggtggatccgttcctagggtacctaagatgtttgagggagacagttgacagttggtcttccaggccccaagtcttctgttgtttttgagataggagcttattatggtaccccaggctggctttgaactcaatataatcctgccttagccttttccaagttctggggttacaggtatgcaccagcccctctgcaactctggtctcctggaatcttaagtgctgtgaagagccggctcccacaatactatcctaatttttactagaccctgaagttcagtgtccggtggtcgaagcctctcctgagaatcctggtgctcaaatttccctcctaaagcaaatagccaaagccattgccaaatcccttctcccccaaccagtgggccctttatttatgacgactttatttattgtattaagattttatagtatttatatatattgggtcgtctactccgtttttctttttgtaatgttaaaactgatactgtattaagtatatgctataatatattaatatattgctaccgtacaagtctattttttggggggggttggaatttttaaataaaatcttgagtgtgaactg

SEQ ID NO: 1868 - protein, 319 aa, Mus musculus
MDLSAIYESLQSMSHDLSSDHGGTESLGGLWNINSDSIPSGVTSRLTGRSTSLVEGRSCGWVPPPPGFAPLAPRPGPELSPSPTSPTATPTTSSRYKTELCRTYSESGRCRYGAKCQFAHGLGELRQANRHPKYKTELCHKFYLQGRCPYGSRCHFIHNPTEDLALPGQPHVLRQSISFSGLPSGRRSSPPPPGFSGPSLSSCSFSPSSSPPPPGDLPLSPSAFSAAPGTPVTRRDPNQACCPSCRRSTTPSTIWGPLGGLARSPSAHSLGSDPDDYASSGSSLGGSDSPVFEAGVFGPPQTPAPPRRLPIFNRISVSE

SEQ ID NO: 1869 - DNA, 22562 bp, Homo sapiens
aaaccttgtctctactaaaaataaaaaaaaaattagccgggtgtggtggcgggtgcctgtaatcccagctactcgggaggctgaggcaggagaatcacttgaacctgggaggcggaggttgcagtgagctgagatcgtgccattgcactccagcctgggcaacaaaaccgaaactccatctcaaaaaaaaaaaagaaagaaagtagtacctagagcagccagagaagcaggcagaaaaccaggggtgagatgccactgccaacaccaggcctggagccagggcagtaacaatgatagtagctaacagttcttggcactttaaacagtgtgccaggacccgtgcctgtgtctcatacacctgctctcactgttctcaccttatgaggtaggaagaggtggttattaaacccgttttccaaaggaggaaactgaggctcagagaagagtagccgccatgcccccaggttccccagcaaatgactggcagggccaacctctgactctaagacctgggaaatccagaggccaagccgacaacccccagctggcccttggggtggggtagaatgacctcgggtggagctgatgctgtccccttgcctgcctgtccacagcgcctggcgcatgagtgcctgtcacagagttgtgacagtgccaagcactctccaacgttggtgcccacagccaccaagcccgacgcagtgcagcctgacagcctcccctacccacagtacctggcggtcatcaaagcccagatttcctgtgccaaggacattcacaccgccctgctggactgtgccaacaaggtcacgggcaagacacccgcaccacctgctggccctgggggcactctgtgaagtgggggacagggagtggggcaggcagtggttggtgggtggtgtgcaaagggaatgaagagcgtcctgggcctaaacacagcagcctcctctcttcctgcctgagcaccgcagcgggagccagcagggggcagcagaggccaacagggagctcgcaggccgggcccctgcgtccctgccccttcttcctgctccccctcctagcctagggtagactttgaactgtgtgtgttgatgacttctctgttccacaggccctcccccattcttgcctgggtgtggagccctggctgtcccctctccctcagtccttcctgactgtctccagctgggaggtggtctctgtgtgccactcctctgtgtctctattacagttgtgtctctctcatcctgtctctttttcccttgtttctctgttcctgttaatgtgtttctccccatggtcctatttctctcactctgacctctctctcttagtcccctttagctgtcttctatccccagctcctaactgggactctgtgtctatgcagggggccagcacccctgggttatctggggctaagggaagggacttcatttccaggggccacagccaagcccagagtcccccagcggctcgcatgtcagcccagaccccagggtccttggcctaggagaggagcagtggaggggcccaggctctgagctccacaggtctgagctgggagcaactcaggcccccacccaagcctgcgtcagcggaacttgagtgaggggcgttgtgcaatttgtggcaaggctggcccagctggatgcctgggtcccagtatttttagccccaaaggagaagtgaaaaggccccagccggggtgaatcatcagtcctggggaagaacccaggcgcctgagccccagctccgggaagcaggcactggggagggggcttcaaggagggagtgccccctcagactccctgcttccctggaagcttcaggaagctcagcctcagccttcaggcctgagcaagtgcagggcggagctaccagcccaggctcagatgttggggtgtgaaagcctcaagtgactcagcctggttggagaactgccccacccagtatcttctgtgccatggttcccacattcgcactccatggcctcctgtcctggaccccacgtctgcaaggaaaccctaggaccatggatacctctgtgattcacgctgagcccaagtccccacactggaaaactgggaaatggccagctgtgtgtcccaggaaattcctccccttattcttccttgaagtgcccgagcatgtagggcaagaaggaaggctgaagcgctgtccctaggaggaatttctccttcagggaagcctcagttttgcccatttatctaattgaatcagttttttacccaatcccccgattttgtaggataatctcccttatctaaagtcaactgattatggactttaatcacatctacaaaacacttccatggcgacagctagatgagtgtttgaataactgggactgtagcccgtccaagttgacacataaaactgaccatcgggccgggggcggtggctcacgcctgtaatcccaacactttgggagcccgaggcgggcggatcacaaggtcaggagttcgagaccagcctggccaacacggtgaaaccccgactctactaaaaatacaaaaaattagctgggtgtggtggcacacacctgtagtcccagctactcgggaggctgaggcaggagaatcgtttgaacctgggaggcagaggttgcagtgagccaagatcacactattgcactccagcctgggcgacagggcaagactctgtctcaaaaaaaataaaaaactgaccatctagtccttgtcatctgggcaccctcacacatctccttaaccacacttaatctccaaataagtacgataacatagtcatagtcccacccaacatgatgcagttatcttgcatacaactgaagacaactaaccctttccccaacagagcccaccagcagtggtggagatgtcggtccatgagcgcacacacaagactgagggactgtcggccctcccaggtggtgtcaacacaacatcacacacaggtgggggggcctgatagcccagcacccatgatacagggcctaccaatgcttaaaaccacacccagggagcccacagaggcactcagtgggtggtggggtgatggatacacatctatcaggcacagggcggaggtgggcaccactgagttgcactcagcaaacacattgggtatcttgtgcccaaggcctgtatttgtggagctgatgttctagtgagagacagtaaatgtgacaaaagtaaaatatatcagatggtgagaaaacagaaaaatgagatcagaagtggagatgttggggccaggcacagtggcccaggcctgtaatcccatcactttgggaggtgcaggcaggcagatggcttgagcccaggaattcaagaccagtccgagcaacatagcaaaagcccttatctgcaaaaaattcaaaaattagccaggtgtggtggtgcgtgcccaggttcccaggtactcggaggctgagaggtgggaggatgccttgagcttgagaggttgaagctgcagtgagctgtgatcgcaccactgcactccagcttggttcatggagaccctgtttttttaaaaaaagaagtggaggtgtttacaccagcaaaatactcattttttaagtgtaattaagttgaagatcaaaaaatggaaatgtataattaaatcatacttagcaaatctaacacatgaaatgtaacatctgcatatggagaatcgtgttactttattgaaaaacattaaaagtttgagaacttaagttggattgtggtttcgtgagcattcattatggtttatatatgttccatgtatttattattaaatagatgacaagggttttcttattcttgtttatatatgtttgagaccagtctcactctgtcgcccaggctggagtgcagtgacgccatctcggctcactgcaacctccgcctcctgggttcacgtgattctgctgcctcagcctcccaactagctgggattacaggcgtgcatcaccacacctggctaatttttgtatttttagtagagacggggtttcaccatgttggccaggctggtcttgagcttctgacctcaagtgatctgcccgcctcagtctcccaaagtgctgggattacaggcacaggcacgagccactgcagtgggccttttaatttttgttttaatccttgacagaggtcaaggaaggcctcactgagaaggcgatattagagcagccccgaaggagagggaatgagcttggggacatccacacatccaggcaagagtgctccagacagagggaactgcaagtgccagggacctgggacaggaatgtgctgggatttatggaacacataaaaaggaggcttgggcacaatgagggagcagggataggagaggaaatccagacaggtcacagagggccttggtgaggacttgggtttgctagataactaaacccagagggagactacacagtctggtgcacactgcatgctccagggacggggtgtacgtgaggtgcacagccaccacaaaacagaccgtggggactccagcacacagcatgtctgccccactgcagagctaacccaccatcctacaatcatggtgcccccagggaccccatcccattgacagtcccacaaacatactttcagggagcaacccagccacatgaatacacaaacaaccctctaaccaccactttaccagataagctatctctcaccccatcgcagactttgcccatcacaggctgactcagccctgtccttagcccagcactatcagaagcagcctcatcggcgctgccccagcttctcaggtactcatgtctgcacgtctgctctgcccacagaggccgacacaagaacagtgacatggaggggggagctcgccagctactctccccatcacgcaggctgtagacgtcagaaaccaaagttcatcggtttctctgccttgtgactcgggccacaggaactgcattcagacgccggcctgctgtggtctgcacatgcagtctcagacacccacgacaaaggacgtggacatatgtgaacacttcacacacccagggactacacacactgagccacaaaggccttgcacacggccacagctgcagagtcacagatgctgacacagcttcaaatgtgtgtgccgggtgtggtggcacgtgcctttagtcccaactacctgggaggctgaagtggaaggatcgattcagcctgggaggtcgaggctgcactccagcctgggcaacagagcgagaccctgtgtcaaagcaacacacacacacaaagttgtgtgtgcacacagcctcagtcacaggggagggcagtcattccctcacccaggcacctgcgcggagttacacacacttagtcactgcagatcccacagtggctcagagctacgcacagatatgcaggtggggatgaaaatctcatgttcttaagaatgccgcctcagagacaaattgcagtacagttacaacagagcatccaccccacacccagagatggccaaagtacacacggtacagtcgatcacacaggcggtttcacacattgattcacacagccaagtcatgcgggattgtatgcacacagccttctcacaggaaactgggcacactcgtgtccctcacgttcccccactgcatacccaggcacacaggctctcgcagccccagatgccaaggcgcacacctttgcacccgcaagcacacatactgttcacacaaccgggtacacatgacggctagcccaggcccgccgcccacgcagtcgcaggccagggtacacacggccagcgccgcccttggccacgcccgctcaggcccaggcaatcgcgccaggcgcacacacggcgcgagcacacgtgccgcgggtacacgatccccagctcgcccgcgcactcggccagctctcacacccccgcgtttcccgtccccgcttgtttttctggaaactctgctctcccctcccctccccctaggccggaagtgttggctgtatttttagcctctctggtttccgcccctttccttctttccccgcccgcccaggactggccccagcgccccgcggggggaccccggccatccccttccccaccgtcattccagaggggattcccggccgccgctggggccgcggattttcccgctggctacgtagggagcagggaggagtcctgccatgaacttccttctggcctgggacgcccgagatctgaggggagggctgagggcctggtctcctggatctgatcgaggacaggctgggggtctcccgggtctgagggaggaggagttaggggcctgaaccgctggatctgagggaggaggagatgggggcctggacccctgggtctgagggaggaggggctggggtctcgggggacctgaggatctgagggaggaggggctggaggcctggacccctgggtctgagggagggggggttgggagtctcccgggtctgaaggaggaggagttaggggcctggacccctggatctgagggaggaggagctgggggcctggacccctggttccgagggaggaggggctgggggcctggacccctggatccgagggaggggggtgctgggggcctggagtcctgggtctgagggaggaggggctggggacccagggccctgggttactgcgagggaggagggactgaggccttggctcctgggtcccccaggtctgtgggtttggggaggtggaggaccagtccttctgcgagcaaagcatccccctcctttgagagtggccctatcccaaaagtcctgactcttggggccgatgactcagcagatgggagagaggagggggacagcctgactcagggatgggaaatgctcccggtctccagggagtagaaactggaatccctcctccaggattgatcgcagcccgagctgagccgggctccgcgaacccaaggatgcccccaacccccctttccccgcctcaatcctttaagctgcgtaaggatttggagatcggcctagaggcgggtcccaggtccccctcctcccccctttttccccgttgtcctcaaggctctgtttacaggagacgggagccctggttacaggagaggaacccgagtgtccgggctgaacctcctcgtcacggcttccaggaagcccccactcccccgccccttgcgagtgagtcacgggcgagcaggaggccacaaccgtgccagagccgcccgcggcccgcccagctcacgagaccggcccgggaaggcccctcagcaagcgccgcaccagggattcccccccgccgctctcggacgaagcaggtcgacgtggagcctggcagaatctccccaccttaatacaagcccgcagcctgcaagaatgaactttccaccattataactgcgcactgtggcaatgatttctacccccacattttcactcagggcatccagctctccagcaccccttagaaaatagtcttcctagatcttaagagggttttcacttagggcgaccctttgataacaaaagatgtgccagtgtggggaatgatccttgaaaatgtagtctgggcggggtgcggtggctcacacctgtaatcccagcactttaagaggccgaggcaggtggatcacctgaggtcaggagttcgtgaccagcctgactaacatggtgaaacccccgtctctactaaaaatacaaaaattagctgggcgtggtggccggcgcctgtaatcccagctactcgggaggctgaggcaggagaatcacgtgaacccgggaggcagaggctgcagtgagctgagaccgcgccattgcactccagcctgggcaacaaaaacgaaactccatctcaaaaaagaaaaaaaaaaggaggcccggccggcttggtggctcacacctgtaatcccaccactttgggaggccgaggcgggttgatcacggaggtcaggagatcgagaccaccctggctaacacggtgaaaccccgtctctactaaaaatacaaaaaattagccaggcgtggtggtgggtgcctgtagtcccagctgctcgggaggctgaggcaggagaatgcgtgaacccgggaggtggagcttgcagtgagccgacatcgcgccattgcactccagcctgggtgaaagagcgcgactccgtctcaaaaaaaaaaaaggaaaatgtagtctgaaggcacaccccactataagagacccatccagccatcaactgaggatgaccttttttttttttttgaaagcttttttcaatcaatgcaaccatcagttatagtgaaagacctccaccttgccaatcttgagttttctcagagggcaaacctcgacataatttcagaccctagtatgaggcctgtgccatttgctagctcgaactaggagagtaactttatttttccccctgagagggagtctcgctctgtggcccaggctggagtgcagtcgcctgatctcggctcattgcaacctctgcctcctgggttcaagcgactctcccaccccagcctgctccctccccgcccccgagtagcgggaccacagggtgtgcgccaccacactcagctaatttttgcatttttgtagaaatggggattcgccgtgttgcccaggctagtctcagactccgagctctagtgatccgcctgccttgggcgcccaaagtgctaggactacaggtgtgagccgggcaggagagtaacttcactttggtttcctcctgccttaaatgggcataccacctggcattaggattaatgtgcgtaaagtacttagaactcagcccaggtgagttctccttaactcagcctagaagagatcatccgcccgagggtgagggggctagagccgccctgtgaattgggaaaggaggccccttttcagccttgccaggtatcctggaccccacccaacccactcactcacccacccaaccccagcaagtggggagagggagagcagtccaggtctccttatctgtctgggctgtttaggagtgagaccacacaaggcaggcagttctcagagaattcccctccaaggcctgctggctctttcttggcactttgctctgcagatttctttccgtaagtgcttatttctcacagtctttctcctttttgtccagtttctttttctttttaatttttttaaatagtattttttgtagacatgggatctcactgttgcccaggctgatcttgaactcctgatctcaggtaatccacctgcctcatcctctgaaagtactgggattggccgggcttggtggctcacacctgtaattccagctctttgggaggcggaggtgggaggatcgcttgagccccggagctggagattagcctgggcaacatagggaaaccccgtctttcaaaaaaaaaaaaagaagaagaaaaaggaaagaaaaacacaaaaagtgctgggatcacaggtgtgagccactgcgctcagcccctttctgtttctttttgtgatcctcccaaccctcttctccctctgaatctgtctctgggactgtctctgtctccccgtcttccctcccttcctcaccctgtctatctctctctgtatgtctcttggtgtgtgtgtctctctcgatgtttttctctctgcctgtctgcctgtctgtacccctctgcgtctctccccgcccccatccgtctgtgtcgcacgcgcacccccatcgggcttctgctcttgtcaattgcccctggggccctgcccccacctccgccccagtttccttctacaagcctcagtctccagctttgaaaactgggcaggcgtccccccatccgcacccccaccccttccccacgcattccccgctcggtcacggctgtccaccggccaagctcaggcgcgtcctggcccagggccgggcggaagggaaccagtccagggccagccaggctgcgccgggggcgcgcgtccgggaagcgcccctcctgccccgcccccggccccggccccggccccgccccgtgcttgcagtttcctataagtagccggctctcggtgccagcctcagcctgacttcagcgctcccactctcggccgacacccctcatggccaaccgttacaccatggatctgactgccatctacgaggtgagtccccgccgcacggcatccccggtacctgcatgcctgagtccgagtccccacctctctagcgccgcaaactccagcccgggacgcttgcctcccttctccaactggggctccctagcgccgcgccctccagcctggggcccctgcctcccgctcagaccagcttggtgatttggaggtgaaaatggaacccgcgacacccggctcttcgctcaaacatgggtggggcggcccatgcaagtggaaagtcggagaacttttctcagaccgaggctgcctggaggcggaagtggcccccatacctggctcacccctagtcgttgctgagggcgtggttttgcgcggaggcgtctctggggctgaagtctcagggtggggggatccgacttctgtctctccagtccctgaccgtagagacagagaaccctaaaaccgaagcaatccggacttccaggtcaactttgcccggtttctccagttgtgaaactggagatcccgacgcgtgggtcatatccggggaggacaagagacccaaaattgggaaacagtggtgcgccctgacttcggggtccccctcttggtccagccggggaagccgggattcctgggtccctcgggataaggcctcggtggtgggtaaactcagaacctccaactctgggttcctggcatccggaacccaggggtttctgcgggcgggtggggctcaggcggggagcccacaaaccggcctggcaagctctagttccctgcagctggggtggggcgtcgccctgcattttcaggtgccttaaccgacccatttccgcagagcctcctgtcgctgagccctgacgtgcccgtgccatccgaccatggagggactgagtccagcccaggctggggctcctcgggaccctggagcctgagcccctccgactccagcccgtctggggtcacctcccgcctgcctggccgctccaccagcctagtggagggccgcagctgtggctgggtgcccccaccccctggcttcgcaccgctggctccccgcctgggccctgagctgtcaccctcacccacttcgcccactgcaacctccaccaccccctcgcgctacaagactgagctatgtcggaccttctcagagagtgggcgctgccgctacggggccaagtgccagtttgcccatggcctgggcgagctgcgccaggccaatcgccaccccaaatacaagacggaactctgtcacaagttctacctccagggccgctgcccctacggctctcgctgccacttcatccacaaccctagcgaagacctggcggccccgggccaccctcctgtgcttcgccagagcatcagcttctccggcctgccctctggccgccggacctcaccaccaccaccaggcctggccggcccttccctgtcctccagctccttctcgccctccagctccccaccaccacctggggaccttccactgtcaccctctgccttctctgctgcccctggcacccccctggctcgaagagaccccaccccagtctgttgcccctcctgccgaagggccactcctatcagcgtctgggggcccttgggtggcctggttcggaccccctctgtacagtccctgggatccgaccctgatgaatatgccagcagcggcagcagcctggggggctctgactctcccgtcttcgaggcgggagtttttgcaccaccccagcccgtggcagccccccggcgactccccatcttcaatcgcatctctgtttctgagtgacaaagtgactgcccggtcagatcagctggatctcagcggggagccacgtctcttgcactgtggtctctgcatggaccccagggctgtggggacttgggggacagtaatcaagtaatccccttttccagaatgcattaacccactcccctgacctcacgctggggcaggtccccaagtgtgcaagctcagtattcatgatggtgggggatggagtgtcttccgaggttcttgggggaaaaaaaattgtagcatatttaagggaggcaatgaaccctctcccccacctcttccctgcccaaatctgtctcctagaatcttatgtgctgtgaataataggccttcactgcccctccagtttttatagacctgaggttccagtgtctcctggtaactggaacctctcctgagggggaatcctggtgctcaaattaccctccaaaagcaagtagccaaagccgttgccaaaccccacccataaatcaatgggccctttatttatgacgactttatttattctaatatgattttatagtatttatatatattgggtcgtctgcttcccttgtatttttcttcctttttttgtaatattgaaaacgacgatataattattataagtagactataatatatttagtaatatatattattaccttaaaagtctatttttgtgttttgggcatttttaaataaacaatctgagtgtaagctgggatcctggcttcttcgcggtctagagacaggaatggagagggagggggtgactttttggaagctgggtgcagttaactcttcctctccgagccccgcggcgcttacctggcaggaagtgacgtcaccgggcctggccgttcacctgaaagggtgggaccaggtgaggtcaccagatgggaaccgggggagccagttcccgggcgtcgggggcgccgcgctcccgtcctgctgggctccttgacccagcttcgggcgggtgcggtcggggacgggatgtttccgtccccacggggccgcgggaggcgggaggggccgggtggggaggacggaatgtgctggggcgcgcgcccagagcgagcgggggcgggcgcggggcggggcagcctggggtagcggaacccgtttcgggactagaggttccgggggggcttcgacaccttctggatgttggggaagcgggtttagggtctcaagaggctaggatctcaacatttgggagtcacaggttgcatcccctagcgctttagactctagacccctggtggctcggagttgcagatttctggccacccgggaccctggagcccgggaattaccgggtcttggcatttccgaaccttggaagtccgaggcttcgcacaccgaccagggtcggccccgcgaggccagggcgtgtgggtaggggccgcgcgtctaggaggggccccgggggagccgcgtcttcagaccatacaaggccagcgtcgtcgggaccaaccccggggccccgcgcccggaagccgccctgcgtcagcgcctgcggctcggccctgccgcccagccttcgccccctgcgacccctcttttttctccttgccccgcactcctccctcctccctctcacttccctcttctctcctttccctaccctcacccttcctcctctttttcacttcctcctctgcacccttctgccccgccctacaccctttgccttctgttcttctctccccctccaatttgtcccctccctcattactcctctcccacttccagcctccccatcctgccgtctcttaccccctttctcctccttcccgtctcccttctctccctttttccgtccttctttccctctccaccctttccttgccctcccactccccattgtcctcttcccctcctccccctagccttactccttctcctcttctctctccctctgaagcccctttccctcctctcccttctctctaccctcctcaagcctccctcctgctctcaggcctccttggcccactccccttgctcactgacatttggtctcctcttccaggaaactgcttcccttgtgggaaagggctcaggccctaataagtagaagaggatcaggcgagagggagtcagaacccctgagatgcaaaggcagcagaggggcagagaccaagagcaagcagtgaagagacatttgcagaaacagtcttggagactgaaagaacaacatctctggtccttcctttagccagatctgattctctgccccttccccaaaaaatccctcatataagaaaacggcacttctcaccatctaccagggcttaagccagacacccaggagtatcccttgacaccttgttctcaaatccacaccccagtccaacagcaatcctgtctgatccacctgcaaaatagatccactatccacctgcccccaccatgacccccaccctggtcctagccaacatcgtctgccatttgcatcttcatagcagccccagccccagtctctgctctagcccctgccttcagtctctcctttctccactcccccacgagacaaccaaaggaagcctgttatgagacctgagtcaggtcacataaaagtcaaagtccgaagtcctccccacagcccacacaatctggcacccatcgcttaccctcccccttggccactctgctccagccacactggcctcctagctgctctaccaagtctggtctgcttcatccataggagctttgcactagctgttccctctgcctgaacactcccctggtgtccccatggctcactcccctccttcatgtctctgctcaaaagttgccttctctgtgagatcctccctgaccactgctgttgcaatccacaccccacctccaactaccccatcctccctaccttgctcgactttttccatgacatttatcatcaccacctaacattaaaatgtacttaattcttatgttgacagcaatctgcctccccactagaatgtcgcgtcctcaggggcagggactacttgttcactgctgtattacacacagctaaaggaagccaggcatagtgaatgttcaatatttattgaaaaaacaagtcgactcaaaaacatagttttccttttcaacagaggtcgaaaactccaagacagatagctatgttcatctgtaaaggaggcattaaaaagacagagaaatacagaggaggcagagtcatatacagtttgccgaggacccacatctctacagaagtcaaactgtttgcacacaattccatgcccagagcatctaataagagacgatacccccacctggtggctgggacggaaacggcacctccctacaatacagaacacccaaaggaccgtcgccaaagccctaggagtcttttgagcccaataattcaaaagatagaaacgttcattcatctaagtgatgtagatgttttggttggtttattagatgtgtaagtttataaaaactgatggggaaaaaaagtgctccaggtgaggatcgaactcacaacctcggcattgctccgctcgcactgtcatataagtaccgcgcgctaaccgattgcgccactggagctccggccgcacccctgcgccggggtcttcttcagtggttcatagccacgtgacctcaccggagggccccgccttgtgttatatatgcaaattaaacattttgcattgaccaataggagacagtgcattgccagttccggattctcacgcctcgcggcccttgctgtaaaagggaaaagtccgcgaggcgtttggaatgtaggggtgtcgcctaccagaaggacacgcctcctcatgaatattcaaaacaaggggtggggtcttaacccttcgctggcgggtcggccggaaggcagcccctcccccccccgcaggcgggaacaggatgtgagccccggcgacagcgggggaggggaagccccgggcgaccgccccccgcctcacagctgggatcggactctcccgccccagatgtggcgccgccgccgtcacacgagccccgtgacacccagccgggagcccgaggggtccagaggctcggacccgggcgtccggaatttctgcaccgcatcctgagagaccccgaggtccagaccccggcgcccaggctggaggacttgagccatccaggtgcgcagcgccccctcctggagcagccgggagcccggacgtcaccccgcgagaccctggaggccgagcgccccgtatccccgtttcaagaactcaggatccaggaccgcagactccctccagggctccgatcccaagaccccgcgttggaggaacttgagatccggacttctaagcgccccaaccagtttcgggctgcagcggccatcgcttcaaggggacccaggactttgggacccccctgtgctcccacctggagggagtttcattcctgcccctagaattaggggaactcagaaatccatcccccaccccacggccctacctagaagacttaggaatgtgggtccccagcgccgccatctgagactccagagtcgaggctcctagcatcccctacgtagaacactgagaaattccgactgcgggaccccagtctccgagagaccccagattctattcctggagcctgagagcccgaagttcacgcccctgagtctgggctccgcacctccctggggaccgcgtcggggtcgcgcaggagccgggctgcctcgagccggggctggaggctccccgggaggtgaggggggaggcgaggggcccaggcggactgggggagggggcggcgccactgctgaacaatgagggggcgtgccggcggggggcgagccgaggcgccggcgggagttgggggctggaggggtgtgggaaggcgctggggaggctgtggctgtggggacggcgatcggggttcggagagaccggccggagggggtgcgagggctcggggccagcgccccagcgcgcagccctcggcgggggagggagccgtctgcaggaccctggcatccggtcccccagcctccgccctcccctgggaccccgcggcctcccgcccacggcttttcccagccctgcccctcgccctccgctccagctggagcccaaacgttcccaggatccctaagcctccggccccagacaaacgggactcgcagcttctgcgcctcctgctccgctcactcttctttgtctcagcctttccatctttttcgccaggttctctctccttgtccccttctttctgtcactttgtgcctcccccattagttactctcaggggcccctccctggatttacaccacgctcctaattcccagcccccatctgtgagtctgggcggcggagaggcccatggggtcctgatatccaagaaggggctctttctgcaggactctgctgggccgctcagccatgcctgagggagcccaaggactgagcctctccaaacctagcccaagcctcgggtgtggccgaagaggtgaagtgtgtgactgtggcaccgtgtgtgagactcggacaggtgagcctagaggcaggggcggcggagcctgtggggcttttattccttggcaatgctgtcaaggcagggtgatggagacaaccccaggccaactcgcacaaagctccgagtctggtggggaaggcgggcccatccccaggcaatgacaggccagagggggcagcgctgggcagagtggtcagggctgtgatcgtggatcctctgagctcggaaggtcaggggaaggttcctggaggtgggaacatctcaactgggaagtggaagattagggggaaggagttgcgcaaagacaaggaagagtattctacatgcaaggaacagcatgtgcaaaggcccagcggtgagaaaaggctgcatgtaagtgactgaaagaagttgagtgtcactggcatccagagtgtaagaagaggggtggctgtgggaagagaactggctagagggatctgtgttggccacattgcccagtgccctgtggatctgaggagtttggactttatccccaggggcatgaaggggttacactcacgggagtaatacagtcagatagacaaattaataaatgtctacctagctgattcatggaggtggattagagaaatggaggccagaagtccagagaggaccctgatgggagaggatgggactggaccaagacagggcagtggggagaggaggaaggagcctgtgggaaagctgttggacaggtgtgggtgagggtgtgggctgaacgcatgaaaggctgtggaagtccgtgcatggggagatttctctgacctcctgttccacaccccagcagctcctgcagcccccaccatggcctccccccgaggttctgggagctccacatccctgagcacagtgggctctgagggggatccagcccctgggcccactccagcctgctcagcctccaggccagagccccttccagggcctcccatccgcctacatctctctccggtggggatcccaggttcagccagaccctcaaggctggagcgtgtggcccgggagatcgtggagacagaacgggcctatgtcagggacctccgcagcatcgtggaggtaaggcgggcagacaccagagggcagtgggtacccaggccagccccttggcccccataaccccagtcatcccaacaggactacctgggccctctgctggacggcggggtcctggggctgagcgtggagcaggtgggcacgctgtttgccaacattgaggacatctacgagttcagcaggtcaggggcaggggggacaggcagggggcattgattggttggagggtctatttcctaatccaaacctcggagcttcgtagtgtcctgtccaggctggtacgtggggttgtgacattgggcaaggatcagggatcacgactgggagggaggaccccgagtgagggaggggcataggggatgggaggaccccgagtgagggaggggcatagcggatgggaggaccccgagtgagggaggggcatagcggatgggaggaccccgagtgagggaggggcatagcggatgggagtcagaggacctggatgaagcccaaacactgggacagggtcccggcatcaggacgagtccttggggctgtgtcaggtctgggctcacgatgaatccaagaatcatatggggcctgaaggccgagacagcgtgagcatgcgagtgaccccctaagcctgatttgcctgggacttttccagttttagcactgaaagccctcgtcctaggaaactgctcagtcccggacaaaccaggatggttggtcactgtggtaaggaggactctggggtccaaggatcatgacatttccaagtaccttgacgaggtctcgggattacagcaggaacttaagatcatcctagctctttgggtcatgatataacacccctaggctcatgccagcactgacacaagttcaagctgaggaatgagaagctgtccagggacaaagtctaagcaggttaccatgccccgtgtagccctcagaggacccttcctccggacatgacatccccttaggagatgctggcagtcagcaagcccccagccccagcagaccattggggcctcagcctcctggaggcctcccatggaggggtcgtgaaggcaggcggttcctcaccctcccctctcccctgtagcgagctcctggaggacttggagaacagcagcagcgccgggggtattgccgagtgcttcgtgcagagggtgagtggaggggtggggggctctcggtcctggatggggcctttgtagaggggggagagcaggcttgggctaggctggaaggggggtcgtgggaagccaggacctggggtctccctgactcccatgtcacccgcagagcgaggattttgacatctacacattgtactgcatgaactacccgaggtgaggggcaggagcccctgctgggcctcaggctgtgcccacaagctgatgtgccagtcacccgtcaccctccctctacccccgacccatccagcaccgacccctgccaggctgtgacagtaactgacctctccctcactgccccgccccctgtcagaccctgacccttcccaaaccctggcccctccctaacccctcttgaccccgcccactggaactgacaatccccactgacctgtgctgtgcccccagctccctggccctgctccgggagctgtcgttgtctccgccagcagccctgtggctgcaggagcgccaggcccagcttcgccactcgctgcccctgcagagcttcctgctgaaacctgtccagcgcattctcaagtaccatctgctgctgcaggtcagctggggcccctggagccaggctggggagggggaggtcctgtcccttgaccacctgttggttcatctggaggatggaccccccacgagttgggcaaggcctcccaaagtgctgggattacaggcgtgagccaccgcgcacagccctagcttttttttttccctttgaggtggagtttcactcttgtcgatgaggctggagtacagtggtgcgatcttggctcactgcaacctccacctcctgggttcaagtgattctccttgctcagcctcctgagtagctaggattacaggcgcacaccaccatgcccagctaatttttgtatttttaatagggacggggtttcactacgttggccgggctagtctcgaactcctggcctcaggtgatttgcccacctcagcctcccaaagtgctgggattacagacatgagccactgcgcctggcctctgcccctatctttatatttctccatctcctgttattctcattctctttctccttctctgtttctctccccatccctgcgtgcctggtggctgcctgacaggaactagggaagcactgggcggagggcccaggcactgggggtcgcgagatggtggaggaagctattgtgtccatgacagcggttgcctggtacatcaacgacatgaagcgcaagcaggagcatgcagcgcgcctccaggtggccccagggtgggctggggcttgctggatgagggagtgagcgagggggccttggggcgggtggggggaaatcagtgcctcagaggtagccttggagggttggctgggacagcatggccctgttgctaaccccctgttttggtgtgtatgtgtgtgccacctacccatgcttgtctctgcgccccggcgcacctggcggggtcccggcaggaagtgcagcggcggctgggtggctggaccggaccagagctcagtgcttttggggaactggtgttggagggcgcgttccgaggaggcggagggggtggcccccggctacgagggggtgagcggctgctcttcctgttctctcggatgctgctggtggccaagcgcagggggctggagtacacctacaaaggccacatcttcgtgagtttggggatggggtggggctagaatactacctacaaagtatatcccatatacctgtatctgtgtgcccggcagtgtgggccaggggaccctgccacattttcttgagttagagaatggaagccaagggaagctttctttctagtgtatagaatgagagctgccccacttaagaaaaaaaaggagaaggctgggcgtggtggctcattcctgtaatccgagcactttgggaggtcaaggcgggcggatcacttgaggtcaggagttcgagaccagcctagccaacgtggtgaaaccccgtctctactaaaaatacaaaaattagctggacgtggtggcaagtgcctgtaatcccagctactggggaggctgaggcaggagaattacttgaacccaggaggcggaggttgcaataagccaagatcatgccactgcactccagcctgggtgacagagcaagactctgtctcaaaaaaaaaaaagggagaggaaacccaccatacagccttatgggatgcatcttcctagggaggaggacccagatacacctccaagggtgtctccgtacaaggggcatcactgagcccaaggactctgagcttgctacccctctctttccttccagtgctgcaacctgagcgtgagcgagagtccccgagaccctctagggttcaaggtgtctgatctgaccattcccaagcacagacacctgctccaggtgagcatgtagtgggatcaggctggcagggatcccccagcctcgagacctcacacctggccccctgactctactccaacccactcctaggccaagaaccaagaagagaagaggctgtggattcactgtctccagcgcctcttctttgagaaccaccctgcctccatccctgccaaggtacagctcctgccgcagccgggggccctctgagtgctggagacaccctcccccaatagtactaagagacgcccctgcccaatgccagagcagtctgttataatgtgattgctaaaagtgcagaattccgctacttgggtttgaatcttagctctaccatgtccctgctttgtgaccttgggcaagtaacttaacctctctgagccttaacttcctcacctagaggaatgaaagcgccttcatcctagggttgtggtgatgagtaatggtcaccagccacgtcatgggcttgaccaatagaagcacccatcagctggctgtggtggctcatgcctataatcccagcacttcgagggggtgatgtgggaggatcatttaagcccgggagttcgataccagcttgg

SEQ ID NO: 1870 - DNA, 1724 bp, Homo sapiens
cagcctgacttcagcgctcccactctcggccgacacccctcatggccaaccgttacaccatggatctgactgccatctacgagagcctcctgtcgctgagccctgacgtgcccgtgccatccgaccatggagggactgagtccagcccaggctggggctcctcgggaccctggagcctgagcccctccgactccagcccgtctggggtcacctcccgcctgcctggccgctccaccagcctagtggagggccgcagctgtggctgggtgcccccaccccctggcttcgcaccgctggctccccgcctgggccctgagctgtcaccctcacccacttcgcccactgcaacctccaccaccccctcgcgctacaagactgagctatgtcggaccttctcagagagtgggcgctgccgctacggggccaagtgccagtttgcccatggcctgggcgagctgcgccaggccaatcgccaccccaaatacaagacggaactctgtcacaagttctacctccagggccgctgcccctacggctctcgctgccacttcatccacaaccctagcgaagacctggcggccccgggccaccctcctgtgcttcgccagagcatcagcttctccggcctgccctctggccgccggacctcaccaccaccaccaggcctggccggcccttccctgtcctccagctccttctcgccctccagctccccaccaccacctggggaccttccactgtcaccctctgccttctctgctgcccctggcacccccctggctcgaagagaccccaccccagtctgttgcccctcctgccgaagggccactcctatcagcgtctgggggcccttgggtggcctggttcggaccccctctgtacagtccctgggatccgaccctgatgaatatgccagcagcggcagcagcctggggggctctgactctcccgtcttcgaggcgggagtttttgcaccaccccagcccgtggcagccccccggcgactccccatcttcaatcgcatctctgtttctgagtgacaaagtgactgcccggtcagatcagctggatctcagcggggagccacgtctcttgcactgtggtctctgcatggaccccagggctgtggggacttgggggacagtaatcaagtaatccccttttccagaatgcattaacccactcccctgacctcacgctggggcaggtccccaagtgtgcaagctcagtattcatgatggttcttgggggaaaaaaaattgtagcatatttaagggaggcaatgaaccctctcccccacctcttccctgcccaaatctgtctcctagaatcttatgtgctgtgaataataggccttcactgcccctccagtttttatagacctgaggttccagtgtctcctggtaactggaacctctcctgagggggaatcctggtgctcaaattaccctccaaaagcaagtagccaaagccgttgccaaaccccacccataaatcaatgggccctttatttatgacgactttatttattctaatatgattttatagtatttatatatattgggtcgtctgcttcccttgtatttttcttcctttttttgtaatattgaaaacgacgatataattattataagtagactataatatatttagtaatatatattattaccttaaaagtctatttttgtgttttgggcatttttaaataaacaatctgagtgtaa

SEQ ID NO: 1871 - protein, 332 aa, Homo sapiens
MANRYTMDLTAIYESLLSLSPDVPVPSDHGGTESSPGWGSSGPWSLSPSDSSPSGVTSRLPGRSTSLVEGRSCGWVPPPPGFAPLAPRLGPELSPSPTSPTATSTTPSRYKTELCRTFSESGRCRYGAKCQFAHGLGELRQANRHPKYKTELCHKFYLQGRCPYGSRCHFIHNPSEDLAAPGHPPVLRQSISFSGLPSGRRTSPPPPGLAGPSLSSSSFSPSSSPPPPGDLPLSPSAFSAAPGTPLARRDPTPVCCPSCRRATPISVWGPLGGLVRTPSVQSLGSDPDEYASSGSSLGGSDSPVFEAGVFAPPQPVAAPRRLPIFNRISVSE

SEQ ID NO: 1872 - DNA, 1748 bp, Homo sapiens
cagcctgacttcagcgctcccactctcggccgacacccctcatggccaaccgttacaccatggatctgactgccatctacgagagcctcctgtcgctgagccctgacgtgcccgtgccatccgaccatggagggactgagtccagcccaggctggggctcctcgggaccctggagcctgagcccctccgactccagcccgtctggggtcacctcccgcctgcctggccgctccaccagcctagtggagggccgcagctgtggctgggtgcccccaccccctggcttcgcaccgctggctccccgcctgggccctgagctgtcaccctcacccacttcgcccactgcaacctccaccaccccctcgcgctacaagactgagctatgtcggaccttctcagagagtgggcgctgccgctacggggccaagtgccagtttgcccatggcctgggcgagctgcgccaggccaatcgccaccccaaatacaagacggaactctgtcacaagttctacctccagggccgctgcccctacggctctcgctgccacttcatccacaaccctagcgaagacctggcggccccgggccaccctcctgtgcttcgccagagcatcagcttctccggcctgccctctggccgccggacctcaccaccaccaccaggcctggccggcccttccctgtcctccagctccttctcgccctccagctccccaccaccacctggggaccttccactgtcaccctctgccttctctgctgcccctggcacccccctggctcgaagagaccccaccccagtctgttgcccctcctgccgaagggccactcctatcagcgtctgggggcccttgggtggcctggttcggaccccctctgtacagtccctgggatccgaccctgatgaatatgccagcagcggcagcagcctggggggctctgactctcccgtcttcgaggcgggagtttttgcaccaccccagcccgtggcagccccccggcgactccccatcttcaatcgcatctctgtttctgagtgacaaagtgactgcccggtcagatcagctggatctcagcggggagccacgtctcttgcactgtggtctctgcatggaccccagggctgtggggacttgggggacagtaatcaagtaatccccttttccagaatgcattaacccactcccctgacctcacgctggggcaggtccccaagtgtgcaagctcagtattcatgatggtgggggatggagtgtcttccgaggttcttgggggaaaaaaaattgtagcatatttaagggaggcaatgaaccctctcccccacctcttccctgcccaaatctgtctcctagaatcttatgtgctgtgaataataggccttcactgcccctccagtttttatagacctgaggttccagtgtctcctggtaactggaacctctcctgagggggaatcctggtgctcaaattaccctccaaaagcaagtagccaaagccgttgccaaaccccacccataaatcaatgggccctttatttatgacgactttatttattctaatatgattttatagtatttatatatattgggtcgtctgcttcccttgtatttttcttcctttttttgtaatattgaaaacgacgatataattattataagtagactataatatatttagtaatatatattattaccttaaaagtctatttttgtgttttgggcatttttaaataaacaatctgagtgtaa

SEQ ID NO: 1873 - protein, 332 aa, Homo sapiens; identical to SEQ ID NO: 1871

SEQ ID NO: 1874 - DNA, 26324 bp, Mus musculus
ctcattagaagggtgctcaaatgtgttctcgcctcaccagttagcactcaactataaagagtattcaagttcaaaggttgttttatagagaaacaggtcttcctggaactgggatgaaatgaggcttaagataggagccagaccccaggagtacagctcaaaagctcagatatcctgagatgaggcaaagtacttagcagtgtggtacctgagctcttgtgcaggtgctaaagaggtcttttgagaagtactttgaggacagacaccatagctgctgtcctgttttgtgccacctgttgagcctgcttggattgcatcctgtctgcgggaacaagtccaagtaggcacaggaagggctttagcttagctttacaccaggcatagcgaatgggccatcaaccagcaagaagctgcccagtgtctgcccagactgcccaaggcaacttggagtccctgtccaaaatagtcaaagcttgtgtgtggcccccaagaactccccctcggcttcacatcacttcctctctggaaagtctggcctttcttgcattacccaactcctacctaccttggctgtctccctgtctacattgtgacatccctaggcctgtgtttgtctcttctcagctatgtcttccacccccttgtatgcatgctttctgggctctttatctcttggctccaaccccatgctagcaatctctgtctgccggcccttccctctctccattctggttggccctcccctcaccaccaccattctcttctctcccactcagactgcccggtacctgggcctgacctggagatcaatcctaccctggagtctctgtgtctgagcatgacagaacacgccttgggtggtgagcatttcctcttcccctgacctagctcccacctacccagcatctccagctctgaacacagcaacttggagccatcctgagggtcccaaggggaggccagactccagggagggcctgcctgggatgacatgctatgtgagtgcctttgctcaggcctcccaccagctcctgaccttcctcccttcctccctttcttaccacagatgggacagacaaaacctccaccatctgacgggacccacagcccagcgcacccataggctccctgggcggcgggcgggggccatcccccaacaggcttctcctcagcagcgagagggtgggctggcgcagctatacattctgatatttttctactcatcctcttaacttttgtttaacattggcacacgccttgctcactcccaggcccattgagggatctcagctgaggccagggacagagagggcagccagaggcaaggactggccagactgcctgccttttccctcccaaatcccccactagccccatcctacccctgcctccttcagactgctgacacctgtccttccccaagagagcagacttcctcagagacaaactgacagtcaccttgcgcaacctgcccttcagacacatgacagtgggggaatgagcagtgtggacagcctgctccaccagtatgtcactggaaaagagcccctctcccttacctcctacctttcatcattcctaccattcctgaagacaggcaccaccttcctcctttttttcttaccctgtttatcagaggttctctacaattaatttcttaggcctatttaagatacatatttatatagttcttaacggtttttctctgatcattccctgtcatttttagaatccctaggcctctctctgagccaggacagtggcagggggggcctgaactttatgaggagagggcagagccccctcctgcagaccctcttgcccttccccatcccagccccggctcccagatgcagaggttgaaggtgggcagccccaggccctcagtgaggtcaggaagtctgttgccttaatgtccctttccccccaccaacataacccttctctgttccccaggtctgtgcaagacttgagggtaggaaccagggaatggggggtgttgggtttttgttttcttgcctaccctctctgtcaaactttcccacccccattatgtcatgacctcatgtaagtggaacactatatcataacccagaggtgcagcccagcctgagtcacataaaccctctactccctgttcttgatgagggctggtgctggggcccaggtggagggagggaatttgggattcaggctgtggggaagccagggtcccctattccaaactcctctttcccctcaacctacaccctcattgggacattctcaagcttttcacacgaaaaggaaaaaaatgttatttttagatacattttatgaataacttttgttatgaatatggctggtaaccattgtgtatgttattaaagatacaaaatgttgggaaaaaacaaaaccaaaaaaaagaaaaaagaaaaaaaaaggaaaaaagaaagccttccctgcactatcagcccatccccccagaccttgcccctacctcctggtctgtggacctcccctgctttgagcccagggagggagaagaagccagggggtagagtggccctggggacctgcctgtggtccccaccacctctcccagtgccgggctgggcggggtgtcaggtgtatttatgtacctcttgcacactcatcaacctatgcaagtccccaccccggccctccaggtttctgtgcctttgatcattccccctcttaactcccaggcttctccggcccctcccactaacagtgggaagtggggtgaaaggccacctgtttggaataagcagggtgtccctctcatgggaccctcgcccccacaagccggtccagtcttgtcttgttcacttcccatcagggtgactgaccctgcctggcactggaaggtgatgagggataccctccccaagagggaggtgagagcttcccacccatctgacagcagagtgcaggacgcaggcggcctcgctctgacaggcaggaccctgaccctcccacccccatgcccctccatggtttcaccctaccctacccacttctgtccccagccccactggcagaatcagctttgagtaactgtacatttttctcgctgttggaaaagacttatttgttgaagtttcgattgttaatggtctgggcttattttggaaaacaaaaaaaacaaaaacaaaataaccaaaaagactcttcatttttcttatgatgcatttcctgggaatccatggggacttgattttgtacttcttgggggggggaaggggggcggcagcggcaagatgatgtgaaggggaacagagactttaggagatgaagtcaagagaagttaggtttattaacagcaaagattgaggggtagtgacaaaagctcacaaaacagacaactagaaaagtgcttccctgccctaaaaatggtgtctgtgctgatctcattagaaagccttgaggctcaatcactgtcactgtcagcctcactggaatcagaggctgctgcttcactgccatcttcctgagctgagtgctcactgccactggggaaggggctggcactccggctacgactcctgctctggctgcggctcctctggccaccaccatcactgccgctgtccgagtcattgtcactgcccctgtgggcctgccctctgtcctcatcatcagagtcagcatcatcttctgaatcagcatcactaccaaaaatctcctctttgtcccgggcagcacgtgcttcatcctcactgctttcatcctcaccgctgccactcttgtcacttgcctcatctctgtcaccctcttctcggtcactctcacttccagagtgttcatcctcgctgccttctttctcactgctgctacccttctcctgttcctcatctgtgaggaagtaggggactggtgagatcccaatgcccaccctcccagggctcccaggatgtgactaatcctttacctgagcccccagcttctttctcttcagcctccatctcttcctcctcctcttcctctggttcgtggttttccaactgggcctttcgtgcctcctgaaaccagcaaattgggaagaagatgaaagaaatctatcagacctctgatgccatccttacccactagactccctttgggcatcctgggccagtacagcttacctgggcttctaattccttctcattcatgtcacggtgtttgacgacaagcaaggcattggtacctgactgaaccccagccttggcccggcgcttacttagacggaccctgcagtggacaattgcagaaggggagttgggctccactaggaccagtctaacatctggttccctatcaatatttgacccagaacataacagaggacaaagtatacatacagtggatgtgaaagatggtatttcgggtttgacttacccaacttttaagttttcagggttttttttgtttcaagattttaattgaatgggtggtttgcctgtatgtgtgttgtgttgtagtaccccaagaagccgcaagagagcatcagaatctcttgggaactgggatataagctgaggtcttctgaagagcagccagtgttcatcactgctaagtcattttccaaggcctcttatccaaagcataaaaccaagaaaatggcaaacgtgtgtttctggattttaaatagaagagcagtggacttgcagctgtattgtagtactcactaaaggtgatgccactgcctgttttcacatctccagccagacaacaggatcagagccatattgaaccactggcactaggacaagttagctttcagccctcagagaaaggttctgaggtcacacaacaagggcacacttttgaagttgtgtcaagtatttaaaacctgctgaagggtataggagatggttctgttggtaaagtgtcatggtggaacaggaaagaataactcttgccccaagttatcctctaacatccaagtgcatgccaggtcatgcatatgactatatacatatgcatacatgcacacaaaataaaagcaacaaaggaaaactgattgcaacctctggctccagtatgtgcacgcatgaacataaacatgtcacatacaaaaagcttattaaaactgttgagacgggctggtaagatggctcagtgggtaagagcacccgactgctcttccgaaggtccagagttcaaatcccagcaaccacatggtggctcacaaccatccgcaacaagatctgactccctcttctggagtgtctgaggacagctacagtgtacttacatatattaataaaataaatcttttaaaaaaaaaaaaaaactgttgagactaggaatgtatcatacaggagggcacttgcctatcatgtgtgagaaaaatgactagatttatatcctgcattatgtgaaaattttctttctggtttatggcattaagaccacagccaggtccagcctacatttataagcaggctcctgctgctctctttttttttttttttttttttttttttagatttatttatttatttattatatgtaagtacgctgtagctgtcctagcatggtctttaaaggggggagaggggggcgtggtagtgcatacctttaatcccagcacttgggaggcagaggcaggcggatctctgagttcgaagccagcctggtctacaaagtgagttccaggacagccagggctacacaaagaaaccctgtctcaaaaaaaagggggggggggaccacaaagggccaaagtcatgaaacagtgccgagtacctggtctccagctcattgtagtaaactccgtcaccctctctgaagatgaagaaatagttctcctcatagcccttactggccttgttcttcacattccagttgtattcccgagcaatcttatagtcatacctgggaagaagatacacagcccattgattcatgaggaggagacatacttctgaattctaaaacctgaccctgaccctaaccctaacccacttacacatcatctggtgcatagtccatctcttcctcttggtcccgctttcgtttctttagtgtttcttccacaggcagaaaataagccacaaactggttcccttcctcatccatcatgcccctggtttgggggagaagagggtacaaaggtcaaaagcaaagaagtaacaaagctaggtgtggtgacacatgcctatacattcaacattccagagattgaggcaggaggaatgcaaggagcctagaggtcagccaggacaacaggatcataacccatctcaaaaatactcaaacatgggagaggcagcaaggagcacacaaggtagaaagcaagaccacagacctgatcatggcctgagacatcatctctaatgcagctgcaccacttgtgtccttgggggctgggtctgagtcaaaaatgacctgagcacatgggtttatccacatctgggaaatagaaagatactaaagttagtaaggactggacaggcacaagtagcaacccccgcctctttccctgagtctgaccttaaaatctgggaagacaggcatgacctccactggtgtcactcggggcttgctgtaatgctgggagatctgatagaacaaaaagggtgagaaagaggaagaccctgagccacactcttgcctctattctattccccccaattaccgatttctgggcatcttcaaaagtcttttcaatggctgtgatttggctgtccctgtctttgtatatttcttcctctgtgaactgctgtttcacagaaaccccaatcctagcagtgaagaaaatgtcattaagggcctctggacattgctaaagtcttgcccccttcccacctgtttgttacttacttgacttcaggcttctcattggagatgccatatctgttgaactcagtggagatatactctgtcttacgcatccacggtaccacctttgcatgctgctgggatctgaagaggaaaaccaggcacctcagggtcccatgcttgacaaagtccacccagtacctgtgggacccacctcacctcttagagctggtgggagcctgaatctcctcttctagaagcttctcatcagccggatccagaagaactagggggtaaggggcaggaggaccatgagggatacccaggcctggcctttgctggcctggaacagaccctccctgtctccccacacaccattgggatcaatgcggtaggtgtcagggttgatgagatcaatggtgacccccagatctggctcagtcaggaggtcatgtttgtgctgtttctccaaggaggttgctttgtactgaacaaacctagaagggaaaacatgactgttacagttttatgatccaccctcacgccccaacatgctcccttcctagaagctaagcttctatggagaggaactctgaatgcaagcgtccagcattggcaacttctgagtaagaagggtattgcatactgctttctctattagtagttactgagcacctcctatgtgccagtccgaggaaggttgaggcaatgaaataagcagtccttgccatcaatgaactattttttagtagtttttccattcttgaattcagtcctacctgttctggtcgaaggggtaggtgatgaacttggggtcaaatgggatgtcaggaaggctattgcagtacttgactcggcagactactccagacctaagaaaacagaggcccagaactaggtcttgcagacctatagaaataacttcagcagttaagagggagtatttattctgcagaggacccaagtttggttcctagcacccacatcaggctgctgacaaccacctgtaacaaggggaacctgacacctgtgacctctgtaggcagctacacaaacatgtacatacttacacatctaattaaaaatataaatggcttaagttggtggcacaggcctttaatccctgcacttgggagacaggcaaatcacttgagagtttaagctagtgatggtttacatagtgagttccagaccagtcagtgatacaaagtgaaactcttgtctcaaaagaattaatagtacccacactttaataccagccttggggaggcagaggcagtggatctctgagtttgaagccagtctgctctacagagtgagcgagtgagttccaggacagccagagctacacagagaaactcggtcttgaaaaaagaaagagtagtagtaacaattttaaaaaacaggctcgaagagctggtgagatggctcagcggttaagagcactgactgctcttctgaaggtcctgagttcaaatcccaacaaccacctggtggctcacaaccacccgtaatgagatctgacgcccttttctgttgtgtctgaagacagctacagtgtacttatatataataataaataaatctttaaaaaaaaaaaaagcgcactgattgcggcttccaaaggtcctgagttcaaatcccagcaaccacatcgttgctcacaaccatccataacaagatgtgaccccctcttctggggtgtctgaaaacagctacagtgtactcacatataataaatctttaaaaaacaaacgggctggagagatggctcagcagttaaggtcctgagttcaaatcccagcaaccacatggtggctcacaaccatctgcaatgaaatctgatgccctcttctggggtgtctgaagactgctacagtgtacttacatacaaacaaaccctgcctcaagctgacaagatacctcagcaggtgaaagtgcctgctgtccagcctaaggaaatgtctttagactgccactcagagctaaggtgtgtacaatttaaacacacacacacacacacacacacacacacacacacacacacaaccctaggcctgtgctgctgggcacataaggctgcaatcccggcacccatgagactggggcacaaagaccagtctgggccactttatgagattctccaaagcacaaaaaaggccccctaaccgcctcccctgttcgtgttccacccctcctggaaaacggagctgggagcttacctctcaggcaaggtccggtgggaattgggcctggtttcggggagaagagagagagagagagagagagagagagagagagatgtcaagagttggccatgtgagtggaaaggccggcccccgaatttctgaaggagtgatggtgatgatggtgataaagcatgaagccagatgctcaatcccctgaggagagcaatccagaagcttcactgaaggagactgaggtctgactccctcccgcaaggtgcaattccgaaattgaatagcaggggaccaggaagcgaccgcagagcccaggggggaccgccccttcatcgggggtgagcgctgcgcgacctcgggggccgacctgagggaatcagtgatgtcgcaagcagcccccctcggcctagtccccagcttgcagctcacaaaacaaaatgaagcggcaggtgacaggagacctacctgtggccatcttccctctgggcctgggtctggatggtgggcgccatcgcgaccaggcgacggcggcgcggtaggcgtcctcgctggccgcaggcggacgctgagtggcgtaccgactttgagagacgccggatccaaggacaggctcccgtagacgccgggctccgcggggaaaggggatgaagtgggccgacgagaagggctcgggtgtgactgaagtaagagcacagacagcgtcggacacagacttgcagctcccgctccgactgctaccaagacgcagaagactagacaggtcgctcctggccgcaaggccttcagggaaatagagtttggtcagtccttcacagtgattggcgagctgtgggtgaaggggcggagccgtgggggaactcctcttatgattggcgaaaagatattccactcatggcctcggatttgggagggcggagaaaaatgcatatcctcttctcccattggctaatctgtcggtaaggcatggctaactaggaggtcagccaactgaaaaagctgaggagctaccggagcagacgcatttatgacgcatttccggcgttctagcggaggaaaatggctgcgccccagccacaggctgcagcggtttcctctgcgtctggtgtgtcaggcccgggttctgccgggggtccgggtccccagcaacagccacaaccgacccagttggtgggttctgcccagagcgggctcctgcagcagcagcagcaggacttcgatcctgtgcagcgctacaagatgctcatcccgcaactgaaggagagtctccaggtgatgggccctgcgcggggagcaagaggggctggctggcgggcgggcgggctccggggacgagcgccgaggggctgtttgttgaaggagagatcgtaggtcgggaagagaagacagactagctgtgttgtgtttgtgtctaaccaaagtgaagctccggtcagctgtagtggtggcgcgttcttaatccccgtgctgggacagcagagggggacggatctgagctcgaggccagtctggtctatagagttccaggccgaccagggtctacatagtgaaaccctgtggagagaaaggagatgaggatgaatgacaatttttgtttgtttgtttttttttgtttttcgagacagggtttctttgtatagccctggctgtcctggaactcactctgtagaccaggctggcctcgaactcagaaatccgcctgcctgtgcctcccaagtgctgagattaaaggcgtgcgctaccatgcccagcatgaatgacaattttaactgtgtatggtagtgcaagcctttaattcctgccttctggaggcaaaggaaggtaaatcttttgagttccaagacagccttggctacacagagaaaccctgtcccaaaaaactagatggaagtgggggaggcaggaggagaagagtaaaaagagaaaccgttctggttaagttccgtgcagaagtacggcctaagtgtcatttcagtccatgatgactagataaagggtatgtccaggaagctattagtggtaattccaaacgagagcaggttactgaaaaattacagggagattgggggctagagagttgcctcagcagttaagagcactaactgcttttcctagtggtcctgagttcaaatctcagcaaccacatggtggctcataaccatctgtaatgagatctgatgccctcttctggtgtgtctgaagacagctacagtgtactcttataagaataaagtcctttagaaaggccgggcgcggtggtacacgcctttaatcccagcacctgggaggcagaggcaggcggatttctgagtttgaggtgagttccaggacagtcagggctacccagaaaaaccctgcctcaaaaaacaaacaaacaaaaaaaggaacgaaggagggagggatggaggcgggggaagactgctatgggggtggtagtgagctttagtctctagcatcaggatggaggtgtaagcggaaaaggcctgtgactctcaacacagagttatcctgtttgtgcacattcatctcctgtatcttacttctctctctctctctgtgtccttttaaaactagactttgatgaaggttgcagcccagaatctgattcagaacactaacattgacaatggacagtaagtggacctctgtcttctctgcctcaaccatagaaacccctcccctgctgccccaccccctcctttttaagccctacctggattcccctgggcctggctttaggatttgggtggtcacttgattatctacatacagatgtttcaacttggaagtcacttccctcctcacactgtttctctctggccgtaggaagagcagtgacgcacccttgcagcgctttgacaagtgtttggaggagttttacgcactctgtgatcagctggaactctgcttggtgaggagctccctagagccattgtgactaagctctgcttagttcaccataagaacagtttgagatagtatcacttagtagccaggttctcccagcactaggtctatagaccaagcaggcctggttgtactaagatcacagacatgcacccccatgcccagcttcagccagcggtcacttcctctgtgctagacatgcgcttcagttgaagctgggggcgaaatctatcctgattgtcaccctcacagagctgctagttcagtggaatgacaaatacaagaccaaagatggacagctcagagtggtcaaggctgtgatgacacagcctggatcagagtggtcaagctctgtggggtgaggaagcccaggggcatgtgagagagtgactcacagaaggttgctggtggaacatggaattccacctgacaatctggccagaagggcaacaaggacagggcctgagaggagggtatggggacctatgcttccttactagggactgatatgagtttaaggcttcagctcttgggggtagggcaaaactgaggagacctgaatgagcagaccgagaagcagacgtgataaagcctaggccaggactgtgagagatgtgggcagtaacacctaggctgtagtgtgattggaaaggttttattcctaacacccacattaaaaaggtgggcatggccgggtggtggtggtgcacacctttaatcccagcacttgggaggcagaggcaggccgattttgtttatttggtttggtttggtttggttttttggttttttggtttttcgagacagggttcctctgtgtagtcctggctgtcctggaactcactctgtagaccaggctggcctcgaactcagatccgcctgcctctgcctcccaagtgctgggattaaaggcatgcaccaccacacctggctaaggcggacttctaagttagaggccagcctggtctacagagtgagttccaggacagccagggctacacagagaaaccctgtgttggggggtcagggggagtgggcatggcagtggatacctacagccccagagctggggagatagagctaactggatgtgtgaggctcagtagctagccagctctgcctaattggctagctccaggtcctggtgagagatctaccttaaagaaaaccaggggggcggggcagcaagccttgagaaacagcatatgaggttgacctttggccatacaccctcaaccatacacacacaaaagttcccttaggctagcaagcctgtggtatagtcctatcatcccactgcttaagatgctgaagtaggaagatcaaagttcaagacctgtctgagtggctgggtgacatcttgctttaaaagggaaaaagaagaactaggtatgttggttccagtctgcaatcttttttctttgagacaaggtttctctgtgtagccctggctgtcctgaactcactcgctttgtagatcaggctggccgaactcagaaattggcctgcctctgcctcccacgtgctgagattaaaggcctgcgccaccacgcccggcccagtctgcagtcttaacttgagaggctgatgctggaggactgccataagttccagactagcctaggctaggagcactggggccaagagaagcggggacttagttgagtggcagaatttctgtaacacaagtaaagttgtaagttcaatccccaggaccccactcagtcacttccaggcctgtcagtagagcctgcggagctgtggtaggctgggtcttattagactgcatgtaacccctgtgtcagagagtgctggagggtttgaagtgaggacatttcttcttgaggaaatgaggggcatgttaaaaatgcctgagcctggagctgggagcccaaggaggctcctggttgagctgtgaggaagaattggggacagacagaaacttggaggctttgccaggccaaaagactgatggactattggggaaagagttcccagggctatggtgggaattaggaaggaaaggtgataaatgaaatgattttgccggagctatagaagaaacttctgttcaccttccaaataagggcatagccactaaaacaaggttcagagtgcagcatggtgatgtgagctcatgtaacacattgtgggctggggcttgggagaggtcaggactggacggccagccacaccactgcgaagtctcaacccttgccaccaaccttcaattttactgtttattttttaaaatgagcccaacttgctatgtagcaaaggatgactggacttcctgttccacctctcagttgggagtacggtcacgtacccccatcctatactcctacgcctggctcttatcaaggtttctgctagcctcagcaaacactgtccagccatgggaaggacagggtttactacaggctggcacacagtacagctaaatggagttttgttgcaagattaagttactttggctgaattaggacgatttctcctaacaagggagtcacctctgaggcaaggactcagaaaaagccttctggggaggtggtgggaggctgggagggacctgagcagtgaagagaatggcagccttggagggaaccaggacagaaggcagctgccagtgcagtgccattaagtggaccccaagcctgggtgtagttaggacagttatcacttatctcctgtggcacacatctgtctgtcacctgctctcaccaggcaggagaggtgaccatccgacccatttaaggaactgggcgtgccactgcacttggtagttctgttttaaggcatacaccaccactgccaggcaaagattttaattattttatgtatatgagtatactgtagctgtcttcagacacaccagaagagggcatcagatcccgttacaggtgattatgagccaccttgtggttgctgggaattgaactcaggacatctagaagagcaatcagtgcccttaactgctgagccatctctccagccctgggtaatttttttttttttaattattgcatcttcttgtcgtcgggccctgccattgtgcacacgcagagacagcaggcatcgtggggtgattattttccttctactatgtgagtcctggggaatagaacccaggtcttcaagcttgatagcaagcatctttacctacagacagaccactgaccagctcagatatgtgcactgatgatcccagctctcaggaggatgaagcagtagaggaaaaagtctgaggacggggctggcgagatggctcagggggtaagagcactgactgctcttccaaaggtcctgagttcaaatcccagcagtcacatgatggctcacagccacccgtaatgagatctgatgccctcttctggtgcatctgaagccagctacagtgtacttacatataataataagttaataaaaaaggtctgaggacagctttgtctacgtagcaaatctctaactgaatagcaaaaactgtttggtttttttttttttaacagggttttctctatgtagccctggctgttctggaactcactctgtagactaggctgacctcaaactcagaaatccgcctgcagaaatcccaagtgctgggattataggtgtgcaccatcactgcccggcagcaaagacatttaatagcctaatcccagagagaagtaggcacgtgtgctgggtgacccagtctgactttggctgcccatcagtttagctccaggttggggggagaggaggctgcatccaggaaagtgatgctgttgttctcttttccacagcgcctggcccacgagtgcctttcacagagctgtgacagcgccaaacactctccaacactggtacccacagccacaaagccagatgcagtgcagccagacagtctgccctacccacagtacctggctgtcatcaaagcccagatcacctgtgccaaagacattcatactgccctgctggactgtgccaacaaggtcactggaaagactactgcaccctctactggccctgggggcagcctctgaggtctttcggggaggggcagagaatgaagtatggcctgaggcaaaacaggtggttcctgttgctgatttgtccgtgccacagtaatgcagctgaaaccagcagggggcagcagagtcttgcagacagcacagacctcaaaccccaccaccaccacaccactgttgcctccacccacgctgctccccaacctggagtggaccttcccactgggccgatgattacctctgttctggggactctgactccccacctggccctgggttagcactaactgagccctttagaccttcctcagtctgtcccagtgtatggatttccttttaacccacctttttccagtcctgccatcctatctcaatcagtccccttttgttgcccccaacacctaactgggatcgtattatacaagaggaaccaaaatgcctgggttactagggctacaggaagggactttctggctcacaaaagcagcgcgtgaacgtaagccctgacctcagcacagacaacctaggagaagtttgggtccacattggaccctgcgtcagcagagctctctagctgttctggggaggggccgaggggggatattgtgcaatgtgtggggaggcctgctcaacaagactccttggtctctatatttttagctccaaagcagaagtgaaaaggccccagcttgagtgaatcatggattctggggaagaccccagctcctccgggaaacaggccctggggagggggctttggggagggaggggaggccccagcctgtgggcctggacaagtgctggatggaactacaaaccaggcccggctgccagtggaaaggctagcgtgacagactggttagggaactgccccaccccatatcttttgggccctggttcccatgtcaccaggttcctgtgtctacaaaagtcccagagactgtggagacctccatgatgtacaggaacccagatcatcacactaggaaaagtggaaaatgatcaaaatgagaatgtatacactgttcaggcattcctccctgcctagcttgactattgcatggtctttctgcagggaaggcgagttccaccagtttgatcatgggcctcatttcttttcatttggagttgtagagacagtctctcactccatagccggggctagccttacagtatagtccaggctgccatggaacagaacctacctgctattacttgccaagtattgtgattatatcgtgtgagtgtgtggggagtgcttgcttacacgtacagggtgtatggaagggggtgcctgtgtggagatagagaaagccttttaggccacagtttctcctgttttcaggcacggaggttctcttgccatcctgttgcttggccctttgcacacaccggccggcttaggcgctcccactttgctgtacacgtgttggttgcaggtgtgcactttagctggtcttcagtgcactgtggttctttcccctaccctttaccctccccgacccagttttacctcctaatactggataaacaaggcagagaggaattaagaaaacctctgaatctgatttctttccttttgtttcgtctttgaccatggttgttttgtctttgaccatggctactaacaaaccgcagccaacctccctaaacaatcaacaactacccaccaagcctgtctgggctctaccacttctatgccatctgaaaagttccagaattccaaacatcacacagtcgcagaaactatctgtagatggctaagccatgcctctgctagagcacgaggcaaatcatagtccactgcctcaaacagtccaaagcagcccccatgtcccacccctaggattaaaatggaaacgttcttatatttctgtgttttaaaagaaaccaaaattgccactacagtgcatcaccatattcatcttgcttcttgagttagggtctcattgtgtagctcaaactagtcttgaacttggaaatcttgcttctggctcccaagtcctaggactatagggctgtaccaccatggactttaactatacttagaaaatgccttgatgtcttgaggtggaggcaaggaaactgcaagttcaaagccattctgggtgacataagacctcatctcagccaaaagagaaaagccaagccttcattcagcaatccctagactcctatgtggttagcaatgagctgggtcccaaagtgctgcatcagactcacgggtcttgtcatctgtgcaccgggcgcacatctccttcaccattctttgttaacgttagtgttctggcctaaaactgaaaacactgatcctgtccaaggcagaacacgtcagtttccagccaggggctcactatacattggctgggttatggcagtttgtggctcaaggagacaagtatagctggccccttggggtgatgtcgacacaccacatgcaggtaggcgtggcacccaggatacaaagccttactgcttaaaaccacactctgggtgacaacagaccatggggtgacaggtgtgtttttcacaagcccacaccatagaagataagcaccaatttatattcattcaaaaaacatggcagtttttgagctgaagattccagagatgaacaagatacaacatggtacctaatcctgtaatcccaacatgctggaggaccaatacaagttcccaagtcaggcagggctacatagtgagatcctgtctcgtaagaggaaaaaggagataggtgtctgggctgttgaggtagctcagtgggtaaccacacttgctaccaagccaagtgaccttagttcagtccctcaggcttgcatgttggaaggagacaactgactcacacaagttgtcctctgacctctacacacatttttaaaaggagtttgatggcctacattcataatactagcatttgagagcctgaggcaagaggatggtttgagaccaggctgaacaaaaataagctgatgtgtcaaagaaacccttgccaagccagtgacagcagacttgaaggagaaggaattaggtcttctggacacacagcaaaagtgaaggaactgcagagcacgggccagcctctgacaggaagagtgaagagtctttagctagattcagggagcgcacgggagaaagcccgaatggatcatgaaggtccttgctaagactagccttctccctgccttacaggcacagaggaaggctgagtaggcatgtacgataaccccacactagggaccccacactagggacgatgtgtgtgagatgaaaaaccacagccagccaaagtggcttatgcctgtaatctcagcatttgagaggcagaagcagggaggcttgcggcaagttcgaggccaacttgcttcacattctacaggctgcttcccccaaagacaaagactgactgtgggcacatgccccaccccccagcagagattagcacattggccatcctcccacacacatggaccctgctcgatgaccaagtgccacaaacactaaagcaactatctaaccacgtgactacccaaccctgtaaccaccatttaacccactatctctcaccccatcaagactttgcccatcacaggctgactcagctctgcggcagagccgcctcattcgctggggacagataagattggctcaggcactcagcatccagatgccagtgtgtgcaagtctgttctgcccacagaagcagacacagaagcgccgcacagcagccctccccatcacgcgcctgcagctacgtcaagcaccaaagttcactggtttcactgccttatgacgggtccatagaggaactatgtccagactcaattctaccacactgtcaggaacaggcaacctttaagatagccacataaagggcacagacccacaaataatatttgtacacagagtctaacagtgctgagtgagccacagaaagctatgtgtacaatcctgccacccaggcacctgctaggaatgacacacttagcacagatcccacggtggctcagttacacacagacgggtgggggtggggtggaagtgacagttctcatgaagtcccttcaaagacagctgcagtagttacagttgacaattctccagaggccacttgcagcacatgaggagtagtcagtgacacacatagaggtggcttcaaatttatttaccctgtttgttctatggggaccttaagcactggttcacaggcgcgtccccgcacccgcgcccacaaatacataactaggaacttcccgtaacacatgccgagtgagcacagctccccatacagtgggcacagtacaggtggcatactggttgtcctcccatgcaacaacctccctgcctggaccacactcacaggcaatcacgactggcacacacacacacacacacacacacacacacacacacacacacacacacacacacacacacacacacacgtgctgcgagtacacggcccctgcccgcccactggctctcacacccccgcgtttcccgtccctgcttgtttttctggaaactcagctcagagttcacctccccctaggccggaagtgcttgctatatttttagcctctctggtttccgcccctttctctaccccagcccccaaccccagcgcgcacaggacgtggccgcctgccctgagggaccttggccatccccttccccaccgtcattccagaggggattcccggccactgtctgggccgcggattttccccgctggctacgtggggagcagggaggagtcaggctatgaacttcctcctgggattggggcacacaagcgggggctggacagaaccccggactcctagatccagagaaaaggggcttggggcctagatctttaagtcttagacctctaggtcggagggaagagggccgcgagtctaagggagcataagtggggcctggattcctggtgctgaaggaggtgatctgtgtgtctggaccactggacaaggaaaggaacgggttgagagccaaggcacaaggtgtggggcagaaaagagctagcacctggccccgtattttagatgacgacacactttgtgagtcctacggcttaaagtcttcattttcagaggggttgtcctgcttaaaccgtcttctatccccaacgcccgcatcctttagagagtagcccaataccaggcatccaagctttaatcccagtgactcagcagatagaggagggggccaggctgagtcaggaatggcaaaaggttcccagtctccagggaatcgaaactggaattactcctccatgatccagtccctgctggcctccaaaaaaccccgacatgccccaccccaaccctcgctttttgcgtttggtcctaaaattggctggctcagggatttgtaaactgggcgggaggcaagtttttgtgcccctccttcccttcttttcccgttgtcctcgagactgtttacaacagactggaaccctggttacaagagaaggaacccaagcgtccgggctgagcgtcctcgtcacggcttccaggaagccccccctcccccgccctaagcgagtgagtcacgggcgagcgggaggccgcaaccgtgccacagcagcctatggcccgccctgctcacgggaccagcccaggaaggccccttggccccagaaagcgctgcaccagggattccccccaaccccctctcctatgaggcaagccagtaagtagcctggcagaatctccctacctcgatacgcaacgcaccgtgtgagaacttcccagcatggtaattacactcctggcaatgataacccccatacacaagaactctttttcactggagatatccttgaaataacacttttgacttgggtgtggcggccatgcctgtaatcctaacactacttgggtggtggagactggaggatcgcaagttccaagccggctaaggagaccgactgaaaagcaaaaaccttacagatctccagagagttgagttaagactgcttgcattactagaaacccattcaacgttgaaggtggcccattctttcaatagagcagagcttcctccctaataaaagacgtaagctgttccaaccttgagttttcggaagcaaaacctcttaatttaaactgcagcttgggtaaatgtgctatccagccatgctagactagggggttggaagggcactgctgagctacagctcagagcggtccctacctggaccaactgtcttacaggttctgtgccttcaggtttaagtttttatttcgcctttctatctttctgtaacccacttcctcgcctagatttgtttcccagtcccctctccctgtcttactgtctccccactttgtaaatgtcatctttttttctttctataatagggttggctctaaggagtacataccaagtcgctgagacttcgttttacttcctccttaccttcgtggtttctctttttttttttttttttttttaaaagtaggacctggaactcaatcaatagcttagtctgacattgaacgcctgatcccccttcctccacctccaaatgccaagattacaaccatatgccactgtcttgtcttttgttttgtttttcaagacagggtttctcagccgagcatggtgacacacgcctttgatcccagcactccggaggcagaggcaggcggatttctgagttcaaggccagcctggtctacaaagtgagttccaggacagccagagctatacagagaaaccctgtctcgaaaaacaaaaacaacaaacaaacaaaaaagacagggtttctgtgtgtagtcctggctgttctggaactcactctgtagaccaggctagcctcgaactcatagaaatccgtctgcttctgccttccaagtgctgaaattaaaagtttgggccatcagtgatctggcatctttttacttcctaagaaaagggtctcaccaagttactcaagctgccctagaacccactgtatagtggagccaggccttgaactaccagtctcctgcctcagcctccctgaggggccggaatcacagtcctaaaccagcagatcctacttgtgaatgtctctcactgtctctttgtttttctctcggcttctggccatctctgtctcttccaacttgtctctccccgcccccgtctgtctcacacgcacacgccctcagtctctgcccttgtcaattgtccctagagccctgcccccacttctgccccagttctcttcccgactgccttccacctctgaaaaacactaggacgccccgctaccatcacctccagttggtcgtacacaaccctccctactaccccccgagaggggccggagctgcgggagggccaagttcaggcacattttgcatgctaaccagcagataggcggaaggggcctagtaccaggccggccgagctacgccgcgggggcgcgtcccggaagctctagtggccacgcccccaggccgccccataaaaggagaaagctcctgctgcgggccacagcctgacttctgcgaaccgacagtcggtctcttcaccaaggccattcgcgccaccatggatctctctgccatctacgaggtgagtacctgttagacagcatcccgggatccccgacgcaccaaacttaggcccgggacgcctccgtaccttctcagactagccctggctggctggaaatgagagagggagccagcgagcctagcgcctcggtccagataccggcgatccccttgggacgaaaagctggcacactgctgtcactcgcgtagggcggaagcggcatcacacctgtctagtgcccttcgctgcccatggcgcggtttggtggccaagcaggtgctaaggttgaggtagggggggagttgacagggtaagagttctagagagatctggcctcctgggtcagctttggccggctccttcaagttgtgaaacgagcgcccggtgggcggtcatatggggggggggggagtcctagaggcccaaagttggcgagcagcagtgtgctttgatttgggggggaaccctctctcgatcggggatactgggcttcctagatccttctggattaccttcagtcatgtggaaacactcaaatctctgtagtcaggttctccctggagtttgtgtgagccgggtggggctcaggccgagaacccacaaaccggactggcaagctcgtgaagtgctttacaacaggggcggggcgacgtcaccttaccttttctggtggcctaaccgaaccctgttcctctcagagcctccagtcgatgagccatgacctgtcatccgaccacggaggaaccgaatccctcggaggactttggaacataaactcggactccatcccgtctggggtcacctctcgcctgactggccgctccactagcctggtggagggccgaagctgtggctgggtacccccaccccctggttttgcacctttggctccccgcccaggccctgagctgtcaccctcacctacttcgcctactgcaactcccaccacctcctctcgatacaagaccgagctctgtcggacctactcagaaagcgggcgttgtcgctacggggccaagtgccagtttgctcacggcctgggtgaacttcgccaagccaatcgccaccccaagtacaaaacggaactctgccacaagttctacctccagggccgctgcccctatggctctcgatgccacttcatccacaaccccaccgaggacctagctctccctggccagccccatgtgctgcgacaaagcatcagcttctccggcttgccctcaggccgcagaagctcgccgccacctccaggcttttctggcccttccctgtcctcttgttccttttcgccttccagctccccaccgccccctggggatcttccactttccccttctgccttctctgctgcccctgggacccctgtgactcgaagagaccctaaccaggcctgttgcccctcctgccgaaggtctactacccccagcaccatctgggggcccttgggtggcctggctcggagcccatctgcccactctctgggatccgatcctgatgactacgccagcagcggcagcagcctgggggggtcagactcacctgtctttgaggcaggggtgtttgggcctccccagacccctgcacccccaaggcgtctccccatcttcaatcgtatctctgtctctgagtgacaagtgcctacctacccagtatggatcagctagatctcaaagagagggcagggactgctcattgctgtggggacctggggcactcctctaagttaataagtcccatcttctggacattccaagatgcaataacccatttccctggtgctgggctggggcaggtccctagtttgcaaattcagtgtttgggtggatccgttcctagggtacctaagatgtttgagggagacagttgacagttggtcttccaggccccaagtcttctgttgtttttgagataggagcttattatggtaccccaggctggctttgaactcaatataatcctgccttagccttttccaagttctggggttacaggtatgcaccagcccctctgcaactctggtctcctggaatcttaagtgctgtgaagagccggctcccacaatactatcctaatttttactagaccctgaagttcagtgtccggtggtcgaagcctctcctgagaatcctggtgctcaaatttccctcctaaagcaaatagccaaagccattgccaaatcccttctcccccaaccagtgggccctttatttatgacgactttatttattgtattaagattttatagtatttatatatattgggtcgtctactccgtttttctttttgtaatgttaaaactgatactgtattaagtatatgctataatatattaatatattgctaccgtacaagtctattttttggggggggttggaatttttaaataaaatcttgagtgtgaactgagatgaaatttgtctttttcgcggctcacagccttgtgatggtgggtaaactgacctccagacctttccgtgagcagtgctgcctgggggcgcttacctggcaggaagtgacgttaccagcccgggtgttcacctgaggaggcgtggcgagatgaggtcacccagtaggaacaaggagagctagttctggcgtaaggggtgctctggtcctgtccctccggctcttgacccagctcgggcaggaacgggatgtttccgtccccacagggccaaggaaggagggcggggtggggcggggcggcgaggacggaatgtgcgggaaggcgagcccaggcggccagggtcaggggtcacccaaagccgggggccctaggggactctgaaccctgcgcagacagcttgggcggacttgatagaggactttttttagtttaactttttttttaaataaagtcgaccctagctcaaactta

SEQ ID NO: 1875 - DNA, 1045 bp, Mus musculus
cgcatttccggcgttctagcggaggaaaatggctgcgccccagccacaggctgcagcggtttcctctgcgtctggtgtgtcaggcccgggttctgccgggggtccgggtccccagcaacagccacaaccgacccagttggtgggttctgcccagagcgggctcctgcagcagcagcagcaggacttcgatcctgtgcagcgctacaagatgctcatcccgcaactgaaggagagtctccagactttgatgaaggttgcagcccagaatctgattcagaacactaacattgacaatggacagaagagcagtgacgcacccttgcagcgctttgacaagtgtttggaggagttttacgcactctgtgatcagctggaactctgcttgcgcctggcccacgagtgcctttcacagagctgtgacagcgccaaacactctccaacactggtacccacagccacaaagccagatgcagtgcagccagacagtctgccctacccacagtacctggctgtcatcaaagcccagatcacctgtgccaaagacattcatactgccctgctggactgtgccaacaaggtcactggaaagactactgcaccctctactggccctgggggcagcctctgaggtctttcggggaggggcagagaatgaagtatggcctgaggcaaaacaggtggttcctgttgctgatttgtccgtgccacagtaatgcagctgaaaccagcagggggcagcagagtcttgcagacagcacagacctcaaaccccaccaccaccacaccactgttgcctccacccacgctgctccccaacctggagtggaccttcccactgggccgatgattacctctgttctggggactctgactccccacctggccctgggttagcactaactgagccctttagaccttcctcagtctgtcccagtgtatggatttccttttaacccacctttttccagtcctgccatcctatctcaatcagtccccttttgttgcccccaacacctaactgggatcgtattatacaagaggaacc

SEQ ID NO: 1876 - protein, 199 aa, Mus musculus
MAAPQPQAAAVSSASGVSGPGSAGGPGPQQQPQPTQLVGSAQSGLLQQQQQDFDPVQRYKMLIPQLKESLQTLMKVAAQNLIQNTNIDNGQKSSDAPLQRFDKCLEEFYALCDQLELCLRLAHECLSQSCDSAKHSPTLVPTATKPDAVQPDSLPYPQYLAVIKAQITCAKDIHTALLDCANKVTGKTTAPSTGPGGSL

SEQ ID NO: 1877 - DNA, 29215 bp, Homo sapiens
ctcatgtttcccaccctatgtcataatcttagtgtctgtgttgctctttgtcatcatctctttctttacaggatcattgaatactcaacttagaaggggttgaggggatgggacagttaaagtgtgagatttctgtggaggggagtcctgcccatcagcctactgggattctttcagatgccaggtgaccacacaggaaccagtggacttcacctcttagaacaggtgtttgaagtgagagggctgttttgacctctgcttacagaccatcctggagatgggagagcagaagttgggccaagtgcgggcacagtaactcacacctgtaatttcagcacttttgggaagctgaggcaagtagatcggtttgagaccagtctggacaacatggcgaaaccccatctgtacaaaaaaatacagaaattatctgggcatggtggcacacacccgtagtcccagctactcgggagggtgaggcaggaggatcgcttgagcccaggaggtcaaggctgtagtgagcagagattgtgccactgcactgcagccagggcgacagtgagaccccatctcaaaaagatgttgggacaagtgggcaaaaggaagattagagacttgctaaccgcaggtccctgccctgctcaacaagtgaggggttgactcctccacacggtgctggccactggggctgcagagacagataaggctcgtctggaatgggctgactctagagagagcatggatttgcagaattcatgtcataaactgccaagtcagtcaggagtcttacttgatgaggttgtgtagacagccatctgttgaggccgtgggaacccatccatcatgttcatcctagcacagggcttgacacacagtaggcatctgtaaatgatgttaaacaagcaggtggatgaaccgcaggaatgaacaagaaccattctctttaccagcatgctgtgtcccaggctttgtcagacagctctcctgcactgattgactcctcccaactgtatgtgtaaggacgctgatgttattcatcagtcagcaatctgagacaggtcttgcccaagttcaaaaaaaaaattcttttttttaaggagagacaattgggtgatctgatacgacatgagctcagggttcagagggaacagtgatgagagatgagggtggagatgggagctgggtcgtctaaatccaggtaaacagctcggactttgtcctgatggcagtgaggagtcagggaagggtttaagcagtgtagtgagggaggtcaggtctgcccagggaggtgggtggtttcccagatgcccgaataggaggcccttttgagaagtgtggtttgaggacaagtcccatggtggttgtcctactttgcccccacctgcctggcctgcctggattgaatcctgcccagaggagcaggtccaagtggggacaggaagggttttgatttagcttttgcaccaagtacagagcaggtcttcaatcagggagccttgggggctgcccagtgtccagggcagatgcccagactgtgctcaagacagtatgcagtctgtgtccagagtagtcacagcaggctgtgtgtggcctccaggagctccttcagtttcaattccactctctgcaagtcgggctttttctgtattgccaagcctctgccattgccattgtctcctctgcctgttgtgtgacacgctcgcctctctccctgtccacctcctcccgttcttccctctccccctccatctctcttgctcccttcccataccagcatcctttgtcatcccagctgtcttcacctgagtccagttggtccttaccacccccattctcctctctcccacccagactgcccggttcctgggcctgacctggagatcaatcccactctggagtctctgtgtctgagcatgacagaacacgccttgggtggtgagcatttcctctttccctgacccagctcccacctacccagcgtctctgcctctgaactgagcaactcagagtcatcctgaggggtccccaggggaggccagactccagggagggcctgactgggatgacaggctacctgagtgccttttcttgggcctccctccagctcctgatcttcctcccttcctccctttcttaccacagatgggacagacaaaacctccaccatctgacgggacccacagcccagcgcacccataggctccctgggcggcgggcgggggccaacccccaacgggcttctccgcgacagcgagagggtgggctggctcagctatatattctaatatttttctactctcttaccctcttaacttttgtttaacattggcacatgccttgctcactcccaggcccgtcgagggatctctgctgaggcccggggagttgggggcagccaggataaagggggcagggactggccagactgcctgcctctctcctttccttcctcatccccacctggtcccatcccacccctgcctcctccagaccgctgaccacctgcctctccccaagggagcagactccccagagacaaactgaccactaccttgtggagcctgctcagaaacatttgacatttggggtgacgcgcagggcagagaacctgccctccagaatgttattgagaggagctggggagaaggaaggggagcaaggagaggaagctctctctcctctccctgcttccccttcaccattccccacattctgcaaggacaggagccaccttcctctctctcacctcccctggccctgttcaccagaggttctctatgattaatttcttaggcctatttaagatacatatttatatagttcttaacggtttttctctgatcatttcctctcatttttagaatccccaggtctctctcagccaagacagtggcagggagagcctgaactttatgaggggagagggcagagccccctcctccagaccctcaagctctaacccattttcctccagccctggctacccggatgaagaggttggaggtgggcagccagggtagccagtgaggtcaggaagtctgttgccttaacgtccccttccccacgaacacacacccttctccgctcccaggtctggttggtgagacttgggagtcaggaataagggaaaggggattgtttggtttttgggtttttccctaagcccctcccttttctttcagcctttttccttcccccattatgtcatgacctcacttaagtggaacactatatcataacccagagattcgtcccagccccagagtccgacagactgtctggtccctattcctaatgaggggttgtgttggggcccaggtggagggaggggatttgggggttcagactgcggggaagccagggtctccctcttcaacgccctcctccccctcaacccaccttcccaactgggacattctcaagcttttcacaccgaaaaggaaaaaaaatgttatttttagatacattttatgaataacttttgttatgaatatggctggtaaccattgtgtatgttattaaagatacaaaatgttgggaaaaaaacaaaaaaaccaaaaaaaaaaaaaattttaaaaccaccaccctccctgcactatcaccccattccccagaccttcttgcccccgccctcctggtctgtggacttccctctgctctgagcccagggagggggaagaagccagggggtagggtggccctgggaacctggctctgggtccccacttcctctcccagtgccgggctgggtggggtgtcaggtttatttatgtacctcttgcacactcatcaacctatgcaagtcccccaccccggccctccatgtttctgtgcctttgctcatcccctcaatctcccagggcttctccagtccccctcccactagctgcaggaagtgggatggatgggccacctcgtttggaatcagcagggtgtccctctcatgggaccctcccctctccccagcctgtcctgtcttgttcactctccatcagggtgagctgactgtgcctggcactgggaggtggtgagggacaccgtctcacacacacagggaggcaagagctgccccccaccccacctgacagcagagtgtgcaggacgcaggcggccccactctgatgggcaggaccctgaccctctcccgctccagccccctccccaggccctcctccatgatttcaccctccctacccacttctgtccccggccccactggcagaatcagctttgagtaactgtacagtttttctcgctgttggagaagacttatttgttggagtttcacttgtttaatggtctgggcttattttggaaaaaaaaaaaacaaacaaaaaaaacgaattctgaccttcgttgtgctacattttgtgggaaaccattggccctgcctctggcctgtgtttctaagcctcaagccaagatccttgagcacctgggggttgcgggaggtatgtgctgggctgaatgacatcataggggctgggaggggaagtaaagagaagttgactttattaacagcaaaggtttgggggtggggaacaaacaagtgaaaggctcacaaacagaccactagaaaagtgctttgctgctcacaataatggtgtctgaaccagccctgaatgccctgggactcagtcactgtcactatcagcttcactggaatcagaagctgcagcttcactgccatcctcctgggccgagtgctcgctgccactggggaagggactggcgctgcggctgtggctccggctccgctggccacccccattgctgccgctgtctgaatcattgtcactgccaccttgggcctgtcctctgtcctcatcatcagagtcggcatcgtcctcagaatcagcatcactgccaaagatctcctctttgtcacgggcagcccgggcctcatcctcgctgctctcgtcctcaccactgccactcttgtcactggcctcgtccctgtcaccttcctcccgttcactctcgctgcccgagtgctcatcttcactgccctccttctcactgctgctgcccttctcctgctcctcatctggaagggagtggagagagatgaaacccacttttccaccctcccagggctcccagagtctggcctgtccagatttacctgagcccccagcttctttctcttctgtctccatctcctcttcctcttcctcctccggttcgtggttttctagctgggccttccgtgcctcctggaagcagcaagattggaatgaggggaaggagggtgttctgctgggtttttgtccccctcctcacctacaaccaccaccctccctgccatgggtgccctgagccagtggtgcttgttacctgagcttccagttccttctcattcatgtcccgatgtttgaccacaagcagggcgttggtgcctgactgaaccccagccttggcccggcgcttactaaggcggaccctgcagggggtgaatttgggagagagaagtggaagatgcagttaaagacacacctcccacttccccgccccccagtgaggggtctggtctgacttggttccccatcaatacttagagtaaatgggaataaatacagattgaataagggcagctaagctcaaggtattgagggcaggggaaaggaaggatggctcccatggcaccagtttggttgccctacactgtgtgtgtgtgttatacggtgtatttacataaatacgggcatgggccatttaacagggacacattctgagatatacatcatgtgaacatcatacagtactcttacacaaacgtacatagtatagcctactacatacctaggctgtaatggtgtagcctattgctcctaggctacaaggttgtacagcatgtgactgtactgaatactgcaggcaattgtaatacaatagtaagtatttgtgtatctaaacatagaaaaggtatagtaaagatacggtattctatcttaagggaccaccataagcagtccattgttgactgaaacatgcagtgcattactgtatgtgtcagttagttaccaacactttgagaaaccaggagatgtcaaatcatttggatttggggcttttggaagataggaatttctggccccacagcacagcaacagtgggctggaagtgaatagtgccctccatggttgcccagaactccaggtcactcagatgctaccagccactgctcttttacatttcctgcctggcctatggggtcacagttcttgtaatctctgctttaaacagaaactcaagacttcccaactctacaccagaggtgctggcatagcagtaaactttgagccataagggaagagttttggagtcacatttttgaacatgggtttaagcatttcatttaaaacattcatgctaattttatatattactccatactttggcaatgtttactttcacatgaagtctgttactaatactgggaaacttggccctctgccttgcgcaaaggctctaaatgtctcctgcattaagatattctggctgggcgtggtggctcacacctgtaatcccagcactttgggaggccgaggcaggcagatcacctgaggtcaggagttcaagaccagcctggccagcatggtgaaaccccatctctattaaaaatacaaaaaaaattagctggccatgctggcacacgcctgtgatgccagctactcaggaggctgaggcaggagaatcacttgaacccaggaagcggaggttgcagtgggctgagatcacaccactgcactctggcctgggcaacagagcgagactccatctcaaaaaaaaagattttttttctggctcctcctgttagaaccaagtccagctcatgtgcatgaccagacatctgctgctcttgtttaccaatgcatatgacaaattcttaggtacaaatgacctccaaggtggctcttgcatgccccagggtcttaagaagcacagatccaggctaatcagataggagtgtgctgagtacctggtttccaactcattgtagtaaaccccgtcaccctctcggaagatgaagaagtagttttcctcatagcccttgctagctttgttcttcacgttccagttgtactcccgagcaattttgtagtcatacctgaagatgagggcacaggttcagccccatttcttccctatcccaatccccaaaacttcccaatccccaaaacttaaccgcaacccacgcacacatcatctggtgcatagtccatctcctcctcctggtcccgctttcgtttcttcaacgtctcttctacaggcaggaaataggccacaaactggttcccttcctcatccatcatgcccctggttgggggaaaaggagtagcaatgaagtgtgaggacaagaggcagcaaggagcaggccaaggtggacagcaggaccacctacctaatcatggcctgagacatcatctccaacgcagctgcaccactcgtgtccttgggggctgggtctgagtcaaagatcacctgagcacatggattgatccacatctagggagatggaggcactggggttagatgggaacaggcacaaataggctgtccctttctacctcccaccttgggcctgaccttaaagtctgggaagacaggcatgacctccaccggtgtgactcggggtttgctgtaatgctgtgagatctggtggaacaaaaacaaggtgaggaggagctctgcagccgcacccttgcctctccccatcccagtccctcaattactgatttctgggcatcctcaaaagtcttctcaatggctgtgatctggctatccctgtctttgtatatttcttcctcggtaaactgctgcttcacagaaaccccaatcctaggaatgaagaaaaaggtccttaggggccactggacacacctaatatctccaccttccctctcttcctgttagtaacttacttgacctcaggcttctcattggagatgccataacggttgaactcagtggagatgtactctgtctttcgcatccatggcaccaccttcgcgtgctgctgggatctggggtgggaaatcaggtatctcaggaccccactgccctcctgcttgtagggcccacctgagccagtctccagtacccatttgctacccactcacctcttggagctggtgggggcctgaatctcctcttccaaaagtttctcatcagctggatctagaagaactagaggagagcggggggcaggaggaccatgagggaggcccaggcctgagcctttgctgacctagagcagaccctccctgtctccccacacaccattggggtcgatgcggtaggtgtcaggattgatgagatcgatggtgacccccaggtctggctcagtcaggaggtcatgtttgtgctgtttctccaaggaagtggctttgtactggacgaacctgggtggggaaacacctattgtggtgtttggattccagcttcacccctcacagccctgcttcccagaggcggagcttctctggggaggaactcagaatgaagtgtcccccatggcagagtctgaaagctggctccccagtgggaagggacttggacactgcttgctccattaacaattgagcagctactactatgtgctagggtaggtactgtgctaggccctgagcagacagcagccaacgagacaagcagtccctgccttcaaggaactcatacctgagtagttttcccattccttagtctcacctgttctggtcgaaggggtaggtgatgaacttggggtcgaaggggatatcagggaggctattgcagtacttgactcggcagaccactccagacctaggaacattagtggctcaaaagtgggcccccgctgccccacctctgctcccagccccactgccccaccgctcctgggaaagcacagtggggctcacctctcaggcagagtccggtgggaattgggcctagtggagaagaaagaaacagtgataggtggagaggacgggattgacaggagaatgaaaaaggcttccccaacctttcaaaaggtaggaggggtgacaaatgctggtttctttgggtggtggtgtggggagtgtccaaatgctttaatggaaggagacaaatgttcaatttatttaggaagaaatgcccccaaaagctttaatgaacaaggccaagtgctcaatcccttttgcaggagatggcttcaagtgctttaataaagaaccatgtactcaatcgtcttcggaagaggggtctccaaacggttgactggagggatcccttctggagggagtctccaaaagcctaatccctgaactgcacggcggggaggaggggaacacctgaatctcagaaggaacccgcccccttcgtcaaaggtgagcgcttcatgacgtcacgggcagacctgggggctggtgacgttgttcagcagaaaccctctcccgatcccccgccttgctgcaacagaaaagcgtggcgcctacctgtggccatcctcccgctgggcctgggtctggatggtgggcgccatagcgacgaggcgacggcagcccggacggggtcctagcgggaccgaagggggacgcagaggggcgtgccgacttcaggggacgcctgatccgaggaaggcccagcttggcgccgctccccgcggaaagtgggttgagatgaggtgggcgggcgagaagagctccagcgagactcaggtgaacgcgcaggcagcaccggggacggactcgaagctccggttccaccaactgccgccaagacgctgaggacccaacgggtctcctcaggccgcgacgccttcggggaaatgaagtccggctcggaaccacacacggattggcgagcgtctgggtgaagggcggagcgagggagagaggtgcttctgtgattggtggagagatatctcagtctggacgcagatttgagagtgacgtaacgttggggcacctccttcccctccattggcttaattgcctagggggcgggactaactagcaaacggggactagaaatagggatgctgaaaagcaacggggagagacgcagtcgtaacgcacttccggcggtctacgcgaggaagatggctgcatcccagcagcaagcttcagcggcttcctcagctgctggtgtatcgggtcctagttcggctggcggcccgggtccccagcagcagccgcaaccgccagcacaactggtgggccctgcccagagcggcctcctgcagcaacagcaacaggacttcgatcctgtgcagcgttataagatgctcatcccgcagctgaaggagagtctacaggtgattggccttaagcagcgagaagcaaactggatttggtagtctagaggggcaggccgagggccaggttagtcggagagagcgctaagcagaaagaggaatagaacctgctgttttggcctggctggtgcacgcctgtgttcccagcactttgggaggccgaggcgggcggatcacttgaggtcaggagttcaagaccagcctggtgaaacctcgtctctactaaaaatacaaaaattagccgggcatggtggcgcgcgcctgtaattacagctactcgggaagctgaggcaggagaatcgcttgaacccaggaggcggaggttgcagtgagccgacatcgtgccattgcactccagcctgggcaacagagcgagactccgtcaaaaaaataaataaataaataaataaaactgttgttttctgcgagacctaagcgaagctcggcagagatgggatcagcgctgatgctgaggctgggactggccggagcttgagtgaggggttgtttaaaggagaaactgggctctggtcgttaaagcctgaggagagtactggcttatacggagattctgcccttgattgataggtgagggaggacccttaggttattggcgagaagctcaggtgagagcgggcctctgggaggatggagtggtgacagctataggaatggaaacgaatattactttggaaagtcaggagggaaggtgccagttgaaaagaaaacctgagactgagtgatctcaagaaagagtgtagatctgccagaggtattcccttttgtttttccatttcccacgtgttttgtttttgttttgactagaccttgatgaaggttgcggcccaaaacttgattcagaacactaacatcgacaatggacagtgagtgcagccccctttaccaggatattctattgccttcccagtctttgaaattcatctttccttctcctgctccccgcccacctcaccttctatatttactttttttttttttttttttttgagacagggtctccctctgtcacccaggctggactacagtggcacgatcttggctcattgcagccttgaacacctgagttaggagatcctcttgcctcagcctcccaagtagccaggactacagacatggctacagactacagatgcctggctaatttgtaagatttttttatagagacggagtcttgctatgtttcccaggctggtctcaaactcctggcctctagccatcccctcagcctcacgaatcacttctcctattttattttatttttgttgttgttttgtagagacagggtcttgccacgttgtccaggctggtctcaaactcctgggttcaaacagtccttccaccttggcctcccaaagtgctgggatgacaggcatgaaccatcatgcccagccttttccttttctttctttctttctttcttttcttttttttttttttttttttttttttttttgagacagagtcttgctctgtcgcccaggctggagtgcagtggtgtagtctcagctcactgcaacctctgcctcccgggttcaaatgattctcctgcctcggcctcccaagtagctgggactacaggcgcgtgccagcacatctggctaatttttgtatttttagtagagatggggtttcaccatgttgtccaggctggtctcgaactcctgacctcaggtgatctgctcgcctcggactcccaaagtgctgggattacaggcgtgagccaccgtgcccagcctccttttctttttttttgaacccctccggttttcaaccactacttcagatctcctggacctgtacctggtttcctgatggacacttggttgggtagatactggtgtcccaaagattagaaatcaattcttcagacatccttttttccttgtctgtagaaagagcagtgatggacccatacagcgctttgacaagtgcctggaagagttctatgcactctgtgaccagctggagctgtgcctggtaagaagccttctggacacggggtaacaacagccgtgtcccagtctctggggtcttcagaaacagtcagtcagtcaactcacactcaactggggacctcctgtgggccagacctgtgcttccaccaacactgaggacacagggttgctctgatccttgcccttgcagagctttcagttgagtggaataataagcacacccctaaacagtgacagctcagagtggtcagtgctgtgatgggagaagcctaggccagagtggttagggttatgattgaggaggcacaggcagagggatcagggctgggatggggaaatctcagtgtggaagcccagggtggggatagggagagagtggcttagggaaggctactgctagacagcacatctgaccaagtctgaaacaaagaagagaagaggggcaggagttgagaggagggtaagtgactaagaatacagcctctggagtcagatgcaccatcaatctctacctctgacctctgggttcctccttaggaaaacggagtttccaggaaaacttagattatgcgtgtaaactgcttaacatgataccaggcatatggcaaatgtgtactgtagtatcatcattattttggactggtttttttggtgggggggtatgggggaggacagtctcaccatcacccaggctggagtgcagtggcacgatctaggctcactgcaatctcctcctcccagtttcaagcgattctggtgcctcagcctcccaagtaactgggactataggcataccacgcctggctaatttttgtatttttagtagagatggggtttcaccattttggccaggctggtcttgaactcctggcctcaagtgatccacccgcctcagtctcctaaagtgctaggattacaagcatgagccactgcacccggccttttttttttttttttttttttttttgagacagagtctcactctgtcgccaggctagagtacagtggcgcgacttcagctcactgcaaccttggcctcccaggttcaagcgattctcttgcctcagcctcctgagtagctgggactacaggcacgcaccaccacgcccagcaaatttttgtatttttagtagagatggggtttcaccatgttggccaggatggtcttgatctcttgaccttgtgatccacccacctcaccctcccaaagtgctgggattacaggcgtgagctaccacacccggctttttttttttttcctccaagtcagagtctcactgtgtcgcccaggctggactgcagtggcacagtctcggctcactgcagcctctacttcctgggctgaagtgatcctcccacctcaacctcccaagtagctgggactacaggcatgcactgccatgcctggctaatttttgtattttttgtagagacggggttttgccatgttgctcaggccagtcttgaactcctggggtcaagcaattcacccacctcagcctcccaagcgctgggattacagaccgctgtgccgggcctggcctgggttttgaaggaaaagtgagaggttgagaagcttggtagtgtcagaaccatgttccaaacagagggaataacatttgctttaaatttgttttaggaacatcaagtaattcattctggctgaggtgtggtaggcatagggcttgttggattttgaatataatcctaagggcactggggaagcatggagggtttcaagcagggaagaatatggacctatctgctttttaggaatatacctctggctgacaaatgaggggaggttgaaccctggaggcaggagcccaagggcgcagccatggcaggatccaaggacgcctggactgggctccaccagggcggggtcgtgaggaaatggggaagactgggggaacttgagaggcttcatgtgcagggctttgtatacgggccacaggaccggtgtgctggaaggagataaagtttctaggatgaggcccaggactctggtttataatggaggactgtcactgggcccggtgattcatgcctgtaatcccagcactttgggaggccgaggcaggcggatcacaaggtcaggagatcgagaccatcctggctaacacgatgaaaccccgtctctactaaaaatacaaaaattagctgggcgtggtggcaggcgcctgcagtcccagctactagggaggctgaggcaggagaatggcatgaacccgggaggcagagcttgcagtgagccgagatcgcaccactgcactccagcctgggtgacagagcgagactccgtctcaaaaaaaaaaaaaggaggactgtccccgaaacagggacctaggagaagcagttttggggagtacaagggccctacaaatgtcagggggaggccagcgacagtgtgggcgccattagtgcagaggtggaaactgagtggtgtgcgtgggtgtgacagccctgggagggcttgaacagtgagagaagacagggcctaggaatggctgcacttacgtcttaggtagtgtaagaagtacctagagctggtcaggcgcggtggcttgtgcctgtaactccagcactttgggagcctgaggcgggcagatcacaaggtcaggagttcaagaccagcctggccaacatggcaaaaccctgtctctactaaaaatacaaaaattagccaggcatggtggcgtgcacctgaaatcccagctacttggatgagacaagagaatctcttgaacccgggaggtggaggttgcagtgaaccaagatggcgccactgcactccagcctgggtaacagagcgagactgtctccaaaaaaaaaggggccgggcacaagtggctcatgcctgtaatcccaacactttgggatgccaaggcgggtagatcacgaggtcaggagttcgagaccagcctggccaatatggtgaaatcccgtctctactaaaaatacaaaaattagccaggcttggtggcatgcacctgaagtgccagctcctctggaggctgaggcagaagaatcacttgaacccaggaggcagaggttgcagtgagccaagatcgtgctactgcactccagcctgggcaacagagcgagattccacctcaaaagaaaaaaaaaaaaggctgggcgcggtggctcatgcctgtaattccagcactttgggaggctgaggcgggtcggtcacctgaggtcatgagtttgagaccagcatggccaatgtggtgaaaccttgtctctactaaaaataaaaaaaaaattagccgggtgtggtggcgggtgcctgtaatcccagctactcgggaggctgaggcaggagaatcacttgaacctgggaggcggaggttgcagtgagctgagatcgtgccattgcactccagcctgggcaacaaaaccgaaactccatctcaaaaaaaaaaaagaaagaaagtagtacctagagcagccagagaagcaggcagaaaaccaggggtgagatgccactgccaacaccaggcctggagccagggcagtaacaatgatagtagctaacagttcttggcactttaaacagtgtgccaggacccgtgcctgtgtctcatacacctgctctcactgttctcaccttatgaggtaggaagaggtggttattaaacccgttttccaaaggaggaaactgaggctcagagaagagtagccgccatgcccccaggttccccagcaaatgactggcagggccaacctctgactctaagacctgggaaatccagaggccaagccgacaacccccagctggcccttggggtggggtagaatgacctcgggtggagctgatgctgtccccttgcctgcctgtccacagcgcctggcgcatgagtgcctgtcacagagttgtgacagtgccaagcactctccaacgttggtgcccacagccaccaagcccgacgcagtgcagcctgacagcctcccctacccacagtacctggcggtcatcaaagcccagatttcctgtgccaaggacattcacaccgccctgctggactgtgccaacaaggtcacgggcaagacacccgcaccacctgctggccctgggggcactctgtgaagtgggggacagggagtggggcaggcagtggttggtgggtggtgtgcaaagggaatgaagagcgtcctgggcctaaacacagcagcctcctctcttcctgcctgagcaccgcagcgggagccagcagggggcagcagaggccaacagggagctcgcaggccgggcccctgcgtccctgccccttcttcctgctccccctcctagcctagggtagactttgaactgtgtgtgttgatgacttctctgttccacaggccctcccccattcttgcctgggtgtggagccctggctgtcccctctccctcagtccttcctgactgtctccagctgggaggtggtctctgtgtgccactcctctgtgtctctattacagttgtgtctctctcatcctgtctctttttcccttgtttctctgttcctgttaatgtgtttctccccatggtcctatttctctcactctgacctctctctcttagtcccctttagctgtcttctatccccagctcctaactgggactctgtgtctatgcagggggccagcacccctgggttatctggggctaagggaagggacttcatttccaggggccacagccaagcccagagtcccccagcggctcgcatgtcagcccagaccccagggtccttggcctaggagaggagcagtggaggggcccaggctctgagctccacaggtctgagctgggagcaactcaggcccccacccaagcctgcgtcagcggaacttgagtgaggggcgttgtgcaatttgtggcaaggctggcccagctggatgcctgggtcccagtatttttagccccaaaggagaagtgaaaaggccccagccggggtgaatcatcagtcctggggaagaacccaggcgcctgagccccagctccgggaagcaggcactggggagggggcttcaaggagggagtgccccctcagactccctgcttccctggaagcttcaggaagctcagcctcagccttcaggcctgagcaagtgcagggcggagctaccagcccaggctcagatgttggggtgtgaaagcctcaagtgactcagcctggttggagaactgccccacccagtatcttctgtgccatggttcccacattcgcactccatggcctcctgtcctggaccccacgtctgcaaggaaaccctaggaccatggatacctctgtgattcacgctgagcccaagtccccacactggaaaactgggaaatggccagctgtgtgtcccaggaaattcctccccttattcttccttgaagtgcccgagcatgtagggcaagaaggaaggctgaagcgctgtccctaggaggaatttctccttcagggaagcctcagttttgcccatttatctaattgaatcagttttttacccaatcccccgattttgtaggataatctcccttatctaaagtcaactgattatggactttaatcacatctacaaaacacttccatggcgacagctagatgagtgtttgaataactgggactgtagcccgtccaagttgacacataaaactgaccatcgggccgggggcggtggctcacgcctgtaatcccaacactttgggagcccgaggcgggcggatcacaaggtcaggagttcgagaccagcctggccaacacggtgaaaccccgactctactaaaaatacaaaaaattagctgggtgtggtggcacacacctgtagtcccagctactcgggaggctgaggcaggagaatcgtttgaacctgggaggcagaggttgcagtgagccaagatcacactattgcactccagcctgggcgacagggcaagactctgtctcaaaaaaaataaaaaactgaccatctagtccttgtcatctgggcaccctcacacatctccttaaccacacttaatctccaaataagtacgataacatagtcatagtcccacccaacatgatgcagttatcttgcatacaactgaagacaactaaccctttccccaacagagcccaccagcagtggtggagatgtcggtccatgagcgcacacacaagactgagggactgtcggccctcccaggtggtgtcaacacaacatcacacacaggtgggggggcctgatagcccagcacccatgatacagggcctaccaatgcttaaaaccacacccagggagcccacagaggcactcagtgggtggtggggtgatggatacacatctatcaggcacagggcggaggtgggcaccactgagttgcactcagcaaacacattgggtatcttgtgcccaaggcctgtatttgtggagctgatgttctagtgagagacagtaaatgtgacaaaagtaaaatatatcagatggtgagaaaacagaaaaatgagatcagaagtggagatgttggggccaggcacagtggcccaggcctgtaatcccatcactttgggaggtgcaggcaggcagatggcttgagcccaggaattcaagaccagtccgagcaacatagcaaaagcccttatctgcaaaaaattcaaaaattagccaggtgtggtggtgcgtgcccaggttcccaggtactcggaggctgagaggtgggaggatgccttgagcttgagaggttgaagctgcagtgagctgtgatcgcaccactgcactccagcttggttcatggagaccctgtttttttaaaaaaagaagtggaggtgtttacaccagcaaaatactcattttttaagtgtaattaagttgaagatcaaaaaatggaaatgtataattaaatcatacttagcaaatctaacacatgaaatgtaacatctgcatatggagaatcgtgttactttattgaaaaacattaaaagtttgagaacttaagttggattgtggtttcgtgagcattcattatggtttatatatgttccatgtatttattattaaatagatgacaagggttttcttattcttgtttatatatgtttgagaccagtctcactctgtcgcccaggctggagtgcagtgacgccatctcggctcactgcaacctccgcctcctgggttcacgtgattctgctgcctcagcctcccaactagctgggattacaggcgtgcatcaccacacctggctaatttttgtatttttagtagagacggggtttcaccatgttggccaggctggtcttgagcttctgacctcaagtgatctgcccgcctcagtctcccaaagtgctgggattacaggcacaggcacgagccactgcagtgggccttttaatttttgttttaatccttgacagaggtcaaggaaggcctcactgagaaggcgatattagagcagccccgaaggagagggaatgagcttggggacatccacacatccaggcaagagtgctccagacagagggaactgcaagtgccagggacctgggacaggaatgtgctgggatttatggaacacataaaaaggaggcttgggcacaatgagggagcagggataggagaggaaatccagacaggtcacagagggccttggtgaggacttgggtttgctagataactaaacccagagggagactacacagtctggtgcacactgcatgctccagggacggggtgtacgtgaggtgcacagccaccacaaaacagaccgtggggactccagcacacagcatgtctgccccactgcagagctaacccaccatcctacaatcatggtgcccccagggaccccatcccattgacagtcccacaaacatactttcagggagcaacccagccacatgaatacacaaacaaccctctaaccaccactttaccagataagctatctctcaccccatcgcagactttgcccatcacaggctgactcagccctgtccttagcccagcactatcagaagcagcctcatcggcgctgccccagcttctcaggtactcatgtctgcacgtctgctctgcccacagaggccgacacaagaacagtgacatggaggggggagctcgccagctactctccccatcacgcaggctgtagacgtcagaaaccaaagttcatcggtttctctgccttgtgactcgggccacaggaactgcattcagacgccggcctgctgtggtctgcacatgcagtctcagacacccacgacaaaggacgtggacatatgtgaacacttcacacacccagggactacacacactgagccacaaaggccttgcacacggccacagctgcagagtcacagatgctgacacagcttcaaatgtgtgtgccgggtgtggtggcacgtgcctttagtcccaactacctgggaggctgaagtggaaggatcgattcagcctgggaggtcgaggctgcactccagcctgggcaacagagcgagaccctgtgtcaaagcaacacacacacacaaagttgtgtgtgcacacagcctcagtcacaggggagggcagtcattccctcacccaggcacctgcgcggagttacacacacttagtcactgcagatcccacagtggctcagagctacgcacagatatgcaggtggggatgaaaatctcatgttcttaagaatgccgcctcagagacaaattgcagtacagttacaacagagcatccaccccacacccagagatggccaaagtacacacggtacagtcgatcacacaggcggtttcacacattgattcacacagccaagtcatgcgggattgtatgcacacagccttctcacaggaaactgggcacactcgtgtccctcacgttcccccactgcatacccaggcacacaggctctcgcagccccagatgccaaggcgcacacctttgcacccgcaagcacacatactgttcacacaaccgggtacacatgacggctagcccaggcccgccgcccacgcagtcgcaggccagggtacacacggccagcgccgcccttggccacgcccgctcaggcccaggcaatcgcgccaggcgcacacacggcgcgagcacacgtgccgcgggtacacgatccccagctcgcccgcgcactcggccagctctcacacccccgcgtttcccgtccccgcttgtttttctggaaactctgctctcccctcccctccccctaggccggaagtgttggctgtatttttagcctctctggtttccgcccctttccttctttccccgcccgcccaggactggccccagcgccccgcggggggaccccggccatccccttccccaccgtcattccagaggggattcccggccgccgctggggccgcggattttcccgctggctacgtagggagcagggaggagtcctgccatgaacttccttctggcctgggacgcccgagatctgaggggagggctgagggcctggtctcctggatctgatcgaggacaggctgggggtctcccgggtctgagggaggaggagttaggggcctgaaccgctggatctgagggaggaggagatgggggcctggacccctgggtctgagggaggaggggctggggtctcgggggacctgaggatctgagggaggaggggctggaggcctggacccctgggtctgagggagggggggttgggagtctcccgggtctgaaggaggaggagttaggggcctggacccctggatctgagggaggaggagctgggggcctggacccctggttccgagggaggaggggctgggggcctggacccctggatccgagggaggggggtgctgggggcctggagtcctgggtctgagggaggaggggctggggacccagggccctgggttactgcgagggaggagggactgaggccttggctcctgggtcccccaggtctgtgggtttggggaggtggaggaccagtccttctgcgagcaaagcatccccctcctttgagagtggccctatcccaaaagtcctgactcttggggccgatgactcagcagatgggagagaggagggggacagcctgactcagggatgggaaatgctcccggtctccagggagtagaaactggaatccctcctccaggattgatcgcagcccgagctgagccgggctccgcgaacccaaggatgcccccaacccccctttccccgcctcaatcctttaagctgcgtaaggatttggagatcggcctagaggcgggtcccaggtccccctcctcccccctttttccccgttgtcctcaaggctctgtttacaggagacgggagccctggttacaggagaggaacccgagtgtccgggctgaacctcctcgtcacggcttccaggaagcccccactcccccgccccttgcgagtgagtcacgggcgagcaggaggccacaaccgtgccagagccgcccgcggcccgcccagctcacgagaccggcccgggaaggcccctcagcaagcgccgcaccagggattcccccccgccgctctcggacgaagcaggtcgacgtggagcctggcagaatctccccaccttaatacaagcccgcagcctgcaagaatgaactttccaccattataactgcgcactgtggcaatgatttctacccccacattttcactcagggcatccagctctccagcaccccttagaaaatagtcttcctagatcttaagagggttttcacttagggcgaccctttgataacaaaagatgtgccagtgtggggaatgatccttgaaaatgtagtctgggcggggtgcggtggctcacacctgtaatcccagcactttaagaggccgaggcaggtggatcacctgaggtcaggagttcgtgaccagcctgactaacatggtgaaacccccgtctctactaaaaatacaaaaattagctgggcgtggtggccggcgcctgtaatcccagctactcgggaggctgaggcaggagaatcacgtgaacccgggaggcagaggctgcagtgagctgagaccgcgccattgcactccagcctgggcaacaaaaacgaaactccatctcaaaaaagaaaaaaaaaaggaggcccggccggcttggtggctcacacctgtaatcccaccactttgggaggccgaggcgggttgatcacggaggtcaggagatcgagaccaccctggctaacacggtgaaaccccgtctctactaaaaatacaaaaaattagccaggcgtggtggtgggtgcctgtagtcccagctgctcgggaggctgaggcaggagaatgcgtgaacccgggaggtggagcttgcagtgagccgacatcgcgccattgcactccagcctgggtgaaagagcgcgactccgtctcaaaaaaaaaaaaggaaaatgtagtctgaaggcacaccccactataagagacccatccagccatcaactgaggatgaccttttttttttttttgaaagcttttttcaatcaatgcaaccatcagttatagtgaaagacctccaccttgccaatcttgagttttctcagagggcaaacctcgacataatttcagaccctagtatgaggcctgtgccatttgctagctcgaactaggagagtaactttatttttccccctgagagggagtctcgctctgtggcccaggctggagtgcagtcgcctgatctcggctcattgcaacctctgcctcctgggttcaagcgactctcccaccccagcctgctccctccccgcccccgagtagcgggaccacagggtgtgcgccaccacactcagctaatttttgcatttttgtagaaatggggattcgccgtgttgcccaggctagtctcagactccgagctctagtgatccgcctgccttgggcgcccaaagtgctaggactacaggtgtgagccgggcaggagagtaacttcactttggtttcctcctgccttaaatgggcataccacctggcattaggattaatgtgcgtaaagtacttagaactcagcccaggtgagttctccttaactcagcctagaagagatcatccgcccgagggtgagggggctagagccgccctgtgaattgggaaaggaggccccttttcagccttgccaggtatcctggaccccacccaacccactcactcacccacccaaccccagcaagtggggagagggagagcagtccaggtctccttatctgtctgggctgtttaggagtgagaccacacaaggcaggcagttctcagagaattcccctccaaggcctgctggctctttcttggcactttgctctgcagatttctttccgtaagtgcttatttctcacagtctttctcctttttgtccagtttctttttctttttaatttttttaaatagtattttttgtagacatgggatctcactgttgcccaggctgatcttgaactcctgatctcaggtaatccacctgcctcatcctctgaaagtactgggattggccgggcttggtggctcacacctgtaattccagctctttgggaggcggaggtgggaggatcgcttgagccccggagctggagattagcctgggcaacatagggaaaccccgtctttcaaaaaaaaaaaaagaagaagaaaaaggaaagaaaaacacaaaaagtgctgggatcacaggtgtgagccactgcgctcagcccctttctgtttctttttgtgatcctcccaaccctcttctccctctgaatctgtctctgggactgtctctgtctccccgtcttccctcccttcctcaccctgtctatctctctctgtatgtctcttggtgtgtgtgtctctctcgatgtttttctctctgcctgtctgcctgtctgtacccctctgcgtctctccccgcccccatccgtctgtgtcgcacgcgcacccccatcgggcttctgctcttgtcaattgcccctggggccctgcccccacctccgccccagtttccttctacaagcctcagtctccagctttgaaaactgggcaggcgtccccccatccgcacccccaccccttccccacgcattccccgctcggtcacggctgtccaccggccaagctcaggcgcgtcctggcccagggccgggcggaagggaaccagtccagggccagccaggctgcgccgggggcgcgcgtccgggaagcgcccctcctgccccgcccccggccccggccccggccccgccccgtgcttgcagtttcctataagtagccggctctcggtgccagcctcagcctgacttcagcgctcccactctcggccgacacccctcatggccaaccgttacaccatggatctgactgccatctacgaggtgagtccccgccgcacggcatccccggtacctgcatgcctgagtccgagtccccacctctctagcgccgcaaactccagcccgggacgcttgcctcccttctccaactggggctccctagcgccgcgccctccagcctggggcccctgcctcccgctcagaccagcttggtgatttggaggtgaaaatggaacccgcgacacccggctcttcgctcaaacatgggtggggcggcccatgcaagtggaaagtcggagaacttttctcagaccgaggctgcctggaggcggaagtggcccccatacctggctcacccctagtcgttgctgagggcgtggttttgcgcggaggcgtctctggggctgaagtctcagggtggggggatccgacttctgtctctccagtccctgaccgtagagacagagaaccctaaaaccgaagcaatccggacttccaggtcaactttgcccggtttctccagttgtgaaactggagatcccgacgcgtgggtcatatccggggaggacaagagacccaaaattgggaaacagtggtgcgccctgacttcggggtccccctcttggtccagccggggaagccgggattcctgggtccctcgggataaggcctcggtggtgggtaaactcagaacctccaactctgggttcctggcatccggaacccaggggtttctgcgggcgggtggggctcaggcggggagcccacaaaccggcctggcaagctctagttccctgcagctggggtggggcgtcgccctgcattttcaggtgccttaaccgacccatttccgcagagcctcctgtcgctgagccctgacgtgcccgtgccatccgaccatggagggactgagtccagcccaggctggggctcctcgggaccctggagcctgagcccctccgactccagcccgtctggggtcacctcccgcctgcctggccgctccaccagcctagtggagggccgcagctgtggctgggtgcccccaccccctggcttcgcaccgctggctccccgcctgggccctgagctgtcaccctcacccacttcgcccactgcaacctccaccaccccctcgcgctacaagactgagctatgtcggaccttctcagagagtgggcgctgccgctacggggccaagtgccagtttgcccatggcctgggcgagctgcgccaggccaatcgccaccccaaatacaagacggaactctgtcacaagttctacctccagggccgctgcccctacggctctcgctgccacttcatccacaaccctagcgaagacctggcggccccgggccaccctcctgtgcttcgccagagcatcagcttctccggcctgccctctggccgccggacctcaccaccaccaccaggcctggccggcccttccctgtcctccagctccttctcgccctccagctccccaccaccacctggggaccttccactgtcaccctctgccttctctgctgcccctggcacccccctggctcgaagagaccccaccccagtctgttgcccctcctgccgaagggccactcctatcagcgtctgggggcccttgggtggcctggttcggaccccctctgtacagtccctgggatccgaccctgatgaatatgccagcagcggcagcagcctggggggctctgactctcccgtcttcgaggcgggagtttttgcaccaccccagcccgtggcagccccccggcgactccccatcttcaatcgcatctctgtttctgagtgacaaagtgactgcccggtcagatcagctggatctcagcggggagccacgtctcttgcactgtggtctctgcatggaccccagggctgtggggacttgggggacagtaatcaagtaatccccttttccagaatgcattaacccactcccctgacctcacgctggggcaggtccccaagtgtgcaagctcagtattcatgatggtgggggatggagtgtcttccgaggttcttgggggaaaaaaaattgtagcatatttaagggaggcaatgaaccctctcccccacctcttccctgcccaaatctgtctcctagaatcttatgtgctgtgaataataggccttcactgcccctccagtttttatagacctgaggttccagtgtctcctggtaactggaacctctcctgagggggaatcctggtgctcaaattaccctccaaaagcaagtagccaaagccgttgccaaaccccacccataaatcaatgggccctttatttatgacgactttatttattctaatatgattttatagtatttatatatattgggtcgtctgcttcccttgtatttttcttcctttttttgtaatattgaaaacgacgatataattattataagtagactataatatatttagtaatatatattattaccttaaaagtctatttttgtgttttgggcatttttaaataaacaatctgagtgtaagctgggatcctggcttcttcgcggtctagagacaggaatggagagggagggggtgactttttggaagctgggtgcagttaactcttcctctccgagccccgcggcgcttacctggcaggaagtgacgtcaccgggcctggccgttcacctgaaagggtgggaccaggtgaggtcaccagatgggaaccgggggagccagttcccgggcgtcgggggcgccgcgctcccgtcctgctgggctccttgacccagcttcgggcgggtgcggtcggggacgggatgtttccgtccccacggggccgcgggaggcgggaggggccgggtggggaggacggaatgtgctggggcgcgcgcccagagcgagcgggggcgggcgcggggcggggcagcctggggtagcggaacccgtttcgggactagaggttccgggggggcttcgacaccttctggatgttggggaagcgggtttagggtctcaagaggctaggatctcaacatttgggagtcacaggttgcatcccctagcgctttagactctagacccctggtggctcggagttgcagatttctggccacccgggaccctggagcccgggaattaccgggtcttggcatttccgaaccttggaagtccgaggcttcgcacaccgaccagggtcggccccgcgaggccagggcgtgtgggtaggggccgcgcgtctaggaggggccccgggggagccgcgtcttcagaccatacaaggccagcgtcgtcgggaccaaccccggggccccgcgcccggaagccgccctgcgtcagcgcctgcggctcggccctgccgcccagccttcgccccctgcgacccctcttttttctccttgccccgcactcctccctcctccctctcacttccctcttctctcctttccctaccctcacccttcctcctctttttcacttcctcctctgcacccttctgccccgccctacaccctttgccttctgttcttctctccccctccaatttgtcccctccctcattactcctctcccacttccagcctccccatcctgccgtctcttaccccctttctcctccttcccgtctcccttctctccctttttccgtccttctttccctctccaccctttccttgccctcccactccccattgtcct

SEQ ID NO: 1878 - DNA, 3530 bp, Homo sapiens
atgctgaaaagcaacggggagagacgcagtcgtaacgcacttccggcggtctacgcgaggaagatggctgcatcccagcagcaagcttcagcggcttcctcagctgctggtgtatcgggtcctagttcggctggcggcccgggtccccagcagcagccgcaaccgccagcacaactggtgggccctgcccagagcggcctcctgcagcaacagcaacaggacttcgatcctgtgcagcgttataagatgctcatcccgcagctgaaggagagtctacagaccttgatgaaggttgcggcccaaaacttgattcagaacactaacatcgacaatggacaaaagagcagtgatggacccatacagcgctttgacaagtgcctggaagagttctatgcactctgtgaccagctggagctgtgcctgcgcctggcgcatgagtgcctgtcacagagttgtgacagtgccaagcactctccaacgttggtgcccacagccaccaagcccgacgcagtgcagcctgacagcctcccctacccacagtacctggcggtcatcaaagcccagatttcctgtgccaaggacattcacaccgccctgctggactgtgccaacaaggtcacgggcaagacacccgcaccacctgctggccctgggggcactctgtgaagtgggggacagggagtggggcaggcagtggttggtgggtggtgtgcaaagggaatgaagagcgtcctgggcctaaacacagcagcctcctctcttcctgcctgagcaccgcagcgggagccagcagggggcagcagaggccaacagggagctcgcaggccgggcccctgcgtccctgccccttcttcctgctccccctcctagcctagggtagactttgaactgtgtgtgttgatgacttctctgttccacaggccctcccccattcttgcctgggtgtggagccctggctgtcccctctccctcagtccttcctgactgtctccagctgggaggtggtctctgtgtgccactcctctgtgtctctattacagttgtgtctctctcatcctgtctctttttcccttgtttctctgttcctgttaatgtgtttctccccatggtcctatttctctcactctgacctctctctcttagtcccctttagctgtcttctatccccagctcctaactgggactctgtgtctatgcagggggccagcacccctgggttatctggggctaagggaagggacttcatttccaggggccacagccaagcccagagtcccccagcggctcgcatgtcagcccagaccccagggtccttggcctaggagaggagcagtggaggggcccaggctctgagctccacaggtctgagctgggagcaactcaggcccccacccaagcctgcgtcagcggaacttgagtgaggggcgttgtgcaatttgtggcaaggctggcccagctggatgcctgggtcccagtatttttagccccaaaggagaagtgaaaaggccccagccggggtgaatcatcagtcctggggaagaacccaggcgcctgagccccagctccgggaagcaggcactggggagggggcttcaaggagggagtgccccctcagactccctgcttccctggaagcttcaggaagctcagcctcagccttcaggcctgagcaagtgcagggcggagctaccagcccaggctcagatgttggggtgtgaaagcctcaagtgactcagcctggttggagaactgccccacccagtatcttctgtgccatggttcccacattcgcactccatggcctcctgtcctggaccccacgtctgcaaggaaaccctaggaccatggatacctctgtgattcacgctgagcccaagtccccacactggaaaactgggaaatggccagctgtgtgtcccaggaaattcctccccttattcttccttgaagtgcccgagcatgtagggcaagaaggaaggctgaagcgctgtccctaggaggaatttctccttcagggaagcctcagttttgcccatttatctaattgaatcagttttttacccaatcccccgattttgtaggataatctcccttatctaaagtcaactgattatggactttaatcacatctacaaaacacttccatggcgacagctagatgagtgtttgaataactgggactgtagcccgtccaagttgacacataaaactgaccatcgggccgggggcggtggctcacgcctgtaatcccaacactttgggagcccgaggcgggcggatcacaaggtcaggagttcgagaccagcctggccaacacggtgaaaccccgactctactaaaaatacaaaaaattagctgggtgtggtggcacacacctgtagtcccagctactcgggaggctgaggcaggagaatcgtttgaacctgggaggcagaggttgcagtgagccaagatcacactattgcactccagcctgggcgacagggcaagactctgtctcaaaaaaaataaaaaactgaccatctagtccttgtcatctgggcaccctcacacatctccttaaccacacttaatctccaaataagtacgataacatagtcatagtcccacccaacatgatgcagttatcttgcatacaactgaagacaactaaccctttccccaacagagcccaccagcagtggtggagatgtcggtccatgagcgcacacacaagactgagggactgtcggccctcccaggtggtgtcaacacaacatcacacacaggtgggggggcctgatagcccagcacccatgatacagggcctaccaatgcttaaaaccacacccagggagcccacagaggcactcagtgggtggtggggtgatggatacacatctatcaggcacagggcggaggtgggcaccactgagttgcactcagcaaacacattgggtatcttgtgcccaaggcctgtatttgtggagctgatgttctagtgagagacagtaaatgtgacaaaagtaaaatatatcagatggtgagaaaacagaaaaatgagatcagaagtggagatgttggggccaggcacagtggcccaggcctgtaatcccatcactttgggaggtgcaggcaggcagatggcttgagcccaggaattcaagaccagtccgagcaacatagcaaaagcccttatctgcaaaaaattcaaaaattagccaggtgtggtggtgcgtgcccaggttcccaggtactcggaggctgagaggtgggaggatgccttgagcttgagaggttgaagctgcagtgagctgtgatcgcaccactgcactccagcttggttcatggagaccctgtttttttaaaaaaagaagtggaggtgtttacaccagcaaaatactcattttttaagtgtaattaagttgaagatcaaaaaatggaaatgtataattaaatcatacttagcaaatctaacacatgaaatgtaacatctgcatatggagaatcgtgttactttattgaaaaacattaaaagtttgagaacttaa

SEQ ID NO: 1879 - protein, 221 aa, Homo sapiens
MLKSNGERRSRNALPAVYARKMAASQQQASAASSAAGVSGPSSAGGPGPQQQPQPPAQLVGPAQSGLLQQQQQDFDPVQRYKMLIPQLKESLQTLMKVAAQNLIQNTNIDNGQKSSDGPIQRFDKCLEEFYALCDQLELCLRLAHECLSQSCDSAKHSPTLVPTATKPDAVQPDSLPYPQYLAVIKAQISCAKDIHTALLDCANKVTGKTPAPPAGPGGTL

SEQ ID NO: 1880 - DNA, 30074 bp, Mus musculus
gctgctgcgctgctacacgcaggtaggcggggccacgggcaggtgtgaccatgggtaggcaggaccttgggcaagcgtgaccttgggtggcagggctcgagggcagtaggccagatgggtcttggaacactcggtcagagctgggctaacacaggcaggcacaggaccagggctcagctaattatagtgaatgacctacaatgggccacttcctcttggcctcagtttcccctttgtaaaataggggacggaaacaggatagattggtactcattggaatcaggagaaaggtcagaaattcaaggttgctggatggtagtggcatatgcctttaattccagtactcaaaaggcagatgcatgcagatctctgtgagtttgaggtcagcctggtctacatagaaagttctagaagagccagggctacacagagaaaccctgtcttgaaagaccaaaaaaaaaaaaacccaaacaacaacaaaaaccaaagaaaggttatcattggctacaaaatgagtttaaggccaaccttcaggatgtgagactgtatctctaaattaattgattagtcgattaattacaatataaactaatagaagaatgtttaaatataaagaagtcagaacagcttcaagccctctcaagtctgctgtgaggtgacaggtgacaggacatcccagacttactgcaaaaggcctctgtatctgaggggacaccgtccataccacagccactccaaatcaggaaagtgacactgtatcgtaaggaaggtgggcttcttattcatacacttctgagcctggccttggatacggtggctaatgggacactgtggccacactgaggttcagacggatgttcaggctgctggcttctatgtgtctctgtgcgttttgtggatgtgttgaagttcagactgctctgtgtatacatgtgtgctaaaaaattgtctcagaatacaaagtggccattacattacacacttgttatcccagtgcttgggaagccgaggaaggagctggtcatgagttcaaggccagcctgggctaatagtggatttaaggtcagactggctccatagcaaacaatctcccccgccccccgccccctcccccgccctgcccaagaagaaaaagttagaaaggaaaaagagagaactccaaattgtacagaagagttaatgcttgaatacaaataggtttgaagctcttgcaatgtcagaaatggccaccagggggaggatgggttcaaacttttgggtccagatggctggaggccccagctggggaagagacagcttagtccttccaggcaccgcccaagctcagagtcagcctcattcacagaaagaggctcaggcctgatactaacagcttccttgaagccccatacttcctgcttgttgttgcatgtccctcctgcacccttgtttgctggcctctatgacaacaggtgtccacccaagtaccaggccctaccagtgagccaagcagacaccgctgccctcctggtgccaattcatgtgtgtgacaagaacaagagggacgatgagtcatagacctagggtgtcagatggggctgagaccagcctgaagtttggaagtcagaggacaaggtgcaggagtcagtccttcctttccatcgtgtgggtctcagggatggagctcaggtcatcaggcttggtggcctttacctgagcatctcactggctccacacataaactttaaagggagatttatttttatttcatgtttatggatgttcttcctgcttgtatgtccatgacctatgtgtatgcagtgcccacagtagccaagagaggctttaacagatgtgtgctgccatgtgggcgctgggtcccaacccggggtcttctgggagagcatccaacactcttaactgctgagccatccctccagcccccacacgtacatttttgtaaaatatctgaaggtggaaaaaaatgttccacttgccccctttgtggtcagctttttttccttcgtggcctcttctcctcagtcaccgtttgaatcactgacccactttctggaacacagtgactccgcctctgagttgtgccgacacagcatctttgaagctgtggtgctgtttttagctctgcacaggaacccatcgctcaagccactgtggtccccacagaagagtggctatagaccttcaagttgcatacatgaaattcaccctccaggaagttctctgtatgccccaaacccagcctcttgtctggggacccctcgatactcacaccatagagcagcaccatgctttttaaaatcgaagagtagtctttttctttttttctttttccttttattttgggtgtgtgtctgctgcgttagttatataggccgcagggcttccggcatgctggggaagtgctctaccactgagccacacccccagcccaggcaagacctgagtttgtaatcttctgtctcaccctcctgtagctgaggttacaggcttgctctgctagcccagctctactgtgcaggcattgggtacaggcggcagcctaccacgtcatcatgaggggaaactgcaaacttacatcagtgatgtgcagtagggtaggtgtcagaggcctgctccactcagggtagacccaactcacggtgggcttatgaggacagagccccattgcaagggaaggagcgtgtctgtggatataatccaacatgatcagagatctcaggcatctccctccaccctagactatgtttcctttgatcacagaggctgccggaggtaattctgtgatcccttagttagctgtttgtgtgtgtgtgtgctgctcactctccaatgaagggcttggtagactgagccagcgacaaagcagatgcagagtgcggggtgtggcagtgctcccctgtcatcctggcactctggagggaggttctccagtttgaggcagtctcaaaaaatcatatccccccccaaagaaacaaataagtcattctcttgttttatttattcatattacattatttagtgtgtgtaaagttcagctgacaactgaaggaaggcgtttgcttctaccatgtgatgtctggggcccaaagccacgttgctatgttggtagcaaggaccattgtcagctgagccatcttgtcagcccttactgtggcttttccagacaggtgctagtcttgtcccagcttgcctgaatctcaccctgttcctcaggctagcctcacctttacagcagtctagaattataggcatggcctaccatgcctggctttatttacttattgcttatttatttcacttttttgaggcaggtcttcccatgtagccctggctggcctgacattagctatgtagcctcagctgactttaaacttaaagcagtcctcctacctcagcctctaattgcagggcttataggcagtcaccaccactgctgacctgattcagtttatttatgttaatgcttggccagagctgtcacatacaagctactcaggtgggatccccacaaggatgccacatctgagggagacgctgaagataggtacatttattgcaataaatgtgtggcaaatggagggactgtgcgtggctctctaacaaaagaacttctctgaaaattagaggcagtgacccaagtttgtagaagaatatcccatgggcatcctttagcaaccttctgtggccccactggggaagcgggcactttccatatatcctcacccttcctcatcccccgcaatgccacttctcagagccaccagggctggctgtcttcctgacctcccctccccctccagaacatagacacgctggaacgagtggcggggctggagccccaggacctggtggaggcccacggcaccttctacacatcacactgtgtcaacacctcctgcagaaaagaatacacgatgggctggatgaaaggtgaggctggactctgcgggcaggcaggcctcgggcaggccagggggaggtagggggtggggggctctcactgcttgcctgccatagccagcctccaagggctgggccccagtgcagtctgctccattctttggctcttgctagtcagtgagttggttggtttccactgaggctaggcttccctatgtagcccaggctggcctggagcttgcacttctgcctcagcctctctagtactgaggttgcttgcaggcgtgcactacggtacccagctgtcttgctttttatggtagctgtagaagcctcaaggattcaaggtgacagcaggtctttgctcccatgccacccctctgctgggctgtcatccatatgaaccgcagagcacggccagccacgtgtggactccgtgtagactcacgtcctcaacggtcacacagcctgtgtctctgaggtgtttactatctatcttacatggcaaacacggctaccttctgaggaaggcattgcacagtggaaccttccgagacgaggaggcctgtgtctacgtccaacatggctccacttgccccatgtgcctactgaagcaaagtgtctaacctctgctgccaccatgtgggtcccaggaactggactcaggcgctcaggcttgaggatggaccacctcgctggcccagaacagtttaatttttattatattttttaaagatagggtctctaatttcattaagttcttgttggtttaagttgtagaagtcgcaggaggaaccatggtacatgcctattagcctattgcttgggagaggcaagaggatcaggagttcagggttagccttggctacatactaagttccaggtcagcctgggctacatgacaacatgaaaataaaaactaataaattttatataagtcttatgtagctcagccttccatgttggacagtgcagcaggagcctgtggagagggaagctgggtgctgtgctgggtaagacaagtgctggagacacacatggtagctcacggctgtcactgctgtcactgtcctcattcatgtgaggacacagcaactgagaggacagctagtccccgcgcctgggtgccagcaccagtctgttctggcagccattgtgctgagcctgaagctgctgtgtcaactgtgggaatccatttctgtattctttatgctgacttcacaaagcctctggtgtccccttgagatcaggacagctgtggcctttatagcaggaccctggaaggtagctcttctgacagaatgccagccagctgcccccagactgagggttcctgagcagcccatgtgtgcacagctgggggtgacggacaatggacatcaccccctttatgtccctgtggaatcgcatcttccacccacagaatagcatatttgtgcagaaatacctcagcagcagccgttaaagcttcgccctgtgactggctgtatgagtggctggcggagtgagctccagtcctgtgggctgcatgtggcagatgtgctttcagactccgtgatccataagtaagaaggagtgtgactttcataagggtggtctgtcccataaggagtctgtcacagaatccgagagtgggaaacagttgggcttgaggtttgatccaacccaaggctatctgtatgtcctttcctgacccagggcagataggactgtccccaggacccattggatgactcccattccccagatgggggtctggtggagtccaggggcacctgtctggggcagatgggtttgcccctgtatatgccctttcactcactagctgtggtgctgccagccacccctggatgcctggaggtgaaggggacggctctctaagaagggagctcctctctgtgaagcaggaaagaccactcaggaaatgcctgagtagtgagctgtgctgtttgttttgtggcgctgcggatcagactaggggactcgggcattcgaggtcagaggctcttccactgggccacacccacagcccccatactgggagactcaaagcaggcatctcctgctgagtcgtgcccaagccctcttggttccaccgctgagctagcctagctcttggggtttgtgtgcgcatgtgtgtaggtgtgcacatggcatagcatgcgtgtgcatgtcagggccatctgcaggagctgcttctctccttttagcatgtgggatctggggacggaactcaggccaccaggcttggcagcaggtccctttacacactgagccaccttgaagcctcagctcttatttttttgagatgtggttttgttgtgtagccaaggctggcctcaaactcacaattctcctgtttaattctcccccaagcaggcttgcggcatgcaccactgccacctgcctgggatgcatttctgttgacaggagggaggggcagaagagggcttctccagcagcccttgggggagcctcacaactcacccccccttcctctttcccactcagagaagatcttctcagaagcaactcccaggtgtgagcagtgtcagagtgtggtaaagcctggtgagtcctgggcccggggctggagctgggaccccttcctccacggcctcaccccccaatctggccactctgccacctggcccgtcccctactgttcagcagagggtgccccgccccccaagcctcagttgggcccctgactcctgactgttctagctctgtctcccatatctcctgtcctctgtccctctgtccctctgtccctctgtctgtgtctaccgcagatatcgtgtttttcggtgagaaccttccatcgcgcttcttctcctgcatgcagtcagtaagtgtccactctgggctgggcccatgtgagggggacaaagccagagtagtggggtccaaggccttcctggttactccccgcaggacttctccaaggtggacctcctcatcatcatgggcacctccctgcaggtgcagcccttcgcctccctcatcagcaagtaggttgaggaggatgggactgggtgtcagctcgggacagggcactagggcagatcctgaatctcagctcccccttcccagggcaccactagccaccccacggctgctcattaacaaggaaaagacaggccaggtaagtctgcctcagcttccctccccctctcctccccccctccttccctgtccccctccccctccctccactttctttgcccccttcctcatttggccacttcctcaggggacagggcaggtctctgtcccacctggaaagcaccagatccttagacttgccagttcagtcaggagaacatgggagctggcctgtgcactgggcctctgtcattctagactccactgagcacagaacagaaccgtgccttgaacctgctgaagcccaagtgcttccccggacccaggagacagtccagacactaccattctagtgccctctcacatatcaaaatctggggaccctcaagtccctcctatgaagtggcagagtgtttatatagagcaatctctgaagatgctaagctgtgtctccgtgacgtgtgcgataccatgtgaactcaggagacaggctcccatgcccccctgccctctcagacacgccacggaatttaagatgaccttgaactcctagtcctcctgcctctgccttccaagttctggcatgacaagcctgtgccaccactcctggctgtgttgttgtttgtttagcagaaggataagttgcttgccacgcatgcactaggtcccgagtttaactgcttgcacccacataaaaatccaggcatggtgtttgtagtcccacactggagaggcaaagattagtgggtccctggggctcaccgggtagccagtctcacataatcctgaattccaggccagttgagcaatgtctcagaaagaatgtgtctgggccgaggctgtaactcagcggcagtgcttgcctggcgtatgcgcggccctgagttcaatcctcagcaccaccaaagacgaagacggttattagttttggactagagagatggtttactgattaagaccttctgtccccagcacccatgtcaggtggctcacaactgcctttaaccccggctcctgggcatctgacgcctctcagtcctctgagcactcacacatagagagcacacatgcagtcagataaaaagaagccaagtggtggtggtgcacactttaattccagcacttgggagacagaggcaggtgaatctgagtttgagaccagcctggtctccttagtaaattccatattagtcaggactatatacatatagacaccatctaatcaatcaatcaataacaagttggctaacttctaagaaacagtaattatggttggcctcttggttgacctctagcctgacctccaggtccacatgtgtacaaatatagacacatagcccactaccatacacacacacacacacacacacacacacacacactaattagtaaataggaaaataaggctaggtatggtggtgcacatcttttatcccagcactgaggaggcagaggaaaggtggatctttgtgagttcaaggccagcctggtctacagagcaagccccaggacagccagggctccacagagagaccctgttttagaaataagcataaggcaggtctgctggctcagggctgtgcccttagctgtcttctccccacagacggaccccttcctgggcatgatgatgggcctgggaggtggcatggattttgactccaagaaggcttacaggtgaggctgggcctgggtgagcagctcgagaagggtgggtgaggagggagagaagacagaaggccggctggtcctcagcctgttctcttactcctgctcaccctgcagggacgtggcctggctgggtgactgtgatcaaggctgcctggctctcgctgacctcctcggatggaaggtgaggagctgggccaccccagcccaccctgagcccaggcccatggggtttacggtaacctgacttgcgtcaactttgccccctacagaaggaactggaagaccttgtccggagggagcatgccaacatagatgcccagtcagggtcacaggcccccaaccccagcactaccatctcccctggaaagtccccaccgcctgccaaggaggcggccaggaccaaagagaaagaggaacagcagtaacagtaaccatgacctcccgcaggacagcggagcccggccagcactgggccctcttaacatgcagcttgtgtgagctcaaagacccttcgttctttaaccacgttcttgaaatcagggtccccaactcaatcccagaaaagcctaatatacctaggggctgaggcctgtgcagtctgtagctggggcctctaaccaccatagcctctaaccaccatagcctctaaccaccatagcctctaaccacccaggcaagaagcagccttccctaacttctaattattcccagacaacaggctaccccaaaacccctaacagtgccagaataaggcatttctctattgttttcagggggcctatggctaaatcaaattaacctaccccgcataggggctggactctacaaatagaacttcacccaagggggtggggccttgtgggatctctgagcctgaaggcctgccaactctctgcctccaacaaagtgggtactaggctccctttcctggggacccacttgccagctgttggtggatgagcaagagaccttgcttattagaaacaaattaaaaaacaaaacaaagcaactaaccatgacttgtgtggcctctgcttcttttagtgggtacttaaggcatctggggaagggagaaggctggaccataaagactccagaccatctatggctccaggatcttaggagtaatggtgactgggaccaagctatgcccctggagagggtagcctggtgactttttaccctggctctcagcctgccagaggctcagtcctccaaagtggatcccctaatactgaccccggaaagacagaggaaggtgatttcagatgccccagccccgcctcttcccctgccttcctggcttcctctctagagagcactttcacttcctgctgctctggctcccctcggaacaggtagggcccccagggaccaaacatctggtcccatttgcacccacagctgcctccatccaaccctgcccagccctacccatgtccggatctcctcccaagggagcactgcctccccctcttcacccttcttccctgcctgtccctgaggtgtgctccccaccccaacacctgaagttgctagttggcagctcagtaatttatgtagctgataattatctggcttgcacacaatgccctaagagaaatggagccttcagaatagggctagcttgcttatcagaccttttcctaggccagcaggtcacctaaatgctgggccaggaattcaggcagaaagatgggggtgagatggtggaggatggatagatgatgggaaacagctggatggtctctccagccccacatgccttactcctgagactgctgcggggaatacccggaagggttcacttggggttggcaatcccctcttagtgaacacttggggtgtagtgttcaccaagatgaagagtaagaacctagcctctgctgaaatacacagcaagtatgaaacaagcctgggctatacaaggtcctgtctcaaaaaaagaaagaaaaatgaatgtttgacaaataatggaagctgggcggtggtggcgcatgcctttaatcccagcactcggaagaaagaagcaggcggatctctgtaagttccgggacagcctagtctatatcaagagttccaggacagccagatcaacatagtgagaccctgtctccaaaaaagaaaacaagtttttaaacaaatgtgggggagggtgtgttagggctcctctgaaatctgggaagggaagagatgggtgtcatgttgcatctgggtagcagacggagcgagccaaaagcttttccagaacttatccccttccactctcttaattcctgttggaactgttctcccccaccccaagatacatgggccttcctcctggggtcctcagagtggtctgtccctcagcaataaagaatggtactgctaccccagtgaggcatggtgctgcagcctattatctcaacgcctgagagcttgaagcaggaggattgccatgagtctggggctagtcttgactacagagcaatccaagctagtctgaactgtctcgaaagaacagaacaaacaaaaaacaaaaaaaaaaaacgaaaaacaaaaaaccagtcatagctgtgggcctctgcagtccattcaagagctcaggcaagatctctgagtcacatgtaatagaattaaactattagctctcgccctagctgagcagccttgagtcttgtcttcctccatgccagaggccagagcatggctcactggtgcctggcagcatgaggctagcccagccggacatggtgtctgcagcccctactgaagtggacaggtgaggctatagagttggctctggatcaaaatccccctacccaattccctctccccagctccacctttgaccttttgttcctgggctatccctgacccttggacccatcccccatgcccccaccccagtagccagctttccactatgacccttgacctcccggcacctgtacatcccaggctggtttggccactagcggatggagcagacaagagcccactaggggtcctcagcaccacagagccacttcttcgactgcagaggacacagagagtgtgggaggtccccgagctggatgctcagtatgccaaggcctttctagagctgtggccactgggggtgagtactcaaagctgggtgcaacttctgaccttccctatgtcagcttggatcagctaggtgaccaacacaataccaactgggctaacccaaaatgtaggaatttgttttagggaaggctttatacaccccaggctggtccccaactcactgtgtagcagaggctgacctcaaattcctgatccttttgcctttacagcccccgagtatgaatgttagaggggtgtgtgtgtgtgtgtgtgtgtgtgtgtgtgtgtgtgtgtgtggccacacctagcatgtgcagtactagggatggttgagcccagtgttccatgcactgaaggcaggcgcgcttccagctgagctaaatctccaggcctgttctgtaaggacatcaacaaatgtatttgtctttccaatagcaaggcacctggcagctggagtttagcagctcagtgacatcagggctggctattctcggagctttcttcatttcacctggggtctggccctggtctatgatatgtgtatcctaggcaggaagaaaggaggtgccaggtgtcttgtgcctctgacccgaggaagaacgcatgccaaggactggagagccaggctttaaaagctcacttagggagtgggggaggctggacagatggctcagtggttaagagcaatgtccgctcttccagaggtcctgagttcaattcccagaaaccacatggttgctcattaccatctatactgggattagatgccctcttctggcatggaggtgtacatgtagatagaacactcatatgcataaaataaataattaaatctttaaaaaacaacaaacaaaaatacctcacttggagcctggcagtgctcctagcatttgagaggcagaggcaggcagatctctgagttcaaggccagcctggtctacacagtgagttccaggacagccaggacctgtttggggggggggggggagaaaaatcaaacaaaataaagctcacttgggagttatgtggtaaagccaagccagcactgagtacatttacctgagccaatatcactgtgtaatcagactattcttgaacccattatcctccagcctcagcttccagaatgctggaatcacagctgtgtgcctccaagcccagatgttaatcatttcctgtagctcagcacactatggccttgaacaagacattcctcagggctgtgcctagtggctcaccaggagtcagaggcaggaggatcaagagtacaaagatagtttttgcatatcagatatttctattacagttcataagagtagcaaaattagagttatgaagcagcaacaaaagtaattttatggttggggggtcaccactgtccctcaatggtattaaagggtcacagcttagaaaggttgaggaccaccccttaaagcgaagtgtcagcaagcaggcagaaagaaacatctgcgcattcctgcatggagctgatctctgccctggcccctcttctccagagcttcctggtcatcggacatgagcctggccaggtcctgatgttgaaggcaggaccttcttcaggagatatcaacacctatcaaattcagaggtttcctggaggtgaggaacctgccctgggttttcagtccacacagcaaatgggctgagagctatctgctttgatccccaaatatctcttgagtctccccagtcccacatgcctccatcactgagtctgagctagcccagcatttcctgcccagaccactgcagtagtctcctcccctgatgtctctgcagctccctttgctcttgaaacccttgctgagcacagcaaagaggtgtgttcacacatgggcttcctgtggtccaaccctcccccaaaccctggaggtgtttggtaacgtccctgaatgccaagttaggtggccatcgtgagctacagtgctgtctgattcagcttgcttctgcccctccgtttgcttcaggcccacactcactgccaagccccgttgctctcctctctgttcccgctaacccagctgcaagatgtcgctactgtctgtccttcctgccggagcgttcttccttgagtggttgacttaagtctccatccttgagaacctccataagaagataacctgtgttgattcgagaattcaaggactggagctggagtgctggacccatcttccagagtcccagcactcatgtgacatggctcgaaccccacctgtaactccagtcccagggaatctagtgccctcttctgtcctctgtgggcattaatataccacacggacacgggcagacaaaacaaccatacatataaatagaattttttttttttttttttttttttttggtttttcaagacagggtttctctgtatagctctggctgtcctggaactcactttgtagaccaggctggcctcgaactcagaaatccgcctgcctctgcctcccaagtgctgggattaaaggcgtgcgccaccaccgcccggctggaataattttaatataataaaaagaagagttttagtctagcctgggctacatatacaaaagcaaaaggaagcctggtgtggtggctcaggactgtattctcacgcagaaagattgccatgtgttttgaagccaatctgggccacacagtgagatccaggccagcagatctcagtggatctgggggacatcccaggtgtgcagggggcatcactgcccctaggatccagggatggttgcttttaggtttatttatttactctgtgtatatgaatacatcatagctgtcttcagacacaccagaagagggcattgggtccctttatggagagttttgagccaccatgtggttgctgggaattgaactcaagacctctagaagaacagtcagtgctcttttttaaagaaatatttatttatttattatatgtaaatacactgtagctgtcttcagacactccagaagagggtatcagatttcgttatggatggttgtgagccaccatgtggttgctgggatttgaactcaggaccttaggaaccttagtcggtgctcttaacctcttaagaccttagtcagtgctcttaactgctgagccatctcaccagcccccccccccctttttttttaaaggatggcttccctactgagcccacttcatttttacttggtttatttttattccctttgaggaaagaaattcttgtgttgactgaggtttttgctcttcccttattcaaacacaaaagaaccatctttccgcctgaacagggacttgaaccctggaccctcagattaaaagtctgatgctctaccgactgagctatccaggctcttcagtcagtgctcttaaccacaagagggtgctctccagccccaaagaggtgatcttatcccctcctaccacaactgccttctccccctcctcttcctcctcctcttctttagggcttttctttctttccttctctctttctctctctctttctctttctttctttctttctttctttctttctttctttctttctttcttactttctttttctctctctttctttctttctttctttctttctttctttctttctttctttctttctttctttctttttctttctttttgttttttgagacacggtttctctgtatagccctggctgtcctggaactcactttgtagaccaggctggcctcgaactcagaaatctgcctgcttctgcctcccgagtgctgggattaaaggcgtgtgccaccacgcccagcctttatggcttttcaagacagggtttttctgtgtagccctggctatcctgaaactcattctgtagaccaggctggcctatgagaaacagtgagacagtgtttcaacaaaacaacaacaacaaaaactgaaaacatttttgatgagttaacttatttggtgtcagaacatcgagagagaaaatgacgtcaactcccagtggtggaaacaacctgtctctgagggaggagtatggggatggggagtaggagtgtggggaggctgggccacagggtagggtgaggtgtgcagtggccaccctgtaactcccctttctcttcccctcaccaggtgtgtccctggaatcctccaacctctgcatgcccgactgtccccatctcctggcctttctgtcagccagcaggtacaggtcatctggcagagggacatgggaccttctgcctgagatacccatccataccaaggcttccctctctcttaactcagggacgttttgccaaggaccctgctcttgcccacgcctactgtgggggctggagataatcactcaggtgaggtccactgctccaggaaggagagcccaacctgcctctttgtggtccagagagactggatctaaaggaccagataactaactgggtttgaaagaagctgggagtggggcaagaatgaaaagaagctgcggtggtggcccacgcctttagtcccagcacccaggaggcagaggcaggtggatttctgtgagttcgaggacagcctagtctacagagtgagctccaagacagagaaaccctgtcttgagaaaccataaagaagaggagggaaaggaggaagggggggggggagtggaggaggaggaggagggcggcaccacgcgcacgacgaccaccgacgcaagcacgcacgcccggaccgcaggaccgaggcaccgatgcaccgccgccgacgaaacgagaagacagaggcagacagaggaggaggagggaggaggaggaagatgaggaggaggagaaggaggaggaggagaaggaggaggaggaggagaaggaggtatctgcagggtcagctgtgattggaggggataagatcgatcctgggatctaacaggagggcctgggagctgggggtgggggaggggtgggagtgggactgcattcttggtcttaagtgaggaaggatgatgggaatgaagtctcctggtgccccctatatacctgggacaccttgtctcttccgctgaccctcagatccccatcggcttggctgcatccaggtggacacctcagggagggtgctgtctgtagtgaaccagctctacctggagacacatggaggctggggaacagagactccacagcaaacagagccagagactggacagaaatacagtctaggttggctgggcggggcccggggaccttgagagatgagggaatggatgaacggcactgtaataagccaacctgcgtctcccatccagcccccaggaagcccaccccacaccgggtctcctgggtggaagaccctttgagaccggaagctcaccatactggacaggaagtgcatcatcctggagcagacgctcactcccttgggtcggaagtgcacttttcctgtcctgctctagaagaggaggaagtgaacaacgactgctacaaagatgaagacgaggaaggttgcgaggatatgctcactgcccacatccgtgctctggccaggacccggagcagctatgtagccaggcagtaccgatgccttcgggcacgcctcatctcagattctggaaatccctacagcccaggggacccggccacagagctgcttcaggatgtgcgccagctcctcactgacctccagaattacctggcaaaagaccccgacgtcagagctgtctttgggaacaggggacctagcatccttcgggaagaagatcttggtaatgggaattggagggaaactcccccaaaggtttgagggtgccatgcgttggtcctgtatgtgttcacatgtaatctctgagtccccaagggcaagcacacttgttcatgtatatagctattacttcatggctccacctaacacgtgcattgcttgctagacctcctctgccccatccttgggagtgttcatacattccccacaggccccaaatcctgcctacactttgtagatagcctggagcaggagacagagtgactagggatcagggtggcatggtcctcacacgccacacgctttgcaggccccgctgtggaggtggccctgtgtcgagcggttctagagcccctgaagcccgccctgtggaccaaactccgaactctcagagcccaggaactacgacgactgcgcaggcgccaaatagccttgagggtaggagcggggcctgagggacagagcccggccttgcggaaccggaaccgtatccacgcacgccttgctcacttgcatgcggcgtgcgccccgcgccgcaaggtggcgctgttgctggcggtgtgcagcgacgtctacgcgggcctaggcggtggcgagaataaaggtaaaagacctctggacttagagtgatttaatggtgggtacccacgtccagggaaagggtagccccctttggtagcaggcgcccactcaggcctggggacctgaagggaagatgtttgtgtgcacccctgccaaactaatgacccgtcctctggcttccttagagcccctgggggctgacgcctttttacctgccctgaccgaggagctgatctggagtccacatattggggaaacacagctggatgtggagtttcttatggagctcttggatccaggggagttgcgaggagaaggtgagctccctcttctgagatgcccagacactgagaagaaggcaggtgcctttgatgagccccagcttcatgtgcctcaaaaagagtgggcactcgccgggcgtggtggcgcacgcctttaatcccagcactcgggaggcagaggcaggcggatttctgagttcgaggccagcctggtctacaaagtgagctccaggacagccagggctatacagagaaaccctgtctcgaaaaaccaaaaaaaaaaaaaaaaaaaaaaagagtgggcactcagagaagcccagtagggctatgatgacctcattttctctcccccagctgggtattatctgaccacgtggtttggggctctctaccacattgctcactaccagccagacactggccgtgcaccccaggggctcagctccgaggcccgggcctccctgcgccagtggcatcgaagacggacactgcaccagcaagcccagcccacagcccaggtaaccacctatgctatgcagatgcaggtggaaggggcggtggtctctgatgcccctttgacacagcctcccatttctccccacaggccaaccagccttttgaggagccatgggcaataggggacccatgaaaactggagttctcaaaccccagtcacttccgaaccttttgacccactcctctgctaagcaagattctggaggcatctgggtcagcatggagggcagggcaggaaaggagacgtgcctcctgcaatgtcttacttcctcctcctcaattcacctccttcgggtctgtccagatgttacctcaacgaggcgctccccagcaaacaaaacccacacccagacagtactacaactacaaccctctcgcctgaatctctttggggcaggtagaataaaggcaccgtccccaaaggtgtcttcatcctgatcctatctgtgactgtgacacttaacttggtcaagtgatcgttacaaaaatgacagcatgtctggacctgagatgggagcttattctggattcttctgcagctcatgtagttaggagggtggcagaggtacagggaccatcatgagcttacgcctccagctatacagcagaatgaggtggaaaaagtacttgaggccaagaccatgaggacactgtggcactgaaacatagtaggtgtttaggaacacctatgtgccttgaaaacatatcactgccctaatctctgtgaccgtatttggcaaaagtgtttgtgcagctattattattatttttgttgttttggtttttcaagacagggctcctcggtgtagccctggctgtcctggaacttgctgtgtagacctggctggcctcgaactcagacatcagggattaaaggtgtgtgcccccaccacccagctcgttcagccatcattgaagatgataaaatgagggacagtgccccggggactgtgtctgtgactccaggagcacccacgccatgcgggagacaaggagaacgaacggatgggaacaagagagacgggagatgctgggctactccaggaaagcttctccccactgccaccccccctctgagagctgcagaagtcatggggccctgctgtcaacctggtttctgtgagattagtgatgtcagaactctgacctccagaattgtgagcaaataaattcctgccgtcttaagacaccaaggtggtaataataataataatcaataaaatttaaaatgtactgacgagcaatggaggtgcagacctgtaatcccaccaacatgtgaggagactgaggcccgcctgggatgcccgaggccctgcctgactcagcaatgaagctcttacctagaattcgcagcaaagggctgtgggtatggctcatcagcgcggtgcttgcctagaggccactgttaaagagctggagtgtggcctggtggtaaagtatgtgccttgcatgcttgaggctgtagtttttattaccatcaacacacacacacacacacacacacacgcatgccccagtgtacgtcagtgttggagagctgtcttcattaacagcactgactattcacctagagaaccaggattcacttcccagcacccacacggcaaatcccaaaccatctgtaactcaagttctcgagttctaagcacctgagaccctcttctggcttccactagcatcagacacacatgtgatacacagacattcctgcaggcaaggcacagtatctttaaaatataagtgagaccatcgtaagttagtgagtgtgcatagtaagttgataaaggtatctgagtgtttgagttataggaatcatcctagcaagttaactaagtccactggccagatagacggtttattacctgaaactcaagaccggccccgaagcagcagaagttgggtgcatcctgtagacccaagctcattatctgtaggatctgaggctaactccagatagtgtcaggatcgggttaaattataggacacccatctttattggccaagggaatttcttgatgtatgtgtgggaaaacctccacacacatctggtgtctgaagtgtgtgagttgtgtgggagtgagggaaatgtaccttttttttttttttttgagactgggtgaagctctggctgccctggaatctgctcttagaccaggctggctttgaactcagggatctggctacctctgcctcccaagtgctgggattaaaaacatgctacccctccaaggcccccccaaccccacctcttctattttatagaaaaacaaggaaagcttcatgcaggtggattggacagggatgcgcggcacgtagcagaagaggaggcagccaaagaagaatcacgtgggccacatctgtatgtgtggcttgttgctgtgatgacaccgtgaccagaagccaccgggggaaggaaagggtttattttggtttaaggttctagaagactccgccgtggaaggggaggcatggcaggaagagtacacatcttcagaagaagatgtgaagagatcacatcttcagccgctcacaggaagcacagagaacaggagggagggggcaggttgagaagccttgagtcctttccttagtgataaacttctccccataaggctctgcctcctcaagggcctgtaacctccccaagcagtgccaccagccaggggccatgtgtccaaacacctgagcctctagggacatttctcattcaaaccaccaccacaccaaaaacttaaaaattctaaacatgcatgcctgtcatgtaccacagcatttagaaagcagaggcaggaggattccttctagttctaagtcagcctgggctttgtaggaagaccctaccttcaaaaccaaagtagatttgggagatggcccactgggctaagtgcctactatacaaggacctgtgttcaggtccttggtgtggcagcaggtacctataactgactcactggcctgccagtcttgccaaagcagcaacttctagattcagcaagagactcttgtccaaaaaaaaaaaaaaaaaaaaaaggggagctagagagatggggcagtggttcagagcactcgtgtttttgtagaggacccaggttctattcccagcacccacatggcagcttacaaccttctataagtccagttccaggggatccaacactcttcttttgagacagggtttctctgtagccctggctgtcctggaactcactttgtagaccaaaaaaatcccagcacttgggaggtagaggtaggcctcgaactcagaaatccgcctgcctctgcctcccaagtgctgggattaaaggtgtgtgccaccacgcccggcccaacaccctcttctgacctccaagggcaccaggcacacacatgcaagaaaaacacataaattgattaaatgtggtgctggccaaaaagagaaaaaaagtaacaggttctgctgccaaggtggacagacaacttgagtttgaagagggcagaatcaactcctggtcctctgaccttcatatctgtgccattggacgtgtgaacataaacacacaaatataaataaaatgatgtttccaggaggcggtggtacacgcctttaatcccagccagcacttggaaggcagagtcgatctctgtgaatttgagacctctctggtctacagggtgagttccaggacggccagggatacactgaaaccctgtctcaaaaacaaaacaagacaagacaaacaaaaaagtcaagaaagtattgaagaatatacctgtgttgacctgcacagcatatccatgtgcacacacacatataccagagtcagacagacaccacagtataaatagacgtggtggtacaatcccagacctaaaggaattgaggcaagaagccattttggagctacatagtaaaaccatgactcactcaaacaaacaaacaaaagaatgtgtgcgtgtgtgtgtgtttgtgtgtgtgtgtgtatgtgtaagtttttacccacaattcctgaatcatgaccctgacctacttcctggggtagtaggtcacaatgacacaggagaagcggagtaaaacactgatgttttatgatggattcaccaatcaacttgcttaggaaatactgcactgcacaagctaaattggtgctgcccctaaatgacttagcaaactacccaggcttgttaggaactgtagggaaaattttgtactctgaacataattgcagtttggacttgctgagaatatatttctgttaagatttgttccctaagattggcaccaattaggctccatcctcatctcagagaacatgcctctacctggcttgttcagaggggctggcgctggctagccgccaccattaattaagttctagtcagccattaagtcccagttctgttgtcaggaagagagaactcaaagcgaacaatgctgttatacttccaaagtaactgtgacaataactttggctgtgtaaatctcccagttgtctaagatcatcagacttgcaggctcttttctccacttagttgctgagtgtaacttggagccaggaccttaaagagaagtacagatgtgacatgctaaggactgaatccgatgtcatttgttacaaaggtctgtttgtggctgctttttgcactcttaaagaatgtctttttcttattcccctgagtgtttggactaagtccaggaactgaacaagactcagtacacacatccaaccctttgccccagaggaaggaatgctgtgagggaggccgagaaaatctgaaccaaccgggttttctgggtctccgcatccagtctgttagcaatcctgcccgggcaaacgtcataaaaacctcagaaaggactgggctgggagacagcttccaaacagtagagcttcctgcaggaggtggctcagcagtagtctacttgcctagcaagtacctacctcgtgctagattcacttattagaggaaaacacacacacactctctaaacagccaaatatactacggagtgtggaagctaccggattccttctgcatggtttgtcctgagccccatcagttgcctagcaaatttaacaatcatagaaggtggaagtggtatattgggttgctttacctgtcaatttgacacagcccagaatcacccaagaaggtagtggaaactgagaaattgcccacatcaaatcggcctgtgggcctgtctgtggagcggggtgggggtggggtggggtggggacaacattccttaggctggtggtccagggccttataaggaaactccccagcgtgagcccaaacgtgccagctagcagtactcttccactgtttccgcttgagttcctgccccgcccttcctcaccatggactatgctcctgaaagtgaaccaagccctttctttccactgagttgctttatcagtgtttcatggtagcaacagaaaggaaaagagagcagatggggcccttggtttctacactgtactcctatttttgtatcactgtagccaaaatatccaacagttacagtttaaagaaagaaagaccaatttgggctcagcatttcagagtggtccatcccttcatggctagatgagagaaggtgaaagtggatagcagagtctgttcaaatcatggaccagtgagcaagacaggcaggcatcagcaacaaagtctaactgccctgcccccagtgacctaatgacccacttccctccggtaggcctcagcttccaaagcttccccaagtgacatccaccaggcagggaacgagggctccatggcaggaaccaacaagggacattgcagattgaaagaatcacacgggctgtcctccagaaacacagaagaatgtgtgtggcttgtcactgacagccacagacgtgggggagcagtggggactgagcccttaagctacgtgtcctgacgctatacccaagtcacagtatcagagtggtgtcgtgactgaatccagttagaagaacactggctggtgtctgagacagaattacttgcttggtggtggaagatgggtgtgtgtgtgtgtgtgtgtgtgtgtgtgcacttgcagatggccagcagaacaatgcaaggggaacaaaaaggtagttcattttaacacaactaagtaagtagccagtattggttcaaactttgagagtctgaccccaagtaatttattttaggcctatttaagcacagcaccacttgacaagacatttcctggtaataattaactcagttccacgtgcacggtaaagtttaagaagcgacttttgggaaactctttgtaaagtacatagcaatgtggtctataaatagattacatgtgctaccttctataaaaatgggttctacagattgacaagctcaagataagggtctggggaggatctagtgtggtctcggccacacagagaacacaaaagtcaccaggctattctctattcccagctttctgggctgagaacaggttatacaactctgtctttgaagagataatgtgtatttaacattcctgtttaacccggtgtttatctttgagcacaaagacctccacgcctcccacacaacacacatactcctatacgtacacatatgcatatttaatgaatggatgggtgctttgcctgcatgtatgtcagggtactatttgtgtgcttgctgcccagagcggccagaagagagtgttcgatcccttgagactggcgttacatatggctgtgggtcctaggaattgaacccaggttctctgcaagagcggccaatctttcctttttttttttttgtttgttttttttttttgttttttcgagacagggtttctctgtgtagccctggctgtcctggaactcactctgtagaccaggctggcctcaaactcagaaatccgcctgcctctgcttccaaagtgctgggattaaaggtgtgtgctaccacagcccagcttttttttttttttttttagaccaggtctcactaagtagcccagggtggcctgggactcatgattctcctgcttcagcctcaccagagccagttcaggaattacaggtgtgcaccaccacacccatctcttcctcgtgatttagtttgattccccaggttgctcaagatttggacaatggaagtgactttcagtgtgttcttatgctggtcagatgtgttgtagagagaatatcttatggctgtatgggcgtggcacctgtcaataataaatctgatggcctatggcttaggcaggaaattggaggtgggacatctgggaggagaaaggattctgggatagagccaggtgggaggttccacgtggcagcatgtagatcagaatgaatgggttatattaaattatgatctagtgagagaagcgcctagctataagccagggtatttgtaaatatattttgagtcttatttctgggagcatggagtaggagaatgaccaaacttctacaatgttttccttttttttttaagatttatttatttatttattatatatgagtacactgtagctgtccccagacatgcaccagaagagggcattggatcccattacagatggttgtgagccatcatgtggctgctgggaactgaactcaggacctctggaagagcagtcggtgctctcaaccgctgaggcaactctccagtcctacaatgtcttctaaacacatctctcttttctggttcaacaagacatttcgggcactacaaccttagggggccatgaggttatgtgccatccgttgtagagcacagtgcatgacgacgcttgcacaaaccctaaagagcccaagtttgagacaagggtcagaaattaactgcatggctccacacagaaggaaataaatatcggatgtggtagctacttttctcattgctgtgaccaaacacctgcaaggagggagagttccttctggctgccagtttgaggggaaagcatggccgtaggagtaggagctgagaggtaaggtcccatcacagcaccaagcaggaagcagggatggaaatggagagaagcctgaggaaaagaaggtccagtgacaggtccaaagtgggatccagctcaaggggaggccccaaggcctgacactattactgaggctatagagcactcacaaaaagggatcaatcatgactgccctgcgaaagacccaacaaacagctgaaagaatcagatgcagatatttgcacccaaacaatggacagaagcagctgacccctgttgttgaattagggaaggctgaaagaagctgagaagaagggcgatcctgtaggaggaccagcagtctcaatctgaattcctgagatgtctcaaacagtggaccaccaaacagacagcatacacagatgacatgaggcccccgacacacatacagtagaggatggccaggtctgtgtctattcagagatgatgcacctaaccctcaagaggctggaggcaccagggagtttagaggtcaagtggggtgggggtttggggcatccacatggagatgggttggggtggggaggaggtgtgttatggggagcagttgaagcgtggatgggggtgaggggtggggaatggaatatggagtgtgaaaaatgaattacaaataaaattaaattttaaaaaatatcaaaaacaaacaaacaaaaaagcactggctgcaagctgggcatagtaactcatgcctttaatcccagccctcgggagacagaggcaggcagatgtttgtgagtttcaagctagcttggtctacatagtgagaccctgtctcaaacaaaacaaacaaaaaagatcactggctgctctcccggaggacacaggtttgatatccagcacccaccatgacagctcacaaccatttgtaactccatcccggggggggggggggtctatctaatagcctcctttggcctttacccccatgtggtgcagactcagctagggctttataatgagactttgttttccataaacaaaacaaaaaacaacagggaaaacaaacttgagagcaaggtaaaatctgtttggggctgttgtgccccatgactgtgagaaggtttttttaaatatatttttaaattatatttaaatatattttaaatttttattattttatatgtaatgggtgtttggcctgcctgaatgcctgtgcatggtatgtatgcccagtgctcgaggaggccagaagagtgtatagaaccccctggaattggagtcaccatgtaggtattgggagttgaacctgaatctcctgggaaagcagtggacgatctgagctgctaagccatctctctccagactgcagtgctgcgtgtgtcctgtacatgctatgtgtgagttctgccactggggggggggttatttattacatttactgtgtgtgcacgtgtgggggtggggtttgggtgccatggtacatgtgttgcagtcagggaacagctttgtggggtcagttctcttcttccatgattactgggttctggggattgtatcaagtcaccaggctggtgggcccaacagccttacctatccatgtctctgtcggtctctctggctggattactttaatcttcttcttcctcttcttcttcttcttttttttttttttcctttagttttttgagacagggtttctctgtgtagccctggctgtcctggaacctactctgtagaccaggctggcctcgaactcagaaatccgcctgcctctgcctcccaagtgctaggattaaaggtgtgtgccaccacgcccggcagtcactgatcatcttcttcttcttcttcttcttcttcttcttcttcttcttcttcttcttcttcttcttcttcttcttcttcttcttcttcttcttcttcttcttctcctcctcctcctcctcctcctcctcctcctcctcctcctcctcctcctcctcctcctccccccctcctcctcagaagacaggatttcacgtacctccggctggttctcagctctttaggagtggaggatgaccttgtactcagttctctcagaactgggattactccaaggactgagaagtgaggcgcagtggcttcattagctgagctggctttgtccttgcaccactagggaggattagccaatttagcaggccaacccgaaggaggctcacttcataaccctttctgtcccagtgtagccccagcattccaggggaacccatggctctccaggaagcccttacggcagtgtcccagtctcctggcctgctttcattacttctttccttggctataaccttgggaatcaaaaaacagggagtttctgtgacagggcagttgttgcccacacccggtttctctcagggagtatacataattataactgtgagaaggcataggactaaaatgactaagatgtgccactggagtcaaaggcagttggatgaaaaggagcaaagacagatggctcagccgtcaaaagtactagttgcttctaaagagggtctggggggttcaattccaggcacccacatgtcagctcacaaccggtggggaactccagtacctggcgatcgggccttcttctgacctcggcaggcagagaatcagcagatttttgggttggtgtgggtgtacaggagctgtgagagtcagatgacctgcgtgtggtctagatatgtggccccaagctgtccttacactcaaaactccctgcctcagctgcacagctgagcctggtgtggggcataacccctgtgcttaaccacggttctctagcgttctctgataggcacacagacatcacccagtatcagtttcgacatcagacacttagcagctgtggcatcttaggtcctcgagcctgcttacccatctgtacaacaaacatgtctacatttatcttccaaacactcggcaaatggagaaaactgccacgtaaaccgcaagcgactggaggacttattttcctggctagggtggaaagtgggacagagggtgagcaagaatgcggagctcaaacaacacagccgctcaacgttcttcccattccgttccagactcggttatcttcctcagtgccccctttcccccagtgaaaagaggtcgtggtccctttaaggtccgcccctccctcccccaaaacttcccagtgtctgctcttttcgatcccggacggccggccaagctcgccgccgagctggtaggggacagggccaaggggtcggggagggatgtgggggcgtggggggacctgcgggacgcacgtcgctgcgccggcgggagggcgggggacaggctgcgg

SEQ ID NO: 1881 - DNA, 2905 bp, Mus musculus
ctttcacttcctgctgctctggctcccctcggaacagctgagcagccttgagtcttgtcttcctccatgccagaggccagagcatggctcactggtgcctggcagcatgaggctagcccagccggacatggtgtctgcagcccctactgaagtggacaggctggtttggccactagcggatggagcagacaagagcccactaggggtcctcagcaccacagagccacttcttcgactgcagaggacacagagagtgtgggaggtccccgagctggatgctcagtatgccaaggcctttctagagctgtggccactggggagcttcctggtcatcggacatgagcctggccaggtcctgatgttgaaggcaggaccttcttcaggagatatcaacacctatcaaattcagaggtttcctggaggtgtgtccctggaatcctccaacctctgcatgcccgactgtccccatctcctggcctttctgtcagccagcagggacgttttgccaaggaccctgctcttgcccacgcctactgtgggggctggagataatcactcagatccccatcggcttggctgcatccaggtggacacctcagggagggtgctgtctgtagtgaaccagctctacctggagacacatggaggctggggaacagagactccacagcaaacagagccagagactggacagaaatacagtctagcccccaggaagcccaccccacaccgggtctcctgggtggaagaccctttgagaccggaagctcaccatactggacaggaagtgcatcatcctggagcagacgctcactcccttgggtcggaagtgcacttttcctgtcctgctctagaagaggaggaagtgaacaacgactgctacaaagatgaagacgaggaaggttgcgaggatatgctcactgcccacatccgtgctctggccaggacccggagcagctatgtagccaggcagtaccgatgccttcgggcacgcctcatctcagattctggaaatccctacagcccaggggacccggccacagagctgcttcaggatgtgcgccagctcctcactgacctccagaattacctggcaaaagaccccgacgtcagagctgtctttgggaacaggggacctagcatccttcgggaagaagatcttggccccgctgtggaggtggccctgtgtcgagcggttctagagcccctgaagcccgccctgtggaccaaactccgaactctcagagcccaggaactacgacgactgcgcaggcgccaaatagccttgagggtaggagcggggcctgagggacagagcccggccttgcggaaccggaaccgtatccacgcacgccttgctcacttgcatgcggcgtgcgccccgcgccgcaaggtggcgctgttgctggcggtgtgcagcgacgtctacgcgggcctaggcggtggcgagaataaagagcccctgggggctgacgcctttttacctgccctgaccgaggagctgatctggagtccacatattggggaaacacagctggatgtggagtttcttatggagctcttggatccaggggagttgcgaggagaagctgggtattatctgaccacgtggtttggggctctctaccacattgctcactaccagccagacactggccgtgcaccccaggggctcagctccgaggcccgggcctccctgcgccagtggcatcgaagacggacactgcaccagcaagcccagcccacagcccaggccaaccagccttttgaggagccatgggcaataggggacccatgaaaactggagttctcaaaccccagtcacttccgaaccttttgacccactcctctgctaagcaagattctggaggcatctgggtcagcatggagggcagggcaggaaaggagacgtgcctcctgcaatgtcttacttcctcctcctcaattcacctccttcgggtctgtccagatgttacctcaacgaggcgctccccagcaaacaaaacccacacccagacagtactacaactacaaccctctcgcctgaatctctttggggcaggtagaataaaggcaccgtccccaaaggtgtcttcatcctgatcctatctgtgactgtgacacttaacttggtcaagtgatcgttacaaaaatgacagcatgtctggacctgagatgggagcttattctggattcttctgcagctcatgtagttaggagggtggcagaggtacagggaccatcatgagcttacgcctccagctatacagcagaatgaggtggaaaaagtacttgaggccaagaccatgaggacactgtggcactgaaacatagtaggtgtttaggaacacctatgtgccttgaaaacatatcactgccctaatctctgtgaccgtatttggcaaaagtgtttgtgcagctattattattatttttgttgttttggtttttcaagacagggctcctcggtgtagccctggctgtcctggaacttgctgtgtagacctggctggcctcgaactcagacatcagggattaaaggtgtgtgcccccaccacccagctcgttcagccatcattgaagatgataaaatgagggacagtgccccggggactgtgtctgtgactccaggagcacccacgccatgcgggagacaaggagaacgaacggatgggaacaagagagacgggagatgctgggctactccaggaaagcttctccccactgccaccccccctctgagagctgcagaagtcatggggccctgctgtcaacctggtttctgtgagattagtgatgtcagaactctgacctccagaattgtgagcaaataaattcctgccgtcttaagacaccaaggtggtaataataataataatcaataaaatttaaaatgtactgacga

SEQ ID NO: 1882 - protein, 557 aa, Mus musculus
MRLAQPDMVSAAPTEVDRLVWPLADGADKSPLGVLSTTEPLLRLQRTQRVWEVPELDAQYAKAFLELWPLGSFLVIGHEPGQVLMLKAGPSSGDINTYQIQRFPGGVSLESSNLCMPDCPHLLAFLSASRDVLPRTLLLPTPTVGAGDNHSDPHRLGCIQVDTSGRVLSVVNQLYLETHGGWGTETPQQTEPETGQKYSLAPRKPTPHRVSWVEDPLRPEAHHTGQEVHHPGADAHSLGSEVHFSCPALEEEEVNNDCYKDEDEEGCEDMLTAHIRARTRSSYVARQYRCLRARLISDSGNPYSPGDPATELLQDVRQLLTDLQNYLAKDPDVRAVFGNRGPSILREEDLGPAVEVCRAVLEPLKPALWTKLRTLRAQELRRLRRRQIALRVGAGPEGQSPALRNRNRIHARLAHLHAACAPRRKVLLAVCSDVYAGLGGGENKEPLGADAFLPALTEELIWSPHIGETQLDVEFLMELLDPGELRGEAGYYLTTWFGALYHIAHYQPDTGRAPQGLSSEARASLRQWHRRRTLHQQAQPTAQANQPFEEPWAIGDP

SEQ ID NO: 1883 - DNA, 22483 bp, Homo sapiens
tgtcagagcctggtgaagcctggtgagcctctggccagggacctgcccaggtggatttgggtgggggtcccctcctccccctgaccccctcccaaaggccacacccgcacacatctggccacctctgtctctctgaacagtgccccagatccatcctggggagaatggggtctgtgcccctggccggtccccactgctcccaactcccactgtggcctccgggtctgccattgctcccacctgtcctctctgcctccccatgtcactgtctctgtccgtccatctgtctccacctcagatatcgtcttttttggtgagagcctcccagcgcgtttcttctcctgtatgcagtcagtaagtggccccccagcctccccgcatccccaaccgccgcctccacctgtgctgggccccatgggggcagcctgggccctgcctcaggaaaggtcacctccccagctatggggggcggcagggaggtttgctgctgggggcgggggagggagcggtggcgcagcctgggcggaggctcccaagctcacgcccctccccgcaggacttcctgaaggtggacctcctcctggtcatgggtacctccttgcaggtgcagccctttgcctccctcatcagcaagtaggttgggggctgtggctgggaggacggctgggcacccagggccaggacagaccctgaccccttagctccccctccccacagggcacccctctccacccctcgcctgctcatcaacaaggagaaagctggccaggtaagagcccttcttcaagcccccgtcgtcacaggctcccccttccctctcacccttttcctcagagggaacccccactgtggaaccccagcactttgcattcctcagctcagaacctggggctctagaatccagaggggtcgggttccaggcctctgggacattcactgcccttttgagcaagtgatagaattccaactcaaaccagctgaagccagataggaaggccgggcttccagggactgaggaggtgggagggggtgcaggggtcaggagagacagtgcggggggcggggttgggtccacgctctgggtctctcaggtctgtttttcctgggcagcctcactctagggcaggtgctccctcctaggtgttcccctcaggggaagtaggcagggtcaccgggcaagcagcgcacgctgtgggcagacactgtcccaagtcttagcctgcgtgaactcactggcgccacaaccccatcgcggttttgtgatcacccctattctacaggaaactaagacacagagaggacaagtcacttgaccaaagtcactgagctggctgggcgcaatggctcacgcctgtaattccagcactttgggaggccgaggcgggtggatcacctgaggtcaggagttcgagaccagcctgaccaacatggtgaaaccccgtctctactaataatacaaaattagccgggcatggtgctgggcacctgtcatccaggctactcgggaggttgaggcgggagaatcacttgaacccaggaggtggaggttgcagtgagccgagatcacatcattgcactccagcctgggcaacaagagtgaaactttgtctcaaaaaaaaccaaaaaaacaacaacaaaaaaaaaacaaagtcacagagctaggatacaaacccaggccacctggctccagggtctgtgctcttagctctcccttccctgctcctgcccctgacccaccccctccctgacagtcggaccctttcctggggatgattatgggcctcggaggaggcatggactttgactccaagaaggcctacaggtgaggccccgccgggggttggggcagcctggaagggacagggtgaggtgggagcgggggcacgaaggcagatgagaggagcaggcaggggcgagcccgcctgggaactctgatctcctgctgcaccgcagggacgtggcctggctgggtgaatgcgaccagggctgcctggcccttgctgagctccttggatggaaggtgaggagctgagcaaccccagcctgtcctgagccccatccctggaccctctccccaccccatgggtcctctgaccccatgatgcacagtgacctttgacttctgtgacctttgctcctgcagaaggagctggaggaccttgtccggagggagcacgccagcatagatgcccagtcgggggcgggggtccccaaccccagcacttcagcttcccccaagaagtccccgccacctgccaaggacgaggccaggacaacagagagggagaaaccccagtgacagctgcatctcccaggcgggatgccgagctcctcagggacagctgagccccaaccgggcctggccccctcttaaccagcagttcttgtctggggagctcagaacatcccccaatctcttacagctccctccccaaaactggggtcccagcaaccctggcccccaaccccagcaaatctctaacacctcctagaggccaaggcttaaacaggcatctctaccagccccactgtctctaaccactcctgggctaaggagtaacctccctcatctctaactgcccccacggggccagggctaccccagaacttttaactcttccaggacagggagcttcgggcccccactctgtctcctgcccccgggggcctgtggctaagtaaaccatacctaacctaccccagtgtgggtgtgggcctctgaatctaacccacacccagcgtagggggagtctgagccgggagggctcccgagtctctgccttcagctcccaaagtgggtggtgggcccccttcacgtgggacccacttcccatgctggatgggcagaagacattgcttattggagacaaattaaaaacaaaaacaactaacaatccggtctggcctcctgtttctttctgtgggcacccagggaaatctctgaagggagggggttagatcttgggccactaaggaaccagaaagtctccgggatccagagtgaggggtaacaagagggtcctcacgggggccctcgtggctctgacccctggactcccagcctgccagtgtcccttcctctaagccccgtcactgaaggcctgaggccccagaaagagggaggaaagttgacttcagataccccagccccgcctcttccccctgcctgctcagcttcctctctccacttcctgctactgcaggcctctcctccgagaacaggtagggcccccaggaaccgagcatctggcatcttcagcccctgctgcctccctttggtatgaggcagctgccctgacccacccctgccacgcactgcccacagcctcctctcctgccacggtacacaagcaggcatctgcttccctctcccctcccctcccctcccttccttcctgctcttgcctgggcagggcacctgcgcctccctgcccacctccctccttcctaataacaccctggccttctggtcaatggcctaatgtatttgtttagctgcctattatccatatgctacacctgccccaaacaagaatggaaggccctgaggggaggagcctgtcctgttcatcaccctctctccagggcagaggcacctaattccagcctgtattcagtaaatactggatggatggaaggaaggaaggaagggagggagggagggagggaggatggatcctcccccgatccaggtctcctgctcctgggactgctgctgggataagtgccaccctaagtgataacctacgtaggactctgtacctggttaggagctggggcctgatgggtggatggagagagagaggaacagatgtgtgataaagcaagatgagtaaaatgttcatggtagaatcttggtagtgggcatagggatgtttcctgtacaattctttcagcttttctctatgtctgaaatttttcataataaaatgctgggggaagagattcagtggcccctccatggtgtgggaagggaggaagaggggatgttattacctttccagatatagggactgcctactctgggccaagaacttttccaggcgctgactgggttttgccaagggctggcccacatttacacagcccccatggctgttaaaaatcttaacatatttcctaccacttcagtaaagagctattgttttgagtcctctccccacaccgcaagacacactggcctctctcctgggatccccagattccccaccatccggtactaaagatttaacccctgccggccgggtgtggtggctcatgcctgtaatctcagcactttgggaggccgaggcggggggatcacttgaggtcaggagtttgagaccagcctgggtaacacgtcaaaaccttgtctctactaaaaaatacaaaaattacccaggcgtggtggtgcacgcctgtaatcccaactactcgggagactgaggcacaagaatcgcttgaacctacgaggcggaggttgcagtgagctgagatcgtgccactgcactgcagtctgggcaatacagtgagactccgtctcaaaaataaaataaagaattaacccctgccacggcaagcggcctctggggtccattctgattggtcagggtctctgccatattgattgtaaatatcttgaacatgacccgagggctagagcagctttgagtcttacctttctccctgccagaggccaggtcatgactcactggcttcctgcaacctgacgatggcccagccagaagacaaggcacctgaagtccccacagagggggtgaggtgaggctactagggctgaggctatgccctccttcccctgcatccagaaaccctttccatccaatacctccctcactacagaatcctgaatcacatctctgagcctctgccctgggcctgccccttcctgtacctttgacctcacctcattgtcccactgcccacctctgacccctgactccctggacactgtccatcccaggctggtcccaccacaggtggacaaagcagacaggacccctctaggggtcctcagcaccctagagccacttactcgcctgcagaggacatggggggtgtggcatgtgccagagctggatacccaggatgcggaggcccttgtggggctgtggccactaggggtgagtactcacagctgggggcccatcctgacaccctagattaggactctgctggttactagtgacaaacacgacacaaattgggcaaaccaaaaaggctatttattgctgggtgcaatggctcatgcctgcagtcctagctactcatgaggctgaggtgggaggatcatttgagctcaggaggtcaaggcggcagtgagctgagatcatgccacttcacttgagcctgggtgatggagcaagaccctgtctaaaaaaaaaaaaaaaaaatgtaatttcaagaagctctggatcctgaacttcagaacacttataaattcctcttcatcccatttcttggctttgctttcaactgcggggaattttggatatttgggactgaatataacaaacacctgtcctacagcggtttaaacaaataggcatttatcttcctaacataaccaaaaaggcagctgctggctttagatcagcagtgcagtgacattgaggccagcatagctataattctcttggacttctctcacagcttcccaggggctgccccaggcccaagcacctgcgtgcattccaggcaggaagaacagaggcaccacttgcatctgtttattttacaggaaaaataaaggttttcttttctttttttttttaattttgagagtttcactcttgttgcccaggctggagtgcaatggcatgatctcggcacactgcaacttccgcctcccaggttcaagcgattctcctgcctcagcctcctgagtagctgggattacaggcatctgccacaacgcccggctaattttttgtatttttagtagagatgggatttcaccatgttggccaagctggtctcaaactcctgacgtcaggtgatccacccacctctgcctcccaaagtgctgggattacaggtgtgaaccaccgtccccggccaaaataaaggttttcacaactgattcagaaaatatagatggctggccgggtgtgctgactcacgcctgtaatcccagcattttgggaggctgaggtaggaggctcgcttaagcctaggagttcaagaccagcctgggcaacagagcaaggcccagtctctattaaaaaaaaaaaaaaaagaaaaaagaaaaaaaaaaggatggggcccaggtagcaatatttttaatttttttatttattatttttattattattttttgagatggagtctccctctgtcacccaagctggagtgcagtggcacgatattggctcactgcaacctctgcctcccgggttcaagcgattctcctgcctcagcctcccgagtagctgggattacaggcgcccgccattacacccggctaatttttgtatttttagtagagactgggattcaccacgttggccagggtggtctcgaactcctgccctcaggtgatccacccgcctcggcctcccaaagtgctgggattacaggcgtgagccaccgtgcccggctgtagcaatatttttaacagctctcttgggacgtatacagccagagctaagaaccaccacctatatcaatcatgatccatatatcaatcatattcatggctgggtatattaatgccgtgaacaaggaattctgcaaggaatgtggaataggtttggagacgacagcaaacgggggctaccacagcttcctcctcaggagggtatcatccttcccagctcagagctgtatcccaccagtttagcaacaccagtgtaacaaatgaagtctttccaaaagagctccagcacgcagtggctcacgcctattatcccagcactatgagaggctgagaagagcggatcacttgaagtcaggagttcaagactagcctggccaatgtggtgaaactctgtctctgctaaaaatacaaaaacttagccgggcgtggtggcagtcgcccgtaatcccagctacttgggaggctgaggcaggagaatcgcttgaccccgggaggcggaggttgcagtgggcagagattgtgccactgcactccagcctgggcgacagggcaagactccgtctcaaaaaaaaaaaatcctgtggaagatgtccattggctgagcttgagtcacatgcctgttccctgaaccaaacagtgggccgagagcaccctcatcctgttggctagatcaggtcatgggcccaccccgccagggcttgggggaagtcagcccaacacacatggactgaaagtagggagagggtttccctaaaggaaatttggggtgtggaacccaaaataagggaaatggatgctagtcaggcaaaagcaacagacatctgcgcacacctttgtcacgctggcctttgtctctatcccccagagtttcttggtcacaggacgtgaccccagccaggccctggtgttgaggtcaggacctttaccaggagaagtcaatacctaccagatccagaagattcccagaggtaaggcacctcccctgaggttccagcccacagtcaattgatcactaagaactatcagctggaccggcgcggtggctcacgcctgtaatcccagcactttggtaggtcgaagcgggtggatcgcttgaggccaggattttgagaccagcctggccaacatggcaaaaccccgtctctacaaaaaatacaaaaattagccgggcttggtgacgcgcgactgtaatcccagctacttggcaggccgaggcacgagaatagcttgaacccaggaggcagaggttgcagtgagccaagatcacaccactgccctccagccttggcaacagagggaaaccctgccaaaacaaaacaaaacaaaaacacctgtcagctttgtttccaaaatatctgatgaatatttccaatcctgtctccctttccttcccacaatccattctgagcccaagatatttttcagtatcaatcagatgttatacacccctgccccaaatcctgcaaagagcatgcaacgtccttagatacaaaatgtaaactccttgtcatgatctataaggtgctgtgtgatgtagttccttcctgtctctctatctattgcccctcattcactctgccccatacacactgttacactctgtgtgtctttagcatgctaagtgtgttccagcttcaggacctctgcttgggttcatcctgtatgaatgcttttcctagaggggctggtttagtctccatcctccaggcctctgcagaaatgtaacctttcttgaccatcatagttaaaagatggcaccttggtcactttctttttcttttttcttttagacagagtctcactctgtcgctcaggcggagtgcagtggcccaatctcaactcactgccacctctacctcccaggttcaagcaattctcatgcctctcagcctcccaagtagctgggattacaggtgcacaccaccacacatgactaattttttggtttatttttatttttatttatttttttatcgtactttaagttttgggatacatgtccagaatgtgcaggtttgttacataggtatacaggtgtcatggtggtttgctgcacccatcaacccatgatctacattaggtatttcttcctaatgctatccctcccctaggcccccacctcccaattttttgtatttttaatagagatgggttttgccatgttggccaggctggcttgaactcctgacctcaagtgatccacccacctcagcctcccaaagtgatgggattacaggcgtaagtcaccatgcctggcctcttggtcactttcaatcactccattttcttcatagcactcaatacaatatccactttgtttactcgtttttaaaatttatttttatttatttatttatttatttattgagatagtctcacttttgtcgcccaggctggagtgcaatggcttaatctcaggtcacttcaacctccacttcccgagttcaagtgattctcctgcctcaggctcccaagtatctgggattacaggcgcccaccaccatgcccagctaatttttgtatttttaatagagatggggtttcgccatgttggccaggctggtctcgaactcctgacttcaggtgattcacccacctcggcttcccaaagtgctagaattacaggcgtgagccaccgtaccctgactgtttattcatttatattctgccttttccccctccgccccccgctaaaaggtaagctacaggaaggcagtgaacttgtctgccttttgataactgtatctccagtgcctagaaaggactaagggctcagtaaatgtttgtctaatgaatgaatccttgttggtggcataagtggtacacaagagtaaagatggagactccaaagagtgggaacttccctgttctgaaggtccctggggggattctgaaggaatggaggagcaagagcatcccaggggacagaaaactgccaccactcaagtttactttctccttcttcctccccccaccacaggtgtgtccctggaatcctccaacctctgcatgccagacctgccccatctcctggcctttctatcagccagcaggtacaggtcacccatctgaggcactaagggggacccttccctaagacaccccactgacactgtggctcccacctctttattctcagggatgttctgcccagaaccctgctcttgccccctcccactctagggcccagagatgaacacacaggtgaggcacggttctctaaagagggcacagccaacctgccaatttccttgctccaagggaatgaatggggctttggggcccagactactgggtttgaggagaatatagaactggagactagagagagctgggggcctggactttgtagtcccagagggaggaggggatgggggcctgtattcctaggtcctaacagaggagaggattggaggaggaaggaactgggggtcccggacgcctgggcctaagtgagaaggggactaggggcctggactcctgggtctgactgaggaggggccaggagctaagcctcagcacctccagcaatgaagctgggaagtaagtctcctggcgccttgaggggaccagggttggtcccttggatacctaggacaccttctcacttctgctggctccagatcctgtgcagatcggcagggtccaacaggacaccccagggaaggtgctttccattgtgaaccagctctacctggagacccacagaggctgggggagggagcagacccctcaagaaacagagccagaggctgctcagagacatgatccaggttagctgggcggggccctgggcctctgaaggggagggagctgctgcccctgttctaggggaccgaatgccctcctcacttccagcccccaggaaccctgcgcctcacggggtctcctgggtgaaaggcccgctcagcccggaagtggaccatcctgggccggctctcgccagcctactggaagaggaggaggaagaccttgaaggaaaggaggaaggaagggaggacgaccctgaagaggaaggccctgaggacgtgctcaccattcacgtccagtctctggtcagggcccggagcagctacgtggccaggcagtaccgaagccttcgggtgcgcatcgcctcagattctgggggtccccacgggtctggggacccggccacggagctgcttcaggatgtgcggcacctccttactgacctccaggatcacctggcaaaggactcctacatcagggctgtctttggaagcaggggtcctgggctccccaagaaggacgaggatccaggtaatgggaggactggaagggagcccccacgggttcaagtgtgcaacttcgtcctctccatcggtgcgcacacgtttccttctgcacccacacgcccttcctacacatcccacgcgttctatcgcccacgtatgcgcgcaagttcacacccaggctaactcttccacacatgttcacaaccatgtctacactcacgggggaccagagctaggcaggggtggctgtgggccagggtgggttgttggagcgcgtgggtgggcgtgggacaacttggcggtcctgtgctcacccgtcccccacaccccgcaggccccgcgctggagacggcggtgtgccaggcggtgctggcgcccctgaagccggccctgtggacacgactccgcacactccgagcaccggagctgcggcggctgcggcggcgacagacagccctgcgggcgggggcggggcctccgggggcacaggggccgggaccggaagggcagagccccgcccccgccttgcggagccgcatccacgagcgccttgcgcacctccacgctgcctgcgccccgcgccgcaaggtggcgctcctcttggaggtgtgcagagatgtctatgcgggcctggctcgaggcgagaaccaaggtaagggaggggtcaacgtctagcgtggtggggagagccttgagagttggagccaggcgggagagggtagcactggtgggaggaatctatgcggtcctgaagattctggtaggaggcgctgtcatgcccgacaaggtggaggggcagccagccctcgtggtcctggggatcggatggaaggtgtctacgcgccttgagatggggatccatctcaagacctttcctctggttttcccagatcccctgggggccgacgccttcctgccggcgctgaccgaggaactcatctggagcccggacattggggacacgcagctggacgtagagtttcttatggagctcttagatccagatgagctgcggggagagggtgagcccccaactccagaatgctggagcccagcgatccagtacctccgggatcccaaacagcctccccccgcagcaggagggacggcaggcaaactgcagggggatttggggcgaccagggaagccgagagggcggagctgacttccctttctgtccccagctgggtactacctgaccacgtggtttggggcgctgcaccacattgcccactaccagcccgaaacagaccgcgctccccgggggctcagctccgaggcccgcgcctccctgcaccagtggcaccgcaggcggacgctgcacagaaaggatcatcccagagcccaggtgactgcccatctggctgcaagtagaagggagggtgagacctggtgcccttctgacccagctcccacctctccccacaggccaacctgccctttaaggagccatgggcagaagagactgtgacagggaccagtgacaactaggggtttcacacccctccgttcatgcctgtaatcccaacattttgggaggccaaggtgggaggattgcttgagcccaggagtttgagaccagcctgggcaaaacagtgggacccccatctaccaaaaaaaaaaaaaaacaaaaattagccgggcgtggtggcgtactcctgtggtaccagctactcaggaggctttgcagttttagacaggcgtatcagagaaagcctcactgaggtgacatctgcagaaaggcctgaaggaggggaggggaagggaggagcagagtgggtattaggaagagcattccgagaagcaggatgagccagtgcaaaggcccagaggtaggctgttcccttttcctgggacccctccctcctccttgctgctcctaaaccacataggtcaggagtctggactgacccaggtacgtctggcatcttgcttgaggaacagggggttttgttttgttttgaaagaacgtctctgtctgttgcccaggctggagtgtagtggcatgatctcggctcactgcagccttaacctcctggctcaaacaagccccctgcctctgcctaccaagtagctgagactacaggcacctaccaccgtgcctgtctaatttttaaaattttttataaagatgaggtctctctttgttgcccaggctggtctcaaactcctaacctcaagcaatctgcccacgtcggcctcccaaagtgctgagattataggcgtgagccaccgtgcccaattgtgatcgtttttcccaaagaatgtatcacatgctaacaaaccatatatttatgtatttcattgttcatagtaactacaatttaaaaaactaaaaagaaacaagtgaggccgggtgcggttgctcatgcctgtaatcccagcactttgggaggccaaggtgggcagatcacctgaggtcgggagttcaagaccagcctgacaaacatggagaaacccgtctctactaaaaatacaaacttagccgggcatggtggcgcatgcctgtaatcccagctactccggaggctaaggcaggagaatggcttgaacccgggaggcgaagattgcggtgagcggagattgcgccattgcactccagcctgggcaacaagagtgaaacaccatctcaaaaataaataaataaataaaaagaaacaagtgaagttaacgttaataataatatatttgatttaacacaatgtatcccaaatattatcacttcaacatgtatccatattaaaaagttactgacatatttaaaactttgtatgtttgtgtgtgtgtatgctaaagctttgaaatttactgtgcattttacacttaatcacatcacagtttggactagtcacatttcaagtatgcactagctacatgaggtatctatctgtgtctatacgtatagatatatctatatatagatagatttatatatttacaaaaataaaaaataatttatatataaattaaaatatttaatttataatcataataattatattaatttataaaataatataaatattataaaacaataatataataatttatatatatataactttttttcaatttgtaaataaactggacagcctccaaaccacaataggttcagagaggctcctgacgttggcttttttttttcttacctcacatgtgtagcagctggactgaccctggctgttcgaagagccctggccagttgtcctgtggacagtcccagtttctggcctcgtctgctgcttcctcatgattaaaatctggtcttgcagctgtggggaagaatactccgcagggacgctgtgtccttctcggtacctgaatcccatcaggggccgtgattggtaaagctaactttgaccattgagctaaggagataggctagtcggctagagctgccatcaaaaagaccacagatggccgggtgcggtggctcacgcttgtaatcccaacactttgggaggctgaggcaggtgggtcacgaggtcaggagttcgagaccagcctggccaacatggtgaaaccccgtctctactaaaaatacaaaaaaaaaaattagccgggcatggtgacgcgcctgtaatcccagctactcgggaggctgaggcatggtgatgcgcgcccataatcccagctactcaggaggctggggcaggagaatcgcttgaacctgggaggcggaggttgcagtgagctgagattgtgccactgcactccagtctgggcgacagagcgagactctgtctcaaaaaagaaaaaaaaaagatcacagactgtgtggcttaaacaacagaaatttatttcctcccagtgaaactgtgtttgcaaaattatgactgagacagtgaaagagatctaacataattgactccatcttgcttctaatctccaagctgtccttgttcattcctagatgtaggccgaactaactttgagagaaagagtttatagtttaaacaaagttgaaaacagccctttccaaagcagaactccctctttttttctttttttttttttggtgagacagagtctggctctgttgcccaagctggagtgcagtggcacaatctcagctcactgcaacctccgcctcccgggttcaagcaattctcctgcctcagcctcctgagttgctgggactacaggtatgtgccaccacgcctggctaatgtttgtatttttagtagagacacagtttcaccatgttggccaggatggtctcgatctcttgactttgtgatcagcccacctcggcctcccaaagcgctgggattacaggcgtgagccgccgcgcccaacagcagacctccttcttgtctgggaactagattgcctttgtaggactaacattaatcataagattagaaattatggtttaggagtcatgcagccagaggctacaagattctgaccctccctaaactgctcctaagatcagtgcttggaacattgtgcagaccctgcgcttgatggatcagtgggcaccaccagatcaataaactggctcttctgatcttgtggccccctatacaggaactgactcagctcaagaagacagcttcgactccctatgatttcattcctgagcaatcaacactcctggctcactagcttccccccacccaccgcgttgttgttaaaagctctgatcctagaatgctcagggagactgatttgagtaataatacaactccggtctcccgcacagcgcacagcgggctctggctcctctgcgtgaatcactcttttttttttttttttttaaggcggagtcttgctgtgttgcccaggctggagtgcagtggcgtggtctcagctcattgcatcactggaagctccgcctcccgggttcacgccattctcctgcctcagcttcccaagtagctgggactgcaggcacgtgccgccacgcccggctaattttttgtgtttttagtagagacagggtttcaccgtgttagccagaatggtctcggtttcctgacctcgtgatccgcccacctcagcctcccaaagtggtgggattacaggcgtcagccactgcgcccagcgaattactctttctctattgcaattcccctgttttgatgtatgggctctgtctaggcagcaggaaacgtgaaccccttgggcggttacaatagttccagttcgaggtgtcagcacaatagacttccttctgagggctctctccttggcttgcagatggtcatcttctccccttgttttttgttttattttttgttgtttgtcggtttgtttttgagacagggtctcactctgtcgcccaggctggagtgcagtggtgtgatctaggcttactgcaatctccacctcccacgatcctcccacctcagcttagtagtactaggactacaggtgcacaccaccaccatgcccggctaattttcggtatgttttgtagaaatggggtttcgtcatgttgcccaggctggttttgaactcctgacctcaagtgatccacccgcctcggcctcccaaagtgctgggattataggcgtgagcctttgaattcttgcatcatctgtgggtgtcaccttgagacctggtgaccaacctgttcctcaacacctttcacccaatgcttttagcacttctctgttgttgctgaatcattggatttatttgtactattagagtctatgtgtgccaactgacactggttttccacttcctggagtgaaatgacatctcctgtttaaataaatgtgttgaattaaaaacaaaagagtgggttgatttaaagaaaattattaagcagtgaagtgggcaggtgatgcatgaatgtgtggcaaaaaaaaaaaaaaaagggacgtgaaactcaaatggcagctgtttggggtatcgctggttgagggcttagggtcaaactcaagctcctgtttgctgtggagctctgggcttcatgctagaagtctccccttgggctctcactcacatcatggaaaaataatttttaataaaggaagtgggccgggcatagaagctcatgtctgtaatcccagcactttgggaggtgaaggtggaatgattgcttgagcccaggaggtcaaagctgcagagctgtgatcacaccactgcactccagcctgggcaacagagcaagaccccacctcaagaaagaagaaaaaaagaaaaagggaggaagtgaacaaaggaagtggtcataccaagcacacagggtttttttgtttttgaaaaaaaaagttctagtccacgaaaaaagattcaaagagaaaagtcagaaagcccttttaaatatatatatatatatatataaaacttggggccgggcatggtggctcacgcctgtaatcctagcactttgggaggccgaggcgggcagatcgcgaggtcaggagttcgaaaccagcctggccaacatggtgaaaccccgtctccactaaaaatacaaaaattagctgggcgtggtggtgcacccttgtaatcccagctactggggaggctgaggcaggagaatggcttcattgaacccaggaggcagaggttgcagtgagccgagatcgtgttactgcgctccagcctgggtgacaagcaagactcagtcttaaaaaaaaaaaaaaaaaaaaaaaaaaaaacttggatattagcttttgattaagctgacttctaactataaagctctttaaaataactactcttaaatttcttattaccagattaaatttcttattaaaataaataaatttatttatttatttattttatttttgagatggagtgtctgtctgttgcccaggctggagtgcagtggtgcaatctcagctcactgcaacctccgcctcctgggttcaaacaattcttttgtctcagcctcccaagtagctgggactacaggcagacaccaccatgtccggctaatttttgtatttttagtagacatagagtttcaccatattggtcaggctggtctcgaactccagacctcaggtgatccacccgccttggcctcccaaagtgctgggattacaggcgtgagagccacagtgcccagccgtattaccagcttttagttgggacaaacagctggtattcctggcttgtgaacttcttcaccacaggtactctcccaagtgaaacctataagccttaaccaaggttatgacttaaccaaggatgcagggcatctacagccgtcctcccaagatctagaaccactgcaaagacagctcaaagaaaggaaagttttgctagctgccaatggagtacagctcacatttctctctggccatattctctagggtctccgctccacagagttgactgtttactcacaaaggcccaaaagtcctgaacgccctcacagatggaagataggaaataaaaagttgtccgtggaagcaaaaagaatcaatagcgagaccgggcgcggtagctcacgcctgtaatcccagcactttgggaggccgaggcgggtggctcacttgaggtcaggagttcgagactagcgtggccaacatggtgaaaccccatctctactaaaaatataaaaattagctgggcgtggtagcaggcgcctgtaatcccagctactcgggaggttgagtcaggaggatcacttgaacctgggagaaggaggttgcagtgagccaagatagcaccaccgcactccagcctgggcacaacagaccaagactctgtctcaaacaaaagaaaaaaaaagaatttcaggaactggccttaggaagtaaccgagggtgtgagtgtcccagctccggaaggaaagctgaacaattgatttacagccttgttgcacctgccagaacaccatgtggcccattactcaagataaccatcgcagccagacaagtgtcctcatgagtgctctactcctcacatgttttgcccagctcagcctgtatatcctcccgctaatgtcaattccagagctttgcctaataaaaaagccctactggctcttttccaagagtcagccagcaaatttgctctctttctcttgtgctgtctccctcatacccaggcataaactccaatgaagtcttgtctgggaaaactgttttggcctcaagtcaatttcagttgcattcagatcccaagaacttgtggtctgtaacactgggcgggggacagtgaaaaacagagggtttacaaggaggctcaagaaaacttctgcaggcgtggtggttcacacccatcccagcactttgggaggccaaggcagggggatcacttgaggtcaggaattcaagaccagcctgggcaacatgttgaaaccctgtctctactaaaaatataaaaattagcggctgggtgtggtggctcatgcctgcaatcccagcactttgggagaccaaggcaggcagatcacctgaagtcaggagttcaagaccagcctaatcaacatggagaaaccccgtctctactaaaaatacaaaaaaatttagccaagcatggtggcacatgcctgtaatcccagctactcaggaggctgagacaggagaatcgcttgaacctgggagatggaggttgcagtgagccgagatcacaccattgcactccagcctgggcaacaagagcaaaactccatctcaaaaaaaaaaaaaaaaaaaaattagctgggcatggtggtgcatgtctgtaatcccagctactagggaggccgaggcaggagaattgcttgaacccaggaggtggaggctgcagtgagctgagatcatgccactgcactccagcctgggcgacagagcaaaattccgtctcaaaaacgaaaagaaaacttctgtgggtgtggtagctcactactgtaatcccagcattttgggaggctgaggcaggaggattgcctgaggcccggagtttgagatcagccgaggtaacgtagcaagaccccatctctaccaaaaaaacaaacaaaaaaaaacccaattatatttatatatataatatatatataatatagtatatattatacactatatataatatagtatatattatatatactatatatgatatgctatatataatatagtatatattatatgctatatatgagatactatataatatagtatatataatatatgctatatatgatatactatatataatatagtatatataatatatggtatatataactattatatataatatatagtatatatagtgtgtatatatataactatatatatattttatatacatatatattatatatatatatatataaaatggccatggggtggcaggaacctgtagtcccagctacttgggagtaagccacagtgagctataatcacaccactggacttcagcctggatagcagagcaagactatctcaaaaaaaaaaataaaaaacaaaaaacaaaaaaacaaaaacacttcctggggatgatgaatactgtttttaccttgtggtcactatcttgatttgtggtgatggtttcccaggtgtatatgtaagttaaaactcatcaattgtacactttaaaggtctggtttctcacatatcagttagacctgattgaagctgggggcggggaaaggtagggaaagggtcaggactgcgtaatgcaaatgagaaactttcctctaaggggtggctttccccactggtccctgagggtgtctgagttttcaatctgaagcacagcagaccgtgaagctatttctgcttggagccggaggaggcttaacaacaaaaaagaagaaagcaggtcgggcacagtggctcatgcctgtaatcccagcactttgggaggccgaggcaggcggatcgtaaggtcaggagataagagaccagcctggccaacaaggcaaaacccagtctctactaaaattacaaaaattagccgggcatggcggcgggcgcctgtagtcccagctacttgggaggctgaggtaggagaatcgcttgaaccttggaggtagaggttgcagtgagccgagattgcaccattgcactccagcctgggcgacaagagctaaactccgtcccccaaaaataaaaatttaatttaatttaaaaaacatgggtgaaacttgaaaacatgctaagagaatcagacacaaaaggctacatactatatttttccatttatatgatgtgggtgaaagattacctaggtgccgaggcaagagactgaaggcacaaactgtttcagtataataaagaaaatagttagaataagaatagtcataatacaaattagatatagagatgatcatggacaattatcaatcattattataaacattattaatcattagcttttaatattactctttgttgcattactaatataccctaaggataaccggtgggtatagggtcaggtgctgaagggacattgtgagaagtgacctagaaggcaagaggtgagccctctgtcacgcccacataagggccgcttgagggctccttggtcaagcggtaatgccagtgtctgggaagacgcccattacttagcagaccgcgaaagggagtctcctttccttggaggagtcagggaacactgctccaccagcttcttctggaaggctggatattatccaggcctgcctgcagtcaccggaggcctaaacccctccctgtggtgctgtgctccaaaggtcacgctccttgtccactttcacgttcctcccgtactcctggatcctctttgaagttggtagtagatagcggtagaagaaatagtgaaagtcttaaagtctttgatcgttcttataagtgcatagaagaaaacgctgacgtatgctgccttctctctctgcttcggctacctaaaagggaagggccccccacccccgtcctatgatcacgtgacttgcttcaccttatcaatcacttagaggattcaccctccttaccctgccccccttgtctcgtatgcaataaatatcagcgcgcccagccgttcggggccactaccagtctccacaacttgatggtagtggtctcccgggcccagctgttttctctttatctctttgtcttgtgtctttatttattaccatctctcatctctgcacacggggagaacacctgctaagccccgtagggctggaccctacaatatgaaatgtccagactagacaaatccatagagacagaaagtaaattggcggctgccgggggctgaggggagtgactgctgaaggatatggaggctgggcacagtggctcacgcctgtaatcctagcactttgggaggctgaggtgggcggattgcaacgtggcaaaaccccgtctctactaaaaattcaaaacactagcggggtatggtggtgggcgcctgtaatcccagctagtccagaggctgaggcaggagaattgcttgaaccaggaggcggaggttgcagtgcggcgagatcacgccattacactccagcctgggcgacagagcaagactctgtctcgaaaaacaaaaaaagggtatggagttccttttgagggtaatattccagaatcagacagtgatgatggttgcatgactatgtgagcatactaaaaaccactcaacactcaatcatacatatacacaaacatacacacacacacacaaaacttcttcctcccaggttcaagtgactctggtgcttcagcctccagagtggctggga

SEQ ID NO: 1884 - DNA, 1609 bp, Homo sapiens
gagaggattggaggaggaaggaactgggggtcccggacgcctgggcctaagtgagaaggggactaggggcctggactcctgggtctgactgaggaggggccaggagctaagcctcagcacctccagcaatgaagctgggaagtaagtctcctggcgccttgaggggaccagggttggtcccttggatacctaggacaccttctcacttctgctggctccagatcctgtgcagatcggcagggtccaacaggacaccccagggaaggtgctttccattgtgaaccagctctacctggagacccacagaggctgggggagggagcagacccctcaagaaacagagccagaggctgctcagagacatgatccagcccccaggaaccctgcgcctcacggggtctcctgggtgaaaggcccgctcagcccggaagtggaccatcctgggccggctctcgccagcctactggaagaggaggaggaagaccttgaaggaaaggaggaaggaagggaggacgaccctgaagaggaaggccctgaggacgtgctcaccattcacgtccagtctctggtcagggcccggagcagctacgtggccaggcagtaccgaagccttcgggtgcgcatcgcctcagattctgggggtccccacgggtctggggacccggccacggagctgcttcaggatgtgcggcacctccttactgacctccaggatcacctggcaaaggactcctacatcagggctgtctttggaagcaggggtcctgggctccccaagaaggacgaggatccaggccccgcgctggagacggcggtgtgccaggcggtgctggcgcccctgaagccggccctgtggacacgactccgcacactccgagcaccggagctgcggcggctgcggcggcgacagacagccctgcgggcgggggcggggcctccgggggcacaggggccgggaccggaagggcagagccccgcccccgccttgcggagccgcatccacgagcgccttgcgcacctccacgctgcctgcgccccgcgccgcaaggtggcgctcctcttggaggtgtgcagagatgtctatgcgggcctggctcgaggcgagaaccaagatcccctgggggccgacgccttcctgccggcgctgaccgaggaactcatctggagcccggacattggggacacgcagctggacgtagagtttcttatggagctcttagatccagatgagctgcggggagaggctgggtactacctgaccacgtggtttggggcgctgcaccacattgcccactaccagcccgaaacagaccgcgctccccgggggctcagctccgaggcccgcgcctccctgcaccagtggcaccgcaggcggacgctgcacagaaaggatcatcccagagcccaggccaacctgccctttaaggagccatgggcagaagagactgtgacagggaccagtgacaactaggggtttcacacccctccgttcatgcctgtaatcccaacattttgggaggccaaggtgggaggattgcttgagcccaggagtttgagaccagcctgggcaaaacagtgggacccccatctaccaaaaaaaaaaaaaaac

SEQ ID NO: 1885 - protein, 174 aa, Homo sapiens
PPGSPGKGLLHQGCLWKQGSWAPQEGRGSRPRAGDGGVPGGAGAPEAGPVDTTPHTPSTGAAAAAAATDSPAGGGGASGGTGAGTGRAEPRPRLAEPHPRAPCAPPRCLRPAPQGGAPLGGVQRCLCGPGSRREPRSPGGRRLPAGADRGTHLEPGHWGHAAGRRVSYGALRSR

SEQ ID NO: 1886 - DNA, 1673 bp, Homo sapiens
gagaggattggaggaggaaggaactgggggtcccggacgcctgggcctaagtgagaaggggactaggggcctggactcctgggtctgactgaggaggggccaggagctaagcctcagcacctccagcaatgaagctgggaagtaagtctcctggcgccttgaggggaccagggttggtcccttggatacctaggacaccttctcacttctgctggctccagatcctgtgcagatcggcagggtccaacaggacaccccagggaaggtgctttccattgtgaaccagctctacctggagacccacagaggctgggggagggagcagacccctcaagaaacagagccagaggctgctcagagacatgatccagcccccaggaaccctgcgcctcacggggtctcctgggtgaaaggcccgctcagcccggaagtggaccatcctgggccggctctcgccagcctactggaagaggaggaggaagaccttgaaggaaaggaggaaggaagggaggacgaccctgaagaggaaggccctgaggacgtgctcaccattcacgtccagtctctggtcagggcccggagcagctacgtggccaggcagtaccgaagccttcgggtgcgcatcgcctcagattctgggggtccccacgggtctggggacccggccacggagctgcttcaggatgtgcggcacctccttactgacctccaggatcacctggcaaaggactcctacatcagggctgtctttggaagcaggggtcctgggctccccaagaaggacgaggatccaggccccgcgctggagacggcggtgtgccaggcggtgctggcgcccctgaagccggccctgtggacacgactccgcacactccgagcaccggagctgcggcggctgcggcggcgacagacagccctgcgggcgggggcggggcctccgggggcacaggggccgggaccggaagggcagagccccgcccccgccttgcggagccgcatccacgagcgccttgcgcacctccacgctgcctgcgccccgcgccgcaaggtggcgctcctcttggaggtgtgcagagatgtctatgcgggcctggctcgaggcgagaaccaagatcccctgggggccgacgccttcctgccggcgctgaccgaggaactcatctggagcccggacattggggacacgcagctggacgtagagtttcttatggagctcttagatccagatgagctgcggggagaggctgggtactacctgaccacgtggtttggggcgctgcaccacattgcccactaccagcccgaaacagaccgcgctccccgggggctcagctccgaggcccgcgcctccctgcaccagtggcaccgcaggcggacgctgcacagaaaggatcatcccagagcccaggtgactgcccatctggctgcaagtagaagggagggtgagacctggtgcccttctgacccagctcccacctctccccacaggccaacctgccctttaaggagccatgggcagaagagactgtgacagggaccagtgacaactaggggtttcacacccctccgttcatgcctgtaatcccaacattttgggaggccaaggtgggaggattgcttgagcccaggagtttgagaccagcctgggcaaaacagtgggacccccatctacc

SEQ ID NO: 1887 - protein, 437 aa, Homo sapiens
DTFSLLLAPDPVQIGRVQQDTPGKVLSIVNQLYLETGWGREQTPQETEPEAAQRHDPAPRNPAPHGVSWVKGPLSPEVDHPGPASLLEEEEEDLEGKEEGREDDPEEEGPEDVLTIHVQSLVRARSSYVARQYRSLRVRIASDSGGPHGSGDPATELLQDVRHLLTDLQDHLAKDSYIRAVFGSRGPGLPKKDEDPGPALETAVCQAVLAPLKPALWTRLRTLRAPELRRLRRRQTALRAGAGPPGAQGPGPEGQSPAPALRSRIHERLAHLHAACAPRRKVLLEVCRDVYAGLRENQDPLGADAFLPALTEELIWSPDIGDTQLDVEFLMELLDPDELRGEAGYYLTTWFGALHHIAHYQPETDRAPRGLSSEARASLHQWHRRRTLHRKDHPRAQVTAHLAASRREGETWCPSDPAPTSPHRPTCPLRSHGQKRL

SEQ ID NO: 1888 - DNA, 37967 bp, Mus musculus
  misc_feature (1)...(37967): n = A, C, G or T/U
agcactgcactcggaagggagatagagacagaaggactagaaggtcaaggctgggactcgagacactctggctcagcagtcaagagtgtaaactgcccgagcaggcacactgggcaagtcacagtagcgtctaagtccagctccaggaatctgaaatgttgaaatgttccccacaggctcaggccttgaatgctccttccccagccgtgcatgctagggaagcatgagctcacgtgaggcctcgttctgccttatagaaataggccaatcagagtggagacctttaagaattgcatccaccaggggctggagagatggctcagtggctaagagcatcgactggccaggtgtggtggcacatgcctttaatcccagcactctggaggcagaggcaggtggatttctgagttcgaggccagcctggtctacaaagtgagttccgggacagccagggctacacagagaaaccctgtcttgaaaaaaccaaaaaaaaaaaaaagcatcgactgctttttagaggttctgagttcaattcccagcaaccacatggtggctcacaaccatctgtaattgcatctaatgccctcttctggggtgcctgaagacaactacagtgtagtaacatataatagatagatagatagatagatagatagatagatagatagatagatagatagatagatagatatatagatagatagataaaatcttttaaaaaaagaatgatatccaactctggtttttcctctgtgtgtgtcctcttccctgctcccctctcgcgagctctctcttctctcttctctcctcttctctctctctctctctctctctctctctctctctctctctctctctgcttccgatctaccatgatgtgaacatactccaccatacactctgccatgatggactgaaaccatgaaccaaaacattatctttactcccttacagggttcacatcagatattttgatcacagcatcatgaaggtaactaatctactggaaaggctctcctgtccctcacctgagcaccctcttcatcacgtgtgtgtgagagagaaagagagaaccagacacaaacagacagtgtgtgcaggtgtaggtgtacatttatggaggccagaggtccacttcgactgttgttccttgggcatccgtgtttgtgtgggtatgtgcatataaagagagttgtcctaggagaccagaagaaggtgtcagattccctggatctggagttacaggtgcttgtgagtcctctgaagtgggtgctggttgctctgcaagatcaacaggcacttttaacccctgagctgcaccctgccccagttttaaaagatgttttgtattttatttgtgtatgcatatgtctgtttgtgtctatgagtctgtatttgtgcacagaggccagaaggttgtgttccatctctcggggctgaagttacagcatttgtgaacatgtggatccaaattctggtccctggcaaagctgtaaagtgctcttaaccactgagccacctctaccagcataatcttgtctgtctgtctgtctgtctgtctgttttttacattagccttaactggccttgaactcacagagctctgcgctccactggctcatacacactgggactgcagactttcacgaccacacccagttcactgcagactgaacccagggttctgacatgctaggtgaacattctaccaactgagctacaccccatcccctcatttaactgtcctttctcaaatgtctgtacatcaacacacacactcaaatctcacttttaagagctcaggctgagacaccaactgacagacactgacagaaccaccccttactcgcgttgctctttccctaccccatttcctcccaagctcacctgctcaggtcatccatcattcatttgtccaataaacataatctgaacctcccggcgcccggggccagagacccagagatgaaccaaaccacatccctgccctgaaggatctggccgcttcaaagcaccatgcaaagagagaacggtaattattattttgagtagtaattatagttgtgctacaaagcagctggggagctttaagaaggtatgacccgtattttctgccaaaggaattctcaccctggggcccagagaagtcagaaaggagagtcttttactccttcgaagggtagctccatcccccaaagctaggatcaggggaccaaaggcaccagcagtagtgtctctgacggagccacttgctcgggactgtgtagggcagtgatgtgtacattacatcggaaaattgccatgtgctgtttgagttcactgagagactgtcccagaaaaaatggggctccctccccccatttcagacccatgtatgcttgtctccaagtgtcctccagagcctgaggtcagactgcccctgggactgtgataaggagggaacactgtgtccttgagaacggctagaagatggtactattgtttatctcacagtataaacctgtctgctgcagtgggagaggagcctgaaagggagatttaaccatgggaagtaagccatggatggggagttcagccttggagaaaaagcccctccgtgtgctaaagagatgggatcaggagtaataatgataataatgataataataataataatatagctaaaagtggctgaggtaggcagaggtgctgctggaggaaaaggcaagaggattaagcttaaggctaacctgagctacacagcaagatcaaggacaacctagatttcaaagcaagagcttactccgaaaaagggcaggaggtggagaaagagagagaacatgaatatgaatgtaccatttctagtgtacttaattcaggatcctcccctcccatccagtatcctttgtggaagtcctagccatcattggtgcttcatgattcccagatggcccttacagatttttttctttaattttatgtatgcttgtattcgagcattcatcacttgtatatgtgtgtccatggataccagaaaagggtgttaggtcctctgaagctaaagttataggtagttataagcagcctgatataggtgctaggaaccaaacgggttctctccaatagcacacagtgtttttactcttcggttgttcttgggggatggcccgtctgcagaactttctcttctcttctcttnnnnnnnnnnnnnnnnnnnnnnnnnnnnnnnnnnnnnnnnnnnnnnnnnnnnnnnnnnnnnnnnnnnnnnnnnnnnnnnnnnnnnnnnnnnnnnnnnnnnnnnnnnnnnnnnnnnnnnnnnnnnnnnnnnnnnnnnnnnnnnnnnnnnnnnnnnnnnnnnnnnnnnnnnnnnnnnnnnnnnnnnnnnnnnnnnnnnnnnnnnnnnnnnnnnnnnnnnnnnnnnagtggcaccatctgaaggtgtggccttgttggaataggtgtgacctggttggaatgggtgtgtcactgtgggtgtgggtataagatcctcaccctagttgcctggaagtcagtcttccactagcagcctttggatgaagacatagaactctcagctcctcctgtgccacgcctgcctggatactgccattctcccaccttgatgataatggactgaacctctgaacctgtaagccagccccaattaaatgttgtcttttataagacttgccttggtcatggtgtctgttcacagcagtaaaaccctaactaagacatcatctgagaagaggaaaactcattatttaagaaaatgactccatgctgggcagttgtggcacatgcctttaatcccaacacttgggaggcagaggcagacagatttctgaatttgaggccagccagggctacacagagaaaccctgtctggaaaaacaagaaagaaagaaagaaagaaagaaagaaagaaagaaagaaagaaagaaagaaagaaagaaagaaagaaagaaagaaagaaagaaagagaaagagagaaagaaagaaagaaagaaagaaagaaagaaagaaagaaagaaagaaagaaagaaagaaagaagagaaacagggtgggggagagagagagagaaagaaagagaaaataaatgactccataagatcaggtggcaggcaagcctgccaagcattgtcttaattagtgattgatgagggagggcccactgtgagtggggctatccctggactggttggtggtcctgctttctataagaaagctggctgagggctggagagatggctcagcgggtaagagcactgactgttcttccaaaggtcctgaattcaaatcccagcaactacatggtggctcacaaccacccgtaatgagatctaacgccttcttctggtacgtctgaagacagctacagtatacttatgtataataataaataaatctttgggctggagtgagcagggactgagcaagcagggttgaccatagggaacagaggtcctaaaaaaaattcaatacccaactaccatatgaaggctcacaaccatctgtacagctacagtgcactcatatacataagtatatctttaaaacaaacaaacaaaaaagaaagcaaagtcgggcatggtggcacacgcctttaatcccagcacttgggaggcagaggcaggcagatttctgagttggaggccagcctggtctacagagtgagttccaggacagccagggctacacagaaaaaccctgtctcgaaaaaccaaaaaaaaaaaaaaaaaaaaaaaaaaagcaagcaagcacaaggaacaagctagtaggcagcagccctccatggcctctgcatcagctcctgcctccatgttcctgccattcgagttccatatacttccttctgcaaagatggactacaatgtggaaatgtaacctaaataaaccctttcctcctcggcttgcatatatatatatatcaccgtgttttgtctcagcaatagaaagtttaagtcaagcactatgtgttcttaaatactgagccattgctccagctccatggctgccacagtctagtgttacctgcagaccagactgcaatgttttcttgtgagaaatgagatctaatgatctcgtttttatagtggaagaaacactccctggaagccccactagcaaatccatcttcatattgctttggccaaggcacccagacacttgagcctcagccaatctctagcaaggactctgctgggctatctgaattatgtctagatcccaattatccacctcttattgcatttttgtctttttgttgactgttttcagtttattgcatggaagcagtatactaggccaagtaaaaagtggaggcctggcagctgaaaagatggctcaatagaggactggggttgcgttccctgtatccacatcatggtggttcagtcacctgttacttcagtcccaggggatctgacagactctaacttcttccagcataaactctcatatactaaaataaaataaaatctaaaaaaaaaaaaaaaaaaaggcaggatcacgccctccacagcacacaccagtcattttatctaggctgttttttaaacttgtgacaaaggactgatgccaagggctggcctcagcttggagaaggattcatgaaaggagtgtctgggagcagtgaaaacaacaacaacaacaacaacttgaatcaacttgactccagccccttgattcttagagacagcaagcacaagcacaaacagtaggatagctgggtgggatccctcccaccctaaattaccattcctacaatacctgggttctgcctaactctctctctcccaggctgaccttgaacccaggaatctatccacctttgtaagcataaacaaaaaattttagctgggtgggatcttacctttctatcgccacttccaaaatctctttatgtccttagtatctgtctgagcagctggctgtgtgcagctgcctctgctcctttagctctgtgacgctccttatacggttcatactgcatccttatactttgcatagctgaggagctatattatacttctgttttcagcattctttcccacatccttaagggatgtcctgaaggttctatcattttgctgagacgtagacacaacctcgcctcccagactcaagctgtctctgattatcatggagtcattaaccttggcagaggggactttcctcgaaggaggaacatgaaaactattatataaacaagacttatgcccacagcacccatcaacactagtggagggccatgcccttctggctctgttccaacggtaggaaccatgtcatcccgtcccttacatgaccaggagactgaggggaaattttacccaggggaaattttacccatggcaaggaaagcctcatttaaacttcagagcccacaaaccattagctattaaccattgatggttagccagtgcaggctctgtcaggaaccggtgtatgttcttgtgctggtcaccctatagctaaataacttcctcatccctaggtgttcagccacacttatgtatcactgcaggcaaagttctttttaaacatactcatgattttcttttttctttctttttttaatatttattttatgtgtatgagtgttctatctgcatgtacacctgcatcccagaagacggcactggatcccattacagatggttgggagccaccatgtggttactgggaattgaactcaggacctctggaagaatagtcagtgttcttaactgctgagccatctcttcagcccactttcaacctctaagccatttatccaaccccatccttaaacctatatgaaaatatctttattaaaaccctactctgaagccgggcgtggtggcacacgcctttaatcccagcactcgggaggcagaggcaggcagttttctgagttcgaggccagcctggtctacaaagtgagttccaggacagccggagctatacagagaaaccctgtctcgaaaaaccaaaaaaaaaaaaaaaaaaccctactctggagaggtggggagaatgtgaatctatgcaggtggtcactccattacagcagtgaaggagtgggaggagagctgctgggctgctggcctgtgtgaactttgtacccagcctacaggcacctggccaagtggggagtataggctggaagcttcctcctagtctatttgctctgtccccttgccctggcccaggctgcagcttctgaggattgtttgtttctgctgatgtgaacaaagacactgcatttggaacaggaacttggatctgagagagtcagacatgtgggtgaccgtacaggagaaactcaaagtgtatattggacggttttaaacaagagataaaatccctcctgtgtctaaaggaaccctctcatgcatggagaagcaaaatggtccatattcatacaaccgaatcttatttagttctgttctttgcagtgctagggatgaactcagggccttaaaacatgttaagcaaactttttaatactaagccatgtcccagactttgttgctgttttcttttttgtttgtttgtttgcttgtttgttttaagttcagtggctggagatatggttcagtagtgaagagtgcttgtacaacacccccatacacataaaataatttttttttgagacaggtttctctgtgcagtcctggctgtcctggaactcactctgtagaccaggctggcctcgaactcagaaatccacctgcctctggctcccaagtgctgggattaaaggcgtgcaccaccatgccctgcttgataaattaatttttaaataatatatatgtacacacacacacacacacacacgtaagtcagttattttcttctgccatatggttgccagcatcaaagcttgccccgcctggcagcaagcacttttacttagctgagccatctcaggtttttgagaaagagtctcatgtagcccaagctggcttcaaactcactgtatagtggaggggaagacctcaacctcctgatcttcctgtgtccacctcccacgtgctgagattacaattttcagttttacaaaggaaggaaattgggccactgagatcgctcagtgagtaaaggcacccgcagccaagcctggtatcctgctttcaatcccgtctctgcctggggaaagagaaccaactcctgaaagcagccctctgtcctccacgtaacaaactgtgacacgcatacacactcatacccccccccacacactgtcctccacgtaacaaactgtgacacacatacacactcataccccccccacacacacactgtcctccacgtaacaaactgtgacacgcatacacactcatacccccccccacacacacactgtcctccatgtaacaaactgtgacacgcatacacactcataccccccccacacacacacacactaaatcacaataaatatgtagtaaaaaaaaaaaaagccaatatagataaacgtgaaaataaagctgggcatggtagttcacacttcaaattctggcattctggaggcggaggcagaggatcatccttagccagacagtgagttggagactaatctgggctacaagagactccgtcttaaaaaagttttaaatcatatacgaaaagaatccaactagtatgtgaaaagcaccactaggaaaagaatgtggtattgcaggctcgctcttcaaatagcaaagcagcttgtgtggttagcacacttaccaagatgagggacagagagggcagagaggtgggacaggattaagtttagctgttgtggggatagatccgtctctaagctgtaaactagtgagtaaatagaaactagggcaatggtattgtccatccacgaatttggtaaggacaataacaactctgcttcacatgatttcctttgtgtgccaatgtcaccttttttcgaagtccagtgaggaggggagagtctctgtctgccccactagcttgtaagagccatctatcacgtaaacagaaagtctcataaccttcttgcgctcctgcgagtacgtgtgtatgtggtgcgttggggtagtaggtaggggtagggctggaaagatgacaaagaggttaacaacgaagcacaagctattctagacgtccttctagcacctacatgtggctcacaaccgtctgtaatacaggtctaagggaatcccacgccgctttctggcctccgtgggtactgcgagcacatggtgcaccgactcagcgaaacacccatacatattacaaagagcaaactcaaaaccttcttgccttttctgaggtagggaaactgaggcttcagtgtccgtagggggctacacaagcgccgtttgacacgtaatattttccttcctattcacaagacgggaaactgaggctagagagtggactgacagtatgggacgagcgaactaattctcagaggtcaggtttcgttgaccagcctcaaccttcctttaacctagtactggagcgggagggcgatactgcaactgttgtcaaggagacggatctcccactgctgatctgaggagaactctggcatagcctccacgacctcctctataggcgcttaaaggtcctggaggcgggtctcccaagtgtgctgcctcccccggtttccacgacaacgaaaccacagattcctcttatccctccccgacccgtccgcgtttgccagaagtcagccggcggggtgtcttgtgagggatggtagaggaaggaaatccacgtgaaatctgggaaatgtagtccaaaatcagaagcgctctgtttgcgcctgtgtgagccaataggaatcgggttttcttctttacactttaagaaatgtagttttctggctagctcgggacgcacgagcgtacaggactcatcacagtagggctaatggaaagccgctttgtcgcgatgtttcttgggagatgtagtttccagctgggagaggtgggaagtgttgggtagaattagcgattcctagtgtagagagtgaggggacgtgggggcggggaagtacgggtgaatttggcgcaaagcctgctggggcatggagtcccgatgagctttgtgcgcatgtgcgggaaggtgaggttgtttggggggcctcgcccaggagagtgaggtgagctagagggaaaaggaagggctggggagtccggtgtacggggaacgggcggaccacggggaggggtacccaggtctggaggagggagaggaagggagggatgggcggcttgggggagggggatgataggaggctggaggtggggttctgggggcgggccggggagcgggaggaacgcgagatgcagacgcgggagagttggaggcctggggaggctgggcagcgggagggggctgggatgttcgagggggagccctgggatggttggaaactgagagtggagtggaagttggaccccactgagaaatcctggggcgccgggacctctaacctcttcgaaaaggattgcgggaaggggtctatccaggggcaccgtgccatagcagcgtagaccggtgcaggtggctagtcctgtgtgctggtcacacgttcacacgcacttctgtcgagttgaggttctggaggataagtatttcttcattacaagcgtatccgcctcattagcttgtcgcgagaggcgaaattcattaatgtgcagaaggggcttggagacaggttttaacaggataagagggacttaaatctctcggttctgatcctcctggctcagcctctcacgtgctcagattacaagcgttggcctagtttttttgttttgttcagggtttttgttgttgttgatgatggtgttttgggtatggtctcctgtagcccaggctggccttaatcacactcgagagccatgccaagctttaaaccggtgaaagtaattgaatttaaaaacaaacaaacaaaaatactcatcttaactttttttttttttttttttggtttttcaagacagagtttctctgtataaccctggctgtcctggaactcactctgtagaccaggctggccttgaactcaaatccgcctgcctctgcctcccaagagcagggcttaaaggcatgagccaccactgccagtcttcactcctttttatatgctattttaacacctattccaatttacaatttagtcttgggcgcttgtttcacagtggctttacgtaaatgactcacaaggagttggagggttaatgtgtgttgatagtaaatgcaataggtggggtttgtttattgccaggtggtgttctgggtactttttttttcttttaatgatttatttttattttaacgtgcatccatattttgcctgcatatgtgtttactgcatcctctgattctagagtttcagttgtgagctgccatgtgggtgctgggcattgaacccaggtcctctggaaaagcagcaaccagtactcttaactgctgagccacctctccagccatgctctggggtacttttttgctctttattttacttgactttccaacctcgattattgctcccattttacagccaaggagatggagattagtctttgaaaggagcagttgttctttgaccgaggacacattgctggtacgcagctggaatcggttccaattccgaagcccttgtcctctgagtaaatatttggtgagttgtgcagctcagggcacagagtgcccagtgcagattcctggccttttgaaggaccattgatggattcagagagaatgaacatcagggtcgaagtgtaggagagagaggtagaagaaggggacactgaaagttacgcatttaatagaataaaagtaaaacgaaaacaaaccaaaaacagatgctggggagatggctcaatgggctaaagtacaagctgaggacaatcagaactgggtaaaggttgagcagcacaagggcacctcagtgtgtgttcactggcttctcatcgcagatgaaaaggcaggctttaggttccataagagacttttaaaaaggaaggtaaaggggctggagggatggctcagcggttaagagcactggctgctcttccagaggtgctgagttcaattcccaacaaccacatggtggctcacaacccatctgtaatgggatctgatgccctcttctggtgcatctgaagacagcaacagtgtactcatatacataaaataaataaataaatcttttaaaaaaaaaaaaaaaggaaggaagataaagaaaccctaacctcgacctcaggcctccacaggcaacgcgcacggaatgcgcttgagtgcccaccccctccagaaatcaacagcttggtgaagtagaaaagcagttagagattattgatgtgggacacagagctctcctctttccatggtatcgtggaccttgctcaagaagtccactgcccatcctttggggccaagcgaggaggaaatagttaacttttgtagcatttagtttaactggtttgtcagccaagagttactttttgtgacctggaacttaggatatgtggcatagaaagactaatgactaaccagtgtcagtaactagttactaagtagtcagtgttagtaactagtaactttttagccagtgccctaattgactattttagttctgtaggctctgtgtgcagaaggaaaagctaactgtttatctcaccagcccctgctttcctgcccagccactttaaaaccccgtccctgcagtaggtgacaagcagcttaggatccttatcacccacttctgggccaatgctgagttactcttgatctggccctgaaggccagtgcctgaacgtgcacttgctgaggttttccatcttaacctttgccgggcatccttttgaattctctacagcccttactcccctgccaggcccagtgtgaaggtctgcaggccactgtagggtgaggcttctgagggatataaatatgtatctcactgttacttccattctcttacctcatctacacgtgtgtctcctcctaccatacggctctcgactggccactttaggtcataaatctgaattttctctttattgcaggaatttgggcttgcctcaaaggaatgccccctttcacttgatccagacatgaaagacatctgctgtggactttgacgtggggagtggggtgggggagttgctgaccgctcagaccatttgtgattggaaactactatgttgataggcttgtgtctcctagggctccagggagggaaagagctggcaggaacccgttcccattcctcctgcctagcatccacaccacagtgctaatcaaccagggttagttctctgttgtccctttccatcagctaagaaaggaatttgttttgggaaattgatatgtagtttatggcatgttttaccttcagatagtaaagccacagaatgatagagtcttaattccaccttatagacaagcatgccaagggaccggcgatgtgactcagctgctaagagcacttgttgttcctgtagatgaccagggtacctcttcttttttaaatatatcacttatttttattttatgtgcattggtgttttgctggcatgtatgtctttgtgaaggtgtcagaaactctggaactggagttacaggtaggtgtgagccaccatgtgggttttgggaattgaacccaggtccagccagagctcttaacagctgacccgtctatccagccccgatgactagggctctaatcccatcacgcatatagtggcaaaaaccaaaaaccagtataactccagtgtaaaaaacagataagcatgttgagaaaggcttgctttccttttttttttttttttggtttttcaagacagggtttctctgtatatccctggctgtcctggaactcactttgtagaccaggctggtctcgaactcagaaatccacctgcctctgcctcctgagtgctgggcttaaaggcgtgagccaccacgcccagctcctttttttaagatttatttattattatatataagtacactgtagctgtcttcagacactccagaagagggcgtcagatctcattatgggatctcattatgggtggttgtgagccaccatgtggttactgggatttgaactcaggacctttggaagagcagtcagtgttcttgcccactgagccatctgacccctgctttgctttgctttgctttgctttgctttgcttttcttttcttttcttttctctctttctttctttctttcttttttttttttttttttttttttggttttttgagacagggtttctctgtatagccctggctggcctggaactcactttgtagaccaggctggcctcgaactcagaaatccgcctgcctctgcctccctaatgctggccacgcctggctgcttttctttttttaattctcatttattttgtgtgtttacgtcagggtgaggaggagctgacatgaacatgccatggtgtgtgtgtgtgtgtgtgtgtgtgtgtgtgtgtgttgtctcatacacataatatacttatttatatgggaaaaaggacagcttgaaggagtccattctttgctgttcagtgggagtcctaggactcacactggggtccttaggcatggagataagcacctttacccacggaaccatgtcactgactcctggcatcttcctgttctttgtaggagtgccctctttacaatgtcaggtacctgggctctgccttttgcagtgattctgctgccagatcactaacagtaatgtggagtagtggggtttttttttccctttaattacttccttactgtgtatcgtcaattgatcctctcagctgtgttcaattaatttagctctcagcaactgtagtaaaaatttaaagctaggtgatggtggcttatgcctttaatcccagcactcaggaggtgaggtaagcagatctcttaagttcaaggccatggggctggccagatggcccagccagtaagagcacggactgctcttccgaaggccctgagttcaaatcccagcaaccacatggtggctcacaaccatccgtaatgagatctgatgccctcttatggtgtgtctgaagtcagcaacagtgtacttatttataataataaataaacctttaaaaaaaaatgttcaaggccattctgatctacagatggaattctacaacagccagggctacacaaagaaaccctgtctcaaaacacacacaccccccaattaaaattaattgtaattacaatataaacatttatataatgaataattatatataagtataatttaattttactgcaaacatccccccatcccaagcccttgtatattaatttctctactatgcctcccaaactggtgagctcttctctttgaaacaagaaaatataaacataatgcataaagacaacatgctcagtccatttattgttccttggatgtttatgaactcagggctggctatttgctattttaaagcctattaagggactcatccctgagaaaggctaatgttctcccctcccctccctctctctctctctctgcagccattacttgcatgtagttgttttgtcaagggttggggttcctcctcagctagtctattgattcttgtcaccattcaggccttgtttaggcagctgtattgttggggtatcataggttccctgttaattctagaagctgtaacgtcacaccagacttcccgattctctggctcttgcagtctttgtgctgctgcttctgtagtgttccctgagcctcaggtgtgcaagaattgtgtgataaatgtactccccacggcccacggatctctctgtatgacagttgtgcttttctctctttgccggtccagcaaactggagctggtaggttctcctctaagacccaggacctcaatagccccggcaattccgctagatttctagtatcagaggtaggatgtagccttttaattatttatttttttaaagattttatttatgtatataagtacactgtcgctatcttcacacacaccagaagagggcatcggatcccattacagatggttgtgaccaccatgtggttgctgggatttgaactcacgacctctggaagagtagtcactgcttctaactgctgagccatctcttctcatccccggttgtagccttttaatagacaggcagcccatgtcgctgcaacgtaaagactccaggagagattagaagagatggaagctaagccagggccaggttttagagggttcatgcataacatggagtggacagaacagtaaactaactttgagcatcccaatcccaagttatggtgacgataaaggtgactgaggtcgtgtagggtggggtgtcttcctttgtgttatcaagctcagagtgccgcatctgtaagaggctctttgctttgacttaacaagaaaccaagggcttcgaaccttagacatagtattaccgtgaaaaccttactcctgtcttactgtccttgacaggacccccacgaggcttcaggctccccgaggactgtgattccaggctagtgtctctcgtccttagtgcagccgactcaatgatggctggggccgatgtgtgtggagaatgccccagagtattcagttgtgtctctggctgtacccttcagccacaagcagcactgttcactctacctcctgtctgacactcagaatgtctccaggactttcctgggagtcaagccaccttccaggtttagagccatgccctcatccaccatctgtcttcaggaactggggaagaggaagggcagctggctttcttgtgacttggaggttttatgagggaaacacatgcagataggtactggagcccttggcagttggccacatttgccagctctcaaacataatttggtagctgctactgcagagcttgtgtcccccctcccccatgcctctaccccctctctcaattcactgactgtaaccctagcccccaaagtgtctgtagggggaagttaggggtcatggaatagaacccccactctcttgggattagtgccctcttaaaaagaagaagagcgccgggtgtgatggcgcacgcctttaatcccagcactcgggaggcagaggcaggtggatttctgagttcgaggccagcctggtctacaaagtgagctccaggacagccagggctatacagagaacccctgtctcgaaaaaccaaaaaaaaaaaaaaaaaaaaaagaagaagagctgtcatggtaatacatacctgtgatcttagcatttgaaagatggaaaagcaggaaggtcagatgttcaaggttatcccatactgcttaatgagtgagacagtcagatactgagtagaatcctgcagtaattataagtgttcctgctgggatggaagggtattctgggacttggaagcccaggagccacgccattctagacagggtatctcagtggaagggcatccagggactggaaagaccagggagcacacaccttggaggggagaaggtatcccactgggagggcgtcctgagacagggagtcctggcggggaccacaggcttctgagaggaagcatcccaggggaggcatccgcaggtgagctgaggagctccggggcctcagccccacttctctgcatcttcccctcctcagtagtcgggtagtaagtaggcagggcagacagtacccacgtctgagttcttactacaggcaggctccactgacaggccttcctgtgttctctttaaagcctttgaagaggtctttaaaatttgtgtgtgttacacatttgggtgctccaagaggccagaagtcaaattctcctagaattggagttacagccaatctgggccctaggaacagattctgtggaagatcagtgaatgctattaacagctaagtgtctctcaagcctacccccccaacccccaattaaaaaaattttttttgttgctttttgtttttcaagacaggggttctctgtatagccttggctgtcctggaactcactctgtagaccaggctggccttgaacttagaaatctgcctgcctctgcctcccgagtgctggaattaaaggctcgcaccaccacagctggcttaaaaatatttttattagtatatattaactatgttgatagtggatcccatgatacatgtagcttgatcacatttacacgaccctcataaccctctcatcctcctgtcatgtcactcccctggtgcccttcctcttctcaatttgtctctcttccaccaccacccccaagaagccctgagtttaataatgaagttctttacctgagtgtgggtgaggtgttatttataggagtgtagattgaagaaaatgttaactgcctgtgaatccacaggcatcccctcctctgttaactggctccttctggtggctcagggtctattgaccctctgactctgagagaacgtcgataggcccagatttgagggtattcgtagctgctgagacttaagcaggtgttccacaatactccacccctccctccctctctgtctgtctgtctctctgtctgtcttccctcatcaattcactttacactgagccttggagggagtgatacagatgtcccacttaggactgaccattcaaaccccaattgtccttagcacttggaccagctatgtgtgtttgtggtaatggctcactgaaaaacggaagcttccctgaacaaagctgacagcagcgccaagctataaggacatgcacagaaatattcagaaggcagtgtgacagacacatcatgcctgtgcacaacagcagtggcttcctctcgagggcttgtgacatttccagccacaggcttttgtttaggtctatagtaatgggtgggaattccctcctgaggggtgggccccaaagccaattagaaaccgtgggttacccctgaaactgtcacgccactattgcaccagttggtgtatcttatggctaattgttaatgtggcaccttcttgtgtttccttagtttaatagccacaaggaaactaggagaaaggagactgctcagccacggtagcaccagggagggaacaaggccaagttgtaagtctggtcggtctgctataagagagggaggggtttttgttctgatggtggttggtttgtttgtttgtttgtttatttaatttaatttttttggttttgttttgtttggattttaataaaatttcttttttttctacttttattgaaattagatttttttccatgcaatatattttgattatggtttcccttctataagtgttacagctctgagggagaaggtttccccaatgcaaatgttgcagcccaagctaaaggtatcgtgggagtcaggagccaagaaataccacagagttgcaccacataacaatccccacaccagacatttactgagagagagagagacagaggcagcgccgccaggccagaaacagcaaagaactaaatgggaggcagcctttatatccggttggggggggaggggggtgcagagctctctagggtggggattgatgggatttcagggagggctcaggggttagtggagtttcaaaaccctgaagtgagtgtggactttttaccctataccttccccgactcctcccaggtcctccccttgtcccttcccgtccagtccatgctccttctgtctccttagagaacaaacaggcacctgaagaatagtaataaagataaaacaaaaataaatcagaacaggacaaaacaaacacaagacaaaaagcttaggaaacagacacacaaggatctcaaaaccacaaaactggaagccataatatatatgcaaaggacctgtaaggttaaaaagataaaaatgaatcaaataacaataaatttaaaagatgccctgattaaacattacgagacaacctccaaagttccagtgagtttgttttccattgctggacatggggcccgcccttaagattggttgtatacccagagagactgttggagagaactaatttttaatttccaagtggttgtcggttgcggatgcttctgggttaggaatggactcatgtgcactccaggaccccatctgacacagacccatgcattccccttgcatactgccacagtctctgagttcaggtctgtcctgtaggcactgtttccttccattcctgtctcctatagtctttctgtcacttctacaaaatgccctgagccctgaggggagggatttgattgagacatcccacttaggattgagtgttgcatggcttctcaccctgcaccttgtccagttgtgggtctctgtttttattcccatctaccgcaggaggaagcttctacgatgactgagcaaagcaccgatctatggctataacagagtgccgttaggagtcattttattgctgggttctttcagcagaacagtagtacttggctttcccctaggtccctgggatctagtctcaacttcttggtcacctgagcagtgtcaggaatagatttcatctcatggaatagaccttaaatccagtcagattgtaggttactcccacatcttttgtgccaccattgcaaccatgcatcttgtagcaggccaccagtgtagatggaagggtttgtaactgggttgtttatctttctcctttggcattgtgtggcttatctcccagtcccatgaacagcagtccctggggtaggcaccagctcagcttctctgtgttcagtgagttgtgtagacttagcagtttgtggagagcaacaaataacctaggcagtagcctagattgtttgggggttcccatggggctcctttggccaacaacttgattagatgtaagccattcctggtactggaagcttcatttggtgaggagagatatccagttgaggctctgctcccccaatgcttggtaatttcatttaggtcatacatatatacatatacatatacatatacatacgtacatacatacatacatacatattaaaaagcttctggccgggcgtggtggcgcacacctttaatcccagcacttgggaggcagaggcaggtggatttctgagttcgaggccagcctggtctacaaagtgagttccaggacagccagggctacacagagaaaccctgtctcgaaaaacaaaccaaaaacccaaaacaaaaagcttctactttattaggtctccatatgacccatagaagaggtaattctaatcgcccttaagcactgatcacagggacctttgccaatggcctgacttctctttggtcagagaggtaagcaggtatgctttcgttttgcagaataggaagttaaagcccaaaagactgctaagttgtgaacgagccagtaatggtcaatgtccatttagtttcaggcgagttcccttgctgcctgggctgctgagctggactctcccactgctgactgttcctctctacaggtgctggtaactcaaacctaggtggcctcatggaggccccaacgacccagccagtgaagcaggagaacctggcggttgaggccctgacgctcgactccccgtggcaccgcttccgccacttccacctgggcgatgcagcagggccacgtgaggccctggggctgctccgtgccctgtgccgggactggctccagccggaagtgcacacgaaggagcagatgctggagctgctggtgttggagcagttcctgagcgccctccctgcagacacccaggcgtgggtgtgcagccgccggccccagagcggagaggaggctgtggcgctgctggaggagctctgggtgagcaggaggccatggtggccgtggtgtgggaggggcttcgctggactatgcttctcagcttgtggccacacatcacacataagcagaagccccctgaaaacgaaggtgtagtatatggctggtgtcggggtgacagttgctcctccaaaggtgcagagatgcctctccagtgtcatctgcgttagcagtccccagttcctccctcaagtaataaatagttggctggaaggtctaggtgaagtctgctttgcctgggtttcccattaatgtacagaaaggacaccagctaaagctggagatagcacaggttgtcctctactgatgacgttgaagacagggccaactggtcttagctacaaagtggggagcaacaagcagggagcccttagtcccgtgtggtagtgtacacctcaggcagaagggtcatggagagttcaagaccagcctgtaactagacaaggccttctctttgaaaaggaacaaaccctaaaatagaacacaggagcagggagcgctgcgatcgcggacacataacaccttgctgtgcagtttttactcagcctcaagcttggctgcatggcagattgcccatgtggctggctggtaatcagcatggttcaaattcccacagcagacgggctacatgcttttgtctggtccagggtccaagcagacgccccctctgctgggcaattttctttttctttttctttttttcctttctttctttctttctttttttttttttttttttttttggtttttcgagacagggtttctctgtgtagccctggctgttctagaactcactctgtagaccaggctggcctcgaactcagaaatccgcctgcctctgcctcccaagtgctgggattaaaggcgtgctctaccacacctgattctcagcttgttgctagatttagtcagagaagttaagttgcctgtggaatggccacacagttagggtgagtctttcaccacaaaagcacaggggctctttcctaggtgatgctggtcctgctgaggtaccagtataaaccatcacagtgcctgtagagtttctctctggtaatgtgtgtggtccaagctgcattgtcgtctcagccctactcagttaggagccttgtccggtttatttcatgtggccctggttggaactgcccctggtgttagtgagtgctatataaatgcttgctttggaacactgaggaacactgacctgccttgaagtttcacaccagaaagccaaggtgtattttgcctgctcacttgtgcaagcacattctgagacaatgtgaccttcataagacagactgccttgcctgtggtaatccagcctctggtctgtatatgagtagccacgggactgagacccagggagcaggatgtctgccagctcaagaaacctaaagaatgctggtggctggactaggaaactgtggagagtcagctctgacctgtgcttgtggttactaccataggaaatgccaaaccagtttgtctcagaattgagggaagtcttagagccccagaggcagctgggaacatggaaacttagcacaagatactgagtgtatgatgtgtgacaagaggaaaagttagtaaaacataagtaatccaaggcatgctggtccttcgtgctctcagccttagaaaagcatcagagtaggaccgcaagccttctgtagcaagttgcctgggaacaaaaggagaaacagcagatgtaggtaccagaggcaaaaactatgggtagtgagcagatgatagagctgttgaagccagagcaacttgcacatgtttgaaacctatagggaatggcctttatggggtgaaattcaaattgccaatgtagtctcataaagaagcaacaaatctgggctggagagatgactcagtagttaagagcactgactgctcttccagaggtcctgagttcaattcccagcaaccacttggtggctcacagctatctgtaatagaatccagtgccccctttccgtgtgttcaaagacagctacataccaaaaagaaaaaaaaaaaaaagtggagggggcaaatgtgacccctgaaaaccagagggcagaaggatcagaacagtgacctaagaacttacacaaaaaggcaccaggtcctggcagttttatgtgttgaagtgctgccaaatctctaaggaatgtatcattgttaaacattttacagactgctaagattatgaaggaagggagctccctgctcatcttggctaggttgccaaccctctgccactaccaccctacagtccaacccagccatttcaaagacaacctgaaaatgcaagccaaggactatctcaaggaacgtagatccaagaatcttaagtagaatattgtctgctcaaatctaaactgatgtgttgtagccagtgggctttacacagatgcaaagcatgttctctctggaaatttaccagtgaagtgcaactctgtcaacagaacctatcattcaaggctgagggcagctgagtgatggggcaggactcagcaaaggtcaacatcagtgcacagcaagtaggtaggtagttggtggtacatgcctggaattccagcactcaggaggcagaggtagaggctggccttgtagtgagtttagaagatggctctcagtctgcaaagctagaaactgtctgctagaaacaggcagagcaggtgcctacagaagccatactgctaggaatgcttacgagtcttgaccagcaggtggaattatatgcatggctagtcaactgtgcctctgctgtgtgatctaggtcaccctccctccagccagtggtccagtacagttaagacgggaggtgaggagaggggtgctgtgtgtgtaactcctgcatctctcatttcctagcaccagaggaattctgagaatcacttcttgggaacatgagcttagaaatctaccctgtgtcctgcctggttcttagcttcatgcttttctgagataaaggttgcttcaaatttacattttacccagacaccagcagttcaagtaagattcaaaacaaaggaatgagttacctgttacttgatagcaaatgcccccaaagctatgaagttgttgtgggccagagggtaggcgtgactggggaaagtggatctgtcacagggcctcttgaagaggccacaaggtattgaccatggctgtcaccacttaaaggctgacttgaggctagaaccccatttccactgaatttgcttgcactggttgacaggagactgagtttgaacagcctgcagcagcagcagccagcttcccttcggagatgcagcgaggcagctcagtggctaaaggtccttgtcatcaagcctgatgaggaactgagcctcacatggtgaggaggaagccaactgtcaagagtcattctcttgaccttcatatgtacaatgtatttcccatccctgacacacacacacacacacacacacacacacacacacacacacacacacacacacggtagagagaaggctcttcagttaaaagctcttgctgctcctgcagaggactggagtttggttcccagtgcccacgccaggtggctcacgacttcctgtaacttcagctccagaggattggatgcacactcttacatgtatgctcatgtaccaacccccaaaaccacagaaatgagtcttcagtgaaaccaaaacaaaacaggcagtagtgttgcacacctttaatctcagcaaagagtggcagatctctaaattcaaggccagccaggactagagttccaagacaaccagggttacacagagacatacttgaaatggctagaaaaacaaaacaaaaaacccaacaagacaggcagtaggatttcagaactgtgtggtgggagaatggcaaatacaggatattataatttctcaatttggcatatgctatctcatttcagggcccagcaacctccccagatgggtcgtcagcaatgagggcacctcgggatgtgaccgaaggcccgggggtcagtgttggaaaggaagaaagtggggcaattcccttaggtgagcagccagctccttcttcacttcattcttggtaaagaaagaagtctttgtctcccaggctaagtcagggactgacctggcaattttaactcactgaacgcagtagggacagctcacataggcccctgcctttggggaaccagcccgtggaaggtgggctcacacgcctactgtctgccaggtgctgctctgccagcctgcggaaactatagcataccaaagcaatgtgatctttggagctaagatctccttgtgcaacccaggctgatacagtctcctgcctcagccttcctaagtgctgagatttgaggcatgcagctgcccagatctggctgtagtgtttttgggtgcagggttctagaaggacttgcccaagggtggatgctgctaaatccagactgggcccaggcagcctgcctcgaggcctctgcaccccaacatactctgcctatcccaggtgctatggtggcctgtgttaagttcccagccctgagctgggcatggagtctgttatgtcacatttggatgaagtgactccttatatctctcagacggtggggcagaagccagatattcaagaagaaatcaaatagcagctgagggtgggaatagggcagcaatgagagacaagtgggcatttcagacaacaaaggaagccaaattcatgatgtaaaactactggaaccaaggttgtggacattcctggggctccacagagcagatgggaaacctagacagaggagtcatatggttcgtctgtcccctagtttccctgcctcagtccattagtttgttccatttggacacccccagcctcttatagagcagtcagcccacccattatgttctcagtaatgtacctctctccccaccgcctggctcctccatccatcacctttgttcttacatcattatgaaccctcacccatgtgtccatcggtccactcccccagtactccctctaccgccttgccaccattttgtctccttactccctactccctgtctagtcatctacgccttggtgtttattaggctgcgtgaagctccttgctaggaggcacagaggtgggaaacctgccctccagccacctccctgccccaaactgctgcccaccagctcagccccagccctgactgcagtgcaccttttcccgcaggaacctcctctgggacagaggtacccgcaacggagaacagcggggccatgcgcccatacaagcaggagccgggcagccccccaccagctccactggcaccggtcctccctgccttcctggcagctccaggcactgtgtcgtgcccggagtgcgggaagtctcccttgaagccggcgcatctactgcgccaccggcaaagccactccggtgagaagccgcacgcgtgccctgagtgcggcaaggcattccggcgtaaggagcacctgcggcgccaccgcggcacgcaccccggcagcccagggcctgcactgcgccccctgcctgcgcgcgagaagccgcacgcgtgctgcgaatgcggcaagaccttctactggcgcgagcacctggtgcgccaccgcaagacacactctggcgcgcgacctttcgcctgctgggaatgtggcaagggcttcgggaggcgtgagcatgtgctccgtcaccagcgtatccatggccgggcggccgcggtagctcaagggacttcagcaccaggtccagagggtggtggtgcctttccgccctgggctctggggtagctggggttctaaacacctgctgcagggcgtcatccccttagagttctcccaaccccattgcctcttcccttttgggccccatatccactcctcccttccttctggagttctcagctttcacccacccctgcgaaagacccttctctccttccctcattccatccccttttcatggaggagagacttgccccaggacacccttcaagtgagaaagggggctcagggaaggagcagtgcccccactcctcccttccaaggatcttgatcttgaaccccaggacagagtcggggccaatggagagaagaggcctggacccggatctggttctctccatagcctaaaggaatgaggtggggagaggtacccgagaaagcttgtcacagatggcaggtcaccagcacctgagagagtaataaagtgactgactcagtgtgtacaggagtctgactctccggtgttgtgggagctgagcatctgaggcacaggggacttggggactcctcacacatcgcaggaagaaagactagactcggaaggtctggcagcagatcactcccatcctggttgtcctggctgtatatagcttcaggtaggtggaccgcccccgaaatccccttttctgagcaatagttcccgtttcgtaagtcatggtgcttgtaatgtcgcccacaaccattactaagttaataatattgctaggtgcctccggtccactcctaataaccaagtgccagccagcaggtctgaaagcacctcagttcttcacagtgaccgtccaggaatctagacctaacttctcttcaggatgcgcttctttgggtataaagtctgcccagtctgctgtggagcagactctgggacagtccttagcctggccctgctggctcttctgggtaccagctttgagctcctgggctctgcttccttaccagaactctatgtaatggcatcacacagtggagggaggtagaggaaccccaatgcccactcaattttttttttccttaagatgagaacttgctgaatcagtctaagctgaccttgatctcattgtgtaaccaaaggtgaccacagatttctggttctcctgtctccatctccccagtttgaagatcataagtatgcactatgtcgtctgtgatcttaaaaggcatgtgccaccatgcccaagttttattccgggtttgcttggtgggtttttttttttgtttgtttttttgttttttttttttttttttttttttgagacagaaatgtcatgtatttctcactatcctgaagcttgccatatatcaggctgcccccagactcataagagatccgcctacctctgcctcctgagtgctgggattaaaggtgtggaccaccatgcccggttctcgttcttaatgcatacatgggaccttcctggaatacatacccaaagaaatggtcgaagctggacacaactatacttttaggaaaagagtaagtgtatgaataagtgacagaatgggtaggggtggggctctggcagaaatgggagtttcgctaggaaatacagttaggagggttatatgatgctatcttcatgagagtatgcattcctttgaggcagtgctgccctctggtggtgagggctgtttctggaactaagaaggcatcatctctgggagttttttcacctcaagtaagaatgagcaggtagacagccctttccacaaagaggtttttattgttgttttggttttggtttctctgtgtatccctggctgtcctggaactcgctttgtagaccaggctggcctcaaactcagaaatctgcctgcctctgcctcccgagtgctgggattaaaggcgagtgcccccacggccggctcacagaggtttttcaggagcatattaactcatcctttacaccttcagtagtcttgactgtggcgctcctgccccagcccctgttaaccatgctgctgctgttgcttcaggctttccagtcctagtggcaggaaagttatctaattcgtttttccaaaattgtatagctactctgtttcagagacccacaatggtgtagaagcagataacaccatccacctttgacaaagctgccaagccccaatgtccaccctaacatggctaatgaaccctagttctgaagaccacaccaagacattgatgcatgcctcagggtccacacccatgcagtatctttcatggcagcacttggtgtggaggtgtccgtcttgtgcagtaagacaggctggagaagtcacattatcagctgcaggctttcaagttactgggaggagcatggaacaatgggaaggtgggggtgtcgtgcagacagaggccatgtcatttggcataacaggaagcacacagtgaaaatgctgtgcttgtctgagatgaatcagtgggtaagagcacttgctctgtaaacaaggacccgagctccatttatcagcatctataacattgcactggcgcaaaagcagaattcttactagagaaatagaactgagaaccagttctcctatagccacccagaggccagcggtacacactgaagaaaagatggcatcttcagcagatggtgctggtcacacttgatagacacattcagaatgagcatgcattcatatccatcaccctgcacaaaactcacctccagatgggccacgggcgtcaacataagtccagataccttgaatctgatagaagagaagatagggaataggcttgaactcgctgtcccaggaaaggggtttctgagcagagcactgatagcccaggcactaagtgctacacttaataaatggggcctcataaagctgaaaagctttgcacagcaaaggacactatcattcaagcaaactgacagcgggaaaagaaatcattaccagctaccagtctagcagagagtctgcacccagaatgtagagaagactaaagaaaccaagcagcatgtaaacccagcccaattttaaaagtgaggcatggcaatatacagagttctccaaaggttaaacaaatggccgagagacgtttttacagtgttcatcatctttgccatcagtgaaaatgcaagttaaagtgactttgagattattttagcctagtcataatggatatgatttaaaggaaagaaagagaaagagagaaaaagatagctgggcagtggtgacagacacctgtaatcccagcactcaggacacggaggcaggcagatctctgtgagttcaaggccagcctggtctacagagtgagtcccaggacagccagggctacacagagaaaccctgtctggaacaaccccaaataaatagataacaagtgctggtgttggtgttgaatagtgaacacacacttgttgctggtggaaatacagactagtgcaaccactatggaagtcagcctggaggttcctaaaaacaagaaaccaacaaaaaccgaaaatagctgcactgctcatgggcacatgccccagagactctaccatcttattatagagacacttgtttgtccgtgttcattgttgctctctttatagccagaaggtgtaaactgcctagatgtctgtggtagtttgtatatgcttggcccagggagtggcacaattaggaagtatagccttgttggagtaggtgtgtcactgtgggcatgggctttaatacccttatcctggctgcttagaaatcagtattttcctagcagcctccagatgaagatgtagaactctcagttcctcctacaccatacctgcctggacactgccatgctcccaccttgatgataatggactgaacctctgaacctgtaagcctgccccaattaaatgttgtccaaataaaagttgccttagtcatggtgtctgttcacagaagtaaaaccctaagacaatgtgtattagccaatgatgtccatcaaactatgaaaatatgcgtgtacacaatgggctgttcaactgttaaggacacaaaactcagaaattcacaggtaaatggatggagctggaatcaaatcattctgagcgaggtaacccagacccagaaaggcaagcgtcgcacattttctctcattgtggacatcagctgtatgtcttcacatttctatgtctcatttgggatgttcatgagctcaggaaagtagtaaggggtgggctgggtaggggctttcaagggaggggagatagaaagcaagcggtaataaaaacacagaggcaaagctccagttgacttcatcagtcaatcatgggaatgtgtaacttgaagaaccgagacagagggactgtgtgagatgaaactcagctaggcagggtcaccccaggggcctgctctctgcacagtgctggtatagccatggcctggttctgccggagtttggctccccctcctggtgacagagagagacagcagctcccatggctaggtcattctttgagcaaaatgaagaaacaggtgagagagggtgtagagaacactgggaagaaatgtggaaatgaggcgactggagaactgactcaaggcctaagagcgcctactgctctctcagggggcccaagttcagttcccagcacacataccttgtggctcaccacttccctctagctccaggggatctggcacccctttctggcttttgcaggcacctgtgtatacctgacatgcattcagacacatagacacataaataaaacgaaaaaatattttggacgagagagaatgactaatgaggatgtctttgggcctcccttctcttgactgttcccctccctcccttcttccctccctgtggtctctaggtaacctcctctaggtgtccatcccatagccttctgtcctttgtcctgatgacatcacctcccatcctctcttctctttcccagaaaagccatttacagttcttgtcattttattcttcctgagagtcctcctcctcctctccctcttcctcctcctcttcctcctcccccagatctgaggtcacacaaaggaaactgcagcccaacagctctcatccatgcctttccttgacttgacatttttcagccagaacaagaaggaacaggggctggttccagaagcactttaggtgcggggaaggggggagggaggtagagggggtggctgatgtaaagagagaagaaagtgctccatggtcagtgggatatgggagggaaagggggccctttggcagagaggaagagacagaactccaagagaacccagactttttttttaccatctctctgggagcaaatggcattgccaggagttataccccccacacacactcccaccctcacccccagtttcctctcaaaattggctgctgtccagggcaaagagggagagaaaggaagagaaagataataacaaaagcaaggagagagctggaacacacacagtggtcccataagttgctcaccctacagctgtattgagatccaggagctatctgctctaggaaattattggccagtgagatagctcattgggggagtgtgctagccatcaaggcagtgagatagctcattgggggagtgtgctagccatcaaggcagtgagatagctcattgggggagtgtgctagccatcaaggcagtgagatagctcattgggggagtgtgctagccatcaaggcagtgagatagctcattgggggagtgtgctagccatcaaggcagtgagatagctcattgggggagtgtgctagccatcaaggcagtgagatagctcattgggggagtgtgctagccatcaaggcagtgagatagctcattgggggagtgtgctagccatcaaggcagtgagatagctcattgggggagtgtgctagccatcaaggcagatgacctgactttaatacccaggactcatatgatgggttgtcctctgacctccacacgtgtgttatggcatatgattaccacaaataaataaataagtgatggaattttagagaatatatgtgtgcgcatgggtgagtgtacctgtatgcacacacaaaggccacaagagggtgctgtgtgtcccttctcaccactctccacataagcctttgaggtagcatctctcctagaacccaggactcattctttttcttggttaggctggtgatctgcctgtttctgtctatccaccccttgtcccaaattgaagcagggaatataggaggatataggacatctggcttgttacatggatcctggggtccaaattccttggacctcgtgattgtgcagcaaacacacttaacatctgtgccacctctccagtcccttattttgttccgtggttggttgagtcaggggttcactaaagaccagactggcctggaactcatgagcctccagcctcagtccccaaagtgctgggattacatgtgtgcgcaagccttccgggctgagaggtggtgacgcacacctttaatccaggcagtcagaaagcagcagcaggtggatctctgtgagttcaaggccagtctggtctacagaaggagtttcaggacagctggcactacacaaaactctgtcctggaaaacaaacaaaaagaacaaccacaaaaaataactatgagctttcaaagtcagctccaggagccatttttagaatgaggttcatggagaaaggaaacactgagaaacacagacagacagacagatgtacacatgcatgtgcacgcatgtacacacacacacacacaaagaagaaaggacctttattatacatgcaacagaagacacaggtcaaactaggtgtgataatagctattataaaacttggaggtgtaggagaatcaagagttcaaagtcatcctctgctgaaactggagttgaggctagcctaggctacagataccctatgtcaaaacaagaacaacaaagaaacacaaggggatctgagatggctcattaggtaaggtacttgatggcaagctgtcacgacaaattgagttccattcctgggacctacgtggctgaaggaggaaaccaatactcacaagttattctctgacccccagcacacacacacacacacacacacacacacgatgaaaacaaaacaaacaaacaaacagaaaaccacaaaacacaggttagagagaccataaagaggcagtgaaggaaagacagtctcaaatcaaggacctgccagcaatggctgtggcagagaaatgttttctgccacaaggcacctttgtctgacctcacactccagttaaggaactctgaagtggatgagtcgtcctctctgcctccatcctcactagcccgcccacccttgtctctctccctaacctcctcattctcctcagaagctcacaaaccaggatccccgctgctgctgagagccgcccagcccagccggtgctgccagctccacacaggttagagcctgggctggagggaggggaggctgggggatctgacagcagtgatggtaaaagcatctcagagactggcagggccatgacaggatggggcagtagggaagatggggcatcgagcatgggtcggtaggaaggtatgcacagagaagcagagaggaggagcgtgggtatggtcaaattccacgtgcgtggtagtgggtctgagaaacatgggtaaaggtggatagaggaatattttgcttgcttccttgattttttttcctttttattacattagttactaatttggggtgtgtgtgtgctcacttatgtcccacagcacgactgtggagctcagaagacgactcgtagggatcagttccctccctatacctctgcagctcctgggaattgaactcaggtccatcaggcttggcagcaagcaccttcacctgcttagctgacctctgtttttcaggcaggatcttatgtagtccaggatggcttcaaatttgctccatggaagaaaatgaccttgaatttctaatcctcctgcctctgcctctggagtgttggggttatgggtgtacaacaccaccatacctgactctggagagccttatgctgtttttttttttttttctggtctcagtgttctatcagtaagctgtctataccacacattgcaaacccatggattcaaataatcaaaaattaaaaataaccagggaaagctagttaaatggctaaactggtgaaggtggttggagctaaccccaatgacctggaatttgattcctaggagtgggagggggagctgtcctccaaacatggacatttttcttatgtttccttaaggacacaatgttgcattatttacaggggattttttattttcaatgttctaggcgacactgcccagaggcaatctaagtatataggagggggctggagaggtggcttggcagttaaacacaatggctgttcttgcagacgacctgggctccgtttccagtacccacatcaagcagctcacagtcaattgtaattttagttctagaggctctgacccctgtccctagggcagaggtgcagaggttctatgcaaaagggtctagaagaatggcagatgtgggtatccgtggggaagggtctcatgagtactgaagacaggtgtacatacttgtacattttctctcaaccaactctctcgtttccttccttcccctcctgctttcctacttacttctgagtgctgcctgtgtagaggtcagaggacaacctgaggtgttgaaactcaccctttgccttgttgtgggcagggtctcttgtttgcagctatggagctgtgaacaccaggggaactggctgtgagcctcagggcactttcctgacttccccctccatccatctcagtgcaggacaactggaatccagatgcacatccctgcaacttgctgctacatgagtcctggggcctcaagcttgccaagtgaacactttgtttattcactaaaccatctccccattctacatgcgctttgtttttgttttctctctcttctccttccctccctctctcccttctattccctccttccctccttacctaagatttatttaatttattttattttatgtgcatgtatgtctgcatgcctgccaaggccagaaggtgatacaggattccctagaactggagtcagaagacattgtgagctacctggtgtaggttctgggacagaacccaggtttttcacaatagtagcaaatatttttgttttctttctttctttctttctttctttctttctttctttctttcttccttccttccttccttccttccttccttcctttctttcttcctttctttctttctttcttcccttcatcccttccttccttcctcttcctcctccctcctcctcctcctcnnnnnnnnnnnnnnnnnnnncctcctcctcctcctcctcctcctcctccttcttcttcttcttcttcttctggtttttttgggacaaggtttctctgtatagccctggctgtcctggaacgcactgtgtagaagagcaggctggcctagaactcaaaaatctgcctgcctctgcctcccaagtgctgggattaaaagcgtgcgccaccactgcccagctttttttctttttcttttcttttcttttcttttttttaagtttgtttgtttgtttatttatttatttatttattatatgtaagtacactgtagctatcttcagacactccagaagagggcatcagattctgttacagatggttgtgagccaccatgtggttgctgggatttgaactcaggacctttggaagagcagtcggcactcttaaccactgagccatctcaccagctccccttgttttatttttcaagatggggtttctctaggtagctactgagtgctggactcagtccatctcccaacctcagaagaatcagggttccagtactcaggtgggcaaggagtcagaggcgagtgtggcaaacagataggaacacaagggagtgttgatctgaatgtaatttttcaaagggagcatcagatttataatacagaagaaaaacaaggaagctaggcaatacatcagccaaggtacatcaagatgcataatgatgtctttacacaaaacagagaaaatgtatacataaaagctagaaggaaccagacattgtttacaactgagataaaatcagccatatctaaaatcagctattcacaggagccaggtaaaagggctaatacgcccaggtgcagtaatagtctactgttaaacccaccaccaggggtcccttaataaatacctaattatgctattcctctgggcctagagaaaaacatgcaccaggggagttcctttctactaaccctttcatgaacaatacaatactctagttcctccttaaaccacaaccctccttcttcctagaccattgtaaattcctgcatatggaagtgactcggctgttattctaagtttactttgtggaattagctctgagatttttagctcttatccagtaaaatactgcaagaaaatatgcaagaccctccacactatcacagggacaaatctggtt

SEQ ID NO: 1889 - DNA, 1585 bp, Mus musculus
gcgcaaagcctgctggggcatggagtcccgatgagctttgtgcgcatgtgcgggaaggtgaggttgtttggggggcctcgcccaggagagtgaggtgctggtaactcaaacctaggtggcctcatggaggccccaacgacccagccagtgaagcaggagaacctggcggttgaggccctgacgctcgactccccgtggcaccgcttccgccacttccacctgggcgatgcagcagggccacgtgaggccctggggctgctccgtgccctgtgccgggactggctccagccggaagtgcacacgaaggagcagatgctggagctgctggtgttggagcagttcctgagcgccctccctgcagacacccaggcgtgggtgtgcagccgccggccccagagcggagaggaggctgtggcgctgctggaggagctctggggcccagcaacctccccagatgggtcgtcagcaatgagggcacctcgggatgtgaccgaaggcccgggggtcagtgttggaaaggaagaaagtggggcaattcccttaggaacctcctctgggacagaggtacccgcaacggagaacagcggggccatgcgcccatacaagcaggagccgggcagccccccaccagctccactggcaccggtcctccctgccttcctggcagctccaggcactgtgtcgtgcccggagtgcgggaagtctcccttgaagccggcgcatctactgcgccaccggcaaagccactccggtgagaagccgcacgcgtgccctgagtgcggcaaggcattccggcgtaaggagcacctgcggcgccaccgcggcacgcaccccggcagcccagggcctgcactgcgccccctgcctgcgcgcgagaagccgcacgcgtgctgcgaatgcggcaagaccttctactggcgcgagcacctggtgcgccaccgcaagacacactctggcgcgcgacctttcgcctgctgggaatgtggcaagggcttcgggaggcgtgagcatgtgctccgtcaccagcgtatccatggccgggcggccgcggtagctcaagggacttcagcaccaggtccagagggtggtggtgcctttccgccctgggctctggggtagctggggttctaaacacctgctgcagggcgtcatccccttagagttctcccaaccccattgcctcttcccttttgggccccatatccactcctcccttccttctggagttctcagctttcacccacccctgcgaaagacccttctctccttccctcattccatccccttttcatggaggagagacttgccccaggacacccttcaagtgagaaagggggctcagggaaggagcagtgcccccactcctcccttccaaggatcttgatcttgaaccccaggacagagtcggggccaatggagagaagaggcctggacccggatctggttctctccatagcctaaaggaatgaggtggggagaggtacccgagaaagcttgtcacagatggcaggtcaccagcacctgagagagtaataaagtgactgactcagtgtgtacaggagtctgactctccggtgttgtggga

SEQ ID NO: 1890 - protein, 329 aa, Mus musculus
MEAPTTQPVKQENLAVEALTLDSPWHRFRHFHLGDAAGPREALGLLRALCRDWLQPEVHTKEQMLELLVLEQFLSALPADTQAWVCSRRPQSGEEAVLEELWGPATSPDGSSAMRAPRDVTEGPGVSVGKEESGAIPLGTSSGTEVPATENSGAMRPYKQEPGSPPPAPLAPVLPAFLAAPGTVSCPECGKSPLKPAHLLRHRQSHSGEKPHACPECGKAFRRKEHLRRHRGTHPGSPGPALRPLPAREKPHACCECGKTFYWREHLVRHRKTHSGARPFACWECGKGFGRREHVLRHQRIHGRAAAVAQGTSAPGPEGGGAFPPWALG

SEQ ID NO: 1891 - DNA, 1672 bp, Mus musculus
cgcaaagcctgctggggcatggagtcccgatgagctttgtgcgcatgtgcgggaaggtgaggttgtttggggggcctcgcccaggagagtgagccaaggagatggagattagtctttgaaaggagcagttgttctttgaccgaggacacattgctggtacgcagctggaatcggttccaattccgaagcccttgtcctctgagtaaatatttggtgctggtaactcaaacctaggtggcctcatggaggccccaacgacccagccagtgaagcaggagaacctggcggttgaggccctgacgctcgactccccgtggcaccgcttccgccacttccacctgggcgatgcagcagggccacgtgaggccctggggctgctccgtgccctgtgccgggactggctccagccggaagtgcacacgaaggagcagatgctggagctgctggtgttggagcagttcctgagcgccctccctgcagacacccaggcgtgggtgtgcagccgccggccccagagcggagaggaggctgtggcgctgctggaggagctctggggcccagcaacctccccagatgggtcgtcagcaatgagggcacctcgggatgtgaccgaaggcccgggggtcagtgttggaaaggaagaaagtggggcaattcccttaggaacctcctctgggacagaggtacccgcaacggagaacagcggggccatgcgcccatacaagcaggagccgggcagccccccaccagctccactggcaccggtcctccctgccttcctggcagctccaggcactgtgtcgtgcccggagtgcgggaagtctcccttgaagccggcgcatctactgcgccaccggcaaagccactccggtgagaagccgcacgcgtgccctgagtgcggcaaggcattccggcgtaaggagcacctgcggcgccaccgcggcacgcaccccggcagcccagggcctgcactgcgccccctgcctgcgcgcgagaagccgcacgcgtgctgcgaatgcggcaagaccttctactggcgcgagcacctggtgcgccaccgcaagacacactctggcgcgcgacctttcgcctgctgggaatgtggcaagggcttcgggaggcgtgagcatgtgctccgtcaccagcgtatccatggccgggcggccgcggtagctcaagggacttcagcaccaggtccagagggtggtggtgcctttccgccctgggctctggggtagctggggttctaaacacctgctgcagggcgtcatccccttagagttctcccaaccccattgcctcttcccttttgggccccatatccactcctcccttccttctggagttctcagctttcacccacccctgcgaaagacccttctctccttccctcattccatccccttttcatggaggagagacttgccccaggacacccttcaagtgagaaagggggctcagggaaggagcagtgcccccactcctcccttccaaggatcttgatcttgaaccccaggacagagtcggggccaatggagagaagaggcctggacccggatctggttctctccatagcctaaaggaatgaggtggggagaggtacccgagaaagcttgtcacagatggcaggtcaccagcacctgagagagtaataaagtgactgactcagtgt

SEQ ID NO: 1892 - protein, 329 aa, Mus musculus; identical to SEQ ID NO: 1890

SEQ ID NO: 1893 - DNA, 39369 bp, Homo sapiens
gtctcagtctgggttcgagagaggaaacaggtaaatagaccccacgccaggtattttatctaccaaagggtttaatgtagggaattaaatgttcacaaaattattgaatgggctgagcctcctgcgataactcagagaaccacacggaactgtcccagcaaggagccaccgcctttgaggactcatctgtagctctgagttccagaacatatccccagagctgtgatccaggggccaaaagctgccacctgaggtccgggaagtcagagaatggccctgactgcctgccgtggagacacctcatattccactgttatacttgccaggaggaacagtgcaagaggggcaagagaagcgggggaatgaaaatgggccctgctggcagccaagtcatgatgttccaagcaagcaagaatagggttgtgggctgagcgtggtggctcacgcctgtaatcccagcactttgggaggccgaggcgggtggatcacaaggtcaggagttcaagaccagcctggccaacatggtgaaaccccgtctctaataaaatacaaaaattagccaggcgtggtggcgggcgcctgtaatcccagctactcaggaggctgaggcaggagaatcgcttgagcctgggaggtggaggttgcagtgagccaagatggggccattgcactccagcctgagtgacagagcgagactcgttctcaaaaaaaaaaaaaaattgtgttctgtacaaagagtcacaccacaacagcaaaaaattcaacaccttccttcctctgacaacatcacattctttactgctacttccttaccattgaaaacgcaaccctgcgctatcttcctgccttcagggcaaaaattaaagagaagagctgggcatggtcgctcacgcctgtaatcccagccacttgggaggctgaagcaggaggatcacttgaggccaggagttcaagatcagcttgggcaacataacaagaccctatctctgtaattagaaaaaaaattgaagccgggtgcggtggctcacacctgtaatcccagcacttatgggaggccaaggcgggtggatcacaagaggccaggagttcgagactagcttggccaacattgcgaaatcctgtctctactaaacatacaaaaattagctgggcatggtggcctgtgtctataattccagctactcaggaggctgaggcatgagaatcccttgtacctgagaggctgaggttgcagtgagccaagatcgcgccactgcactccagcctgggcgacagagcaagactgtctcaaaaaaaaaaaaaaaaaaaaattatggaggaatccaatcagtgcattgcccggcttcttaagccttcattagaactgctctccacttcccccaacccccggcagagccctctagcacaagccctaacgctctgaaaggcctcttctgactctttgtacagtgatcccctggaatgcgtcctcccttgctgaaccaagataaataaacctcactgccagtggttcttttggcccttgatcggctttccgcatcttactcgagtgcacttaattagcaaagcccagttcagcccagaactctagctctccagaggtctgggaaatgcagcttcaatctccaaccggagagatttctctccagagagtaaagggctggaagtgggggcgagacagaagccacagtatcaacctctgagaagccgcgttcattcctgccagacattgcgagatacagttgggaagaatttccaaggaattcttctctgccttggcagtgagggtaaggtcagcttgactcgctcctcctgtaggccctgctcactctctgaacatctaaggaagaggatatatctggccggtggaaaacctgctgccggagctgggtggacacctcagaatgcccttcttttttttctttttctttctttctttctttcttttttttttttttttttttgagacagagtctcacactgttgcccaggctggagtgcagtggtgcgatcttggctcactgcaacctccacctcttaggttcaagcaattcttctgcctcagcctcccaagtagctgggattacaggcatgggccaccatgcccggcttatttttgtatttttagtagagatgtggtttcaccatgttggccagactggtctcaaactcctgacctcaggtgatccacccacctcggcctcccaaagtgttgggattacaggcgcacaccaccatgcccggctaatttttgtatttttagtagagacgtggtttcaccatgttggctagactggtctcaaactcctgacctcaggtgatccacccacctcagcctcccaaagtgctgcgatcacaggcatgagccaccgcacctggctagaatgcccttcttgagcctcagtttcctcatctgtgagagagactcaggacacctgctgctggccttaaaacccgggtctcttgctgtgtcacctgggagagtacacctgctccactgagcctcgattatcccaaccgtaaaatggggtgattctcaggccgggcgcggtggctcacgcctgtaatcccagcacttcgggaggccgagatgggtggatcacaaggtcaggagatcaagaccatcctggctaacatggtgaaaccccgtctctactaaaaatacaaaaaaattagccgggcgtggtggcgggcacctgtagtcccagctactcgggaggctgaggcaggagaatggcgtgaacccggaaggcggagcttgcagtgagccgagatcgcgccactgcactccagcctgggcgacagagcaagactccatctcaaaaaaaaaaaaaaaaatggggtgattcctgatgagctctgctgcctcgccgggggagcatgagggggaaatcagataatgggcaatgtgatccatcattaagcaattcgttcattaatttcattatcctttctcaaacgtttcctgctgcctgggaagccaaagatgactcaggttcagatccagccccctgggagcctgcactgctagacacagactgacatccatacgccatccccccttctgctggttcttcccctttctgctggttctccccctcacacgctcactcagctcactcatgcgtccatcatccactcacccataaacccaacccgagcctccagagatgaaccaaaccccatccctgccctgggggatcttagtgcttcaaagcaccatacaaagagaaaaaccttaattattatttggggtaataattatagcagagctacaaaggagccgagaagctagaaggtatgagctaaatttgctgtcaaaggaattctcgccctcaggcctgggaagcagggtaagaaccacttgccttcactcttatttactcattcacaggcaggccccaagccaggagctgggtacagcaggcaaggagggttggtctctgttgctgagtcgctcagcatgaggtgggcggagcagtcacccaaaaatagtatatgaaatggagaaagagggggctctgcggaagctccagtgaggcacttggtccagacttacaggtgtgggggtggtctgggaaggcttcctggaggaggggacgtctgatctcagagtattatatgatgttaccagatgaagaagtggaggaaggacatttccaggaagtcgttccttcatttcattcctcaccaagatttatggcccacttaccatacattaggccctgtcctaaacgctggtgtgccaacattgcacagatcgtcaaggtgatatttatgtaaacaggacccaggacaaaattaaaatgcagagccctgtgtttaaaaaaaaaaaaagtattaagaatttcaagctgggtgtggtagctgtaatcccagctactcaggaggctgacgcaggaggatctcgtgaggccaggagtttgtgagaccttatttctttaaaaaaaaaaaatgtcaggccgggcacggtgcctcatgcctgtaatcccagcactttgggaggccgaggtgggtggatcacgaggtcaggagatcgagaccatcctggctaacacggtgaaaccccgtctctactaaaaatacaaaaaatcagccaggcatggtggcaggcgcctgtagtcccagctactggggaggctgaggcaggagaatggcatgaacccaggaggtggagcttgctgtgagccgagatcgcgccactgcactccagcctgggtgacagggcgagactctgtctcaaaaaaaagaaaaaaatgtcaagatagccacagctgggcattcaaccaagtgcagggcagcctgcaaccacacaggttgcatcccatgaagctggccccggatatgtgtgacttgctgtcacttttggcttcaacaacagacaacttgactcaaaatggcttgaggggacttactacttcatgccaagagaagcctggaggtagggcaggtccagccacggttggttaaaattcagctgccaaaccatgccatgaaggatccaggttcctccgtctcacctcccttccatcctaagtgaggagctcccactaccagccctcatggtacccaggtggctgccacagcttgaagtgtcacctgcagacagggcagggctccagggcaactgtttcttcctgcttatcagttgcttaagagttgggaaaacctttcccagcagtgccccagcaaatctgccttcaggtttcattagccagaatagtgtcacatatgtgagcgtcaaccaattgctggcaaggagaaggggcacagcaaaattggcttacaccaataaggacctgctcctggtcaggcagggtggctcacactggtaatcccagcacttcgggaggctgaggtgggtgggcctcacttgagatcagaagatcgaccagcctggccaacatggtgaaaccccgtctctactaaaaatacaaaaaatattagccgggtgtggtggtgcgtgcctgtaatcccagccacttgggaggctgaggcaggagaatcgcttcaacccaggagacagaggttgcagtgagccaagatcgcaccactgcactccagcctgggtgacagagcgagattccgtctcaaaaaaaaaaaaaaaaaaaaaaaagctaaaaaaaaaggacccgctccttattgggcccttgggcccttattaaccacgctcacccccaatcccaactctctgagtgtgttatgacctccattcaagtgaagacgccgatgagctgagatccccaggctctctcggctggggcatgttgggtgggtttggagccctgccctcacccactgtgctaggccctcaactctggctggacactgattctgtgtactctgtccaccctcggatcctttgtgcccatacaacatttcatctgtctcattataggtgtccagtttgtatgaagtgaacaaatgctgagcagacaatagccagtagtgaaacaagctgtttttgttgcacggatgtggggagggagggaagagtcaactttgcatttgagctgggcttgcttttatcagcgactccactggagttaagtaagaatagcaagtgtttattgaactcgtactccctgccaggtagccttccgagtgctttgcgtgtattaactcatgaatcctcccaagcaccctgtgaagcggcgactattctagagtgcaggtagaaggtaccgatgcataggagtgcgcctttgcatcccctggaggccttgttgaagtaaatcgctgggccccctgctagagttgctgattcagtctgaggcagagaccgagaatctgcatttctttttttctttttttagacggagtttcactcttgttgcccaggctggagtgcaatggcacgatcttggctcaccgcaacctctgcctcccggttcaagtgattctcccgcctcagcctccttagtagctgggattacagggatgcaccactacacccagctaatttttttgtatttttagtggagatggggtttctccatgttggtcaggctggtctcaagctcccgacctcaggtaatccacctgcctcggcctcccaaagtgctgggattacaggcgtgagccactgtgcccagccgagaatctgcatttctaacaagctcccaggtgatgttgtgcagctggtctggggactacactttgagaactgctgtgttagaggaacttaaaagagtgacccatgaggcctggcgcggtggctcacgcctgtcatcccagcactttgggaggccgaggcgggcggattacctgaggtcaggagtttgagaccagcctggccaacatggcaaaaccccgtctctattaaaaatacaaaaattaactggtgtggtggtgggtgcctgttgtcccaactattcaggagtctgaggtggaagaatcgcttaagcctgggagaagggggttgcaatgagccaagatcaagctactacactccagcctgggcgacagagcgagactcagcctcaaaaaagaaaaagaaaaagaaaaaaaaagtggccaatgagttgaaacatagtgatgaagaaggaaacggtgttggatcgagagcctgtgtgaaccctgtatatgacatgcaggcacctggccaaccaggaagaggtggctggaatattcctccggatctgcctgccaagctgtgtgccccggctcagttctgcagtgcttctgagggccatgcttttctaacacacacaaaggcactctataagctaaaggagctctgggtctgaaggcacatcatgtgggactgtgcaggctagcgacaagggtttgcaatggagggttttaagcaaaagtgacatgaccctatttaagtttaaataagatccctctgggaccagtttcggtggctcacgcctgtaatcccagcactttgggaggccgaggcgggtggatgacctgaggtcaggagtttgtgaccagcctggccaacatggtgaaaccccgtctctattaaaattacaaaaaaattagctgggtgtggtggcgggcgcctgtaatcccagctacttaggaggctgaggtaggagaatcgcttgaaccctcgaggtggaggttgcagtgagctgagatggaaccattgcactccagcctgggtgacgagaaggaaaactccatcttaaaaaaaaaaattcctctgataaatgggtaaacaaaatatggtctgtgtatgcaacagaatattaggcaatctttaaaaggaaggagattttgacatacactacaacatggattaaccttgaggacattctgccaagttaaataagtcagtcacaaaaaacaaatacggtatgattccacttacatgaagtattaatgtggtcaaaatcacagaaactgggctgggcatggtggctcacacctgtaatcccaacactttgggaggctgaggcaggtggatcacttgagaccaggagtttaaacccagcctgggtaacatggcaaaacgctgtccctacaaaaaaaagaaaaaaaaaaattagctgggcgtggttgtgtgcacctgtagtctcagctactcgggaggccaatgtgggagaatcccttgagcctgggaagcagaagtcacagtgagccaagactgagccactggactccagtctggccaacagattcagaccctgtctcaaataaataaattacagaaactgataacagaatggtggttggccaggagctcgggggagagaggaatgggtggttcacatttaatgggtacaatttcaatttgggaagatgaaaaattcgggaaatggacagtagtgatgattgcacagcttgaatgtactttttttttttttttttttttttttgagacagagtctgactctgttgcccggactgaagtgcagcggtgcaatcttagctcactgcaacctccaccttccaggttcaagagattctctggcctcaccctcccgagtagctgggattacaggtgcccgccaccatgcccagctaatttttgtatttttagtagagacggggtttcaccatgttggccagggtggtctcgaactcctaacttctgatccgcacgcctcggtctcccaaagtgctgggattacaggcgtgagccaccacacccggcctagcttgaatgtacttaatgctactgaactgtaccttaaaaatgattaagatggtaatttttatcttgtatatattttaccacaattaaaaaaaaaagatccctttggcgctgtgtggagcaggaactgaggggcaggaggcagaagaggcgagagtggaagcatgacagtgtctaaagaggccatggggacttaaaccaggtggtagccatagacgggagagctgtggacagattctgcatctattttgaagacagagccaataggacctgatgatagattgcatgtggatggtgatgaaaaagaggaattggctgggcgtggtggttcacgcttgcaatcacagcattttgggaggccgaggaggcagatcacttgaggccaggagttcgagaccagcctggccaacatggcaaaccccatctctattaaaaatacaaaaattagctgggcatggtggtgcacgcctgtagtcctggctactcaggaggattcagcatgagaatcacttgagactgggagtcggaggttgcagtgagctgtgatcgcaccactgcactccagcctgggcaacacagccagaccctgtatcaaaaaacaaaacaaaacaaaacaaaaaaccaaaaaaaaaaaaaaagaaaaaagaatcaagggctgcttttctatttttggcctcaacatttgggtgaagatggacttgctttctaagatggtggagtaatgggaaggaacaaatttcttcgcaaggtgggggagagagtgaaaaattatctactgcccaccttaggtttgagatgcctattaagaaatccaagaggagatgtcaagtaggccatcggatatgagtgggaagaagatcagcatgctctaggagcagaaaggaggcatgactggaactcattaaacacgaggagaagacagtggtagacaggtgggccagggcagatgaggccaccgtgggcaaactggtcacaaagttctgagtcagccactcatcgcttgtgaaacctggggaaagttgttcatttatgaatataagacgaacaacttccatgtaatgaatgcttgttatgggtaagccactgtcttcgtttttatggcgcggagtcttcagatcagccggggaggtggaggatgggagggggattctcttatccttgttgtacggaggaggaaatacgctgcgggctggggtagggcttgtatgagccataatcaggtctggaactgtctagataaaaaacttcagctgatctcttaggatgtctgtctgctctaaaatccaaatatgcttcttcacagttctgagatgcagaaactgaggcctcaggacggggcagtagtctgtccaataggggcacagcgaggacgcgtggcaggtagcgctgtcccccaattcaccccaggggaaactgaggctaaagagagggcggtgtcctgtccaggttcacacacaggaagagccaaaccgaggcccccgcgctggccccctcctgagccactgcccaccccggaacaggagggcagcctgctcacgtcctgattcctggcaccgacatcggcccttaagttctgcccgggtggagagggaggacaaaaaaaaatgcgatccgtagtcaaggagacgtagcctgcactcctgattggcgcagaactctagcctggtctcctcctcctcctcctcttcgcttgccagcttctagagctccggaggccccacctcccaaatgcccggcggtgcccggcctcccctgatctccacaacaacgccgccatggctcctcctcctcctccctctttttttcccggcacttctgcgcatgtccagggcccgcgcgcagaccactgggaagcctcctcgtgcattctgggaaatgtagtccaaagcctgtcgcgctcagacagcccgcgacatttgcgccgtcaaggccaaataggctgcagacgacgctttcgcgtatcttgggaaatgtagttccagtgttggcgaagacgccacgcggtgacaaacaggagtaaggcggtccccaggcgagggccaattggcagccgcctttgccgcgatgcttcctgggagttgtagttcggggtgaggccggggcttcatggggagttgttgggctgaacgagcgactcggagtatgggattgggggagggggacgggggagtttggcgcaaagcctgctggggcatggagtcccggcgagctttgtgcgcatgtgcggggaggtgagggggcttggggggcctcgcctgagagagtgaggtgagcgaggggggaaggagggagggattgggtgggggcggttggacgagggagggaccagaggttggatgggaagaggggcgccgggggcctcaggagggaaagatgggagacttgcggggaggggaggagaagggggctgagtgatggggaaggggctgggagagggaactagagggggagggacttggagagggggaggggtggatagtgggagggggtcgtggatcctcgaggtcctgaacgcgggagagaaatgctgagggagaggacgggggaggggcgcctgggggagggggaggggcgggacgggggagggacaggtgggggaggggaaggggaccctagcagagggtgggctgtgagatgaaagctgagtgggaagctggaccctacaaaggagtctgggggcgccgggaccggaccccttcggaaaggtttgcgggaaggggcttccggggacgatggttattgttgtaacgtagatacggcgcaggtggctcgttttgcgcgctgcttctacaagtgcaacttttacagagttgtgagattcctgaagataagaatcgttgctctgttttgctgctttctcagtgcggagcatctgcctttttagcttgttgcaaggcattattaccttcggtaatatgtgtaaagtgcttagaaactctgtttattgtcaaatgaagttgacccccgccacctctaccccagtcaggatggagtcaccctcctctatatccgattttaacgcctattccaatgtatacttagtattttaatctgcgtgcgtgttcatagcagtgtcccctgggcacctcgcagggaaacttcgacaaagtaaccctaagtctgactggacacttactagccaggtgtggttctcagcatttttgttctccttctatcactttacagtcaacgaaatggagatacagggtattacaaaaggtgccttgtacctcgtccaaggacacagagctggtaggaggcagagctggaatttgccccagagcctttgtgccgtaggtaaatatttgtccagtgggccagcggctctcaaccaggagtggttttgtcccccaggggacatgtggcaatgtctggagactttttttttggtttttccaacttgggaagtgctactggcatctcatgaaaagaggcagagatgctggtagacatcgtatgttgcacaggatagcccgccacgacacaagtgccattaatgtcgaggttgggaacctagagtagacaaaccggtctttgtcgagcacttagcctttggaggctgcttctaactcctgctcccagcagcctcttgagaggaaggagctcttgttagtcctgtgtctcaggtggagaaatgaagcacagagggggtaagtcacacgtccacagtcacactgctgatgagtggcagagctggaagttgaagccaggcagccagactccacagcctcttagccatgatattaacccagcatatgtgggtgctggtgccggggtactaggtggaactggtgtggactctggagtcacatctgggtcccatttgtggctccttcactctctgagcatctccctatggtaagaggggacccatctccccagctcacaggtctgttgggaaggttgggtggggcagtataagacactagccactcagtggctgtcttcaaggcatccagggtgcctggctctggactggactgtgctttgcggacacagacagctagacagcagggttacagctgttgaatgcacatagcacagggcgctcattggatggtagggtggattgacatggtggaaggcccttacttaacagcatgtgctttcttgggagcaggccttgtgctggatggccccaccgacccagtgaagagctggacttggtcactgccccagagagctcactttctggacagcccagggtgtagtgacctgtgatcacctctgagattgcaaacagggtcagcttgatggcctgtggcattgctctctggcggaaattcctccttagtcccagagggatcttttttatagcagagcaggcatctgtgtggcttttgagacttggatctggcctgggtcttccgataagtctttctgcctgctcccaggttcatcagcccttaaactgatggatgggtggggtgggaggtgatgctgtggcctggctgtggatgtgcaagtccaggctctgccacgtgttagctgagtgactttaggtaagacatctccccttgctcctgctgcaacttgggggtagtaacaccaacctcatgggattgatcagcctgtaaagtttatttgagtgctagccagaatgctggggttggaatatggagtctctcgcccacatgaattgtagtgaagaaagtcagcacacagatatcgtaacactagatcttgttaaatgctgaaagaaaactaataagggtgacgtcttagcaactgggggaagggcacgtgggtgcagcatcggagggggtgatctggggaggctctccaagggggtaataattgcatggaggcctcagtcatgagaaggagtcaggtaagcaaagattggggggaaagagtgatccagcgggaggcagcacaggtgcagaggccctgtggtgggcactggccttcggtccaagaagatagaaagtgagccagaccgggcacagtggctcactcctgtaatcccagcactttgagaggctgaggtgggaggatcacttgagtccagcagtttgagaccagcctgggcaatatagtgagaccctgtctctacaaaaaatataaaaattagctgggtgtgttggtgcctgcctgtggtcccagctgctcaggaggctgagccaggaggatggtttgagcccaggaggtcggggctgcaatgagccgagaggtcatgccaccgctccagcctgggcgacagagagagaccctgtcttaaaaaaaagaaaaaagaaaaaaagggatccattgtggctggagtatagagaatctgggagcaggcagagatgagaaagtagggctgggctgcatggtctcatggccatagtaagcaatttgggttttgagcatcacaggaagcagttggagggcactgagcaaggaagtgacagggatttacagtgaaaaagtttttgtgatcactgtggagtgatttggctctaggtggcgagagtaggcatacacgggtcttgtggcagccgtcccagcaatgagatgacgtttgtggttagtgacatggcggtcaggagcccaggctttggttgtatcaggaggaaaattgtctgaacacagacttcctctcagacctcaccggctagaagcagattatgtgcccaccctctgccttgtggtcaaggggactttgctatatagttccttatgatacagtccaagctgctgtaatgaagagaccccaagtacagggctccacataggacagaactgattcttttctcccataatactccagaggtgttctggggcgggctggcgcctgagccccatggggtcatcagggtcccttctgtcttgatcttccagtgtccttgaggtcaggggccggcagtcttgtcctgtaaagagccagcgagtgactatctttggctctgtggacagccttacaggccacccaggccctgtcacagccactcggtagctccaaggcggccgtggacagcgcgtgagcaagtgggcgtggatgtgcgccagtgagacttaagtaaaacaggctgcaggccagattcggcccaccagctcagagaccaccatttctcaaatgctttgaagtcaggactcctttctgccttcaaaattactgaagaccctaacatgcttttattgatgggagtcatatctattgttacgtatcatagtagaaaccaaaacagaaaattgtaaagtatttattaatgcatttaaaaatggcaatcacggctgggcgtggtggctcatgccggtaatcccagcactttcggaggccaaggcaggtggatcacctgaggtcaggagtttgagaccagtctggccaacctggcgaaaccccgtctctactaaaaatacaaaaattatccggacgtggtaacgcacgtctataatcccagctacttgggaggatgaggcaggagaatcgcttgaccctgggaggcggaggttgcagtgaaccaagatcgcaccattgcactccatcctgggcaacagagcgagactccatctcaaaacaaaaattaaaaaaaaaaatagagacaggagagctcgctgcctctctctattctacgccatgggaggacacaaaaggaggccgtcggcagcctggaagaggtgctcaccagaacccgacagtgctggcacccagatcgcaaattcccagcggaagggactgggacaggccgtcatagctgtcatagcggagcaccgtggactgaactgctatgagcttatttctcagttctgggagcgggaagctcagaatgccatcatggtcagttcctggtgagggcctctgccaggctgcaggtggcctccttgctgtgtgctcctgctggcagagatggacagagtcccggtgtccctttctcttataaggccacagccctattaggcccagcccttgtgacctcagttaactttcattaccagttaaaagcttcgtctccaaatacggtcacactggggtgagagcttccacatgtgaattttgggagacaaattcaggccacagcagttagttggggtggcttctgagtaggctgcaaagtgtctgctcccagggtgtggggtgcacggccccacaagtccagtgagggtggtgctgatggtgacctgctgctgccaggcctgctgcaagctctttctgtgttttctggttgaatcctcaggacaggctgcgggaggagctgcaggactgaggtacagaggccaggggcccagggcaggacccagcctggacttgactccctgggatcccaggaagggcacaccctttcctcaccacccgagtgagcgctgccccctcacagagacctctttgccccctgggccaggcagagcaggtgagtgctttatcttacaggggaaaccgaggcacagaggccgggcctatcctgggtatgtgggcggctcagaagcgcgggtcccaggccgggtgcagtggctcacgcctgtaattcccagcactttgggaggccgaggtgggcggatcacctggggtcaggagtttgagatcagcctggccaacatggtgaaaccccatctctactaaaaatataaaaattagcaggcgtggtggcggatgcctgtaattcccgctactcaggaagccaaggcaggagaatcgcctgaacccgggagctgaggttgcagtaagctgagatccgccactgcactccaacctgggggaaagagcgaaactccgtctcaaaaaataaaaagtaaaaaaaaagagcgttggtcccattgtgagtctgggcaccgcgggcagggtctcggcgggcaggggtctcaccggcttgttccctgcaggcgctgcggtccgggaggccccatggaggtggcggtgcccgtgaagcaggaggccgagggcctggcgctggactccccgtggcaccgcttccgccgcttccacctgggcgacgcgccgggcccgcgggaggcgctggggctgctccgcgccctgtgccgggactggctgcggcccgaggtgcacaccaaggagcagatgttggagctgctggtgctggaacagttcctgagcgcgctgcccgccgacacgcaggcctgggtgtgcagccggcagccgcagagcggggaggaggcggtggccctgctggaggagctctgggtgagcctggcgggactgcaagcggggaagggagaggggaaggtgccagggaagccaccaggaagcccagggaggagcaccactgaacccctgaaaaccagtgtgactcgcggtggggaggctgcggtacaggctgcggtacagcgtggagggacagtccacgtgcggcaccctccatccccacaccagctgcaagtcaggagggccccaagaccctggcatacttgcgagttctctaggactcacagccgtgttcacggtcacggcttatcagagaaggacgtgctggaagcagctgggaagaaggccacgaaggctccagggagcgcagttaccagctgtcctctccccgcaccccgcccgcacgcagggggtcttgccggccaggaattctcctcagaccgtggtgtcctgggttcttactggggactcctccccgttctgtgtggctgacctcagcctcccgccccctgaaagtcaaggataccccctggtccaaactctaccccaaattcatcttgcttttgggctggcctgagtcccccggggcaggcagaccctccttatcatgcgtgaggctccaagggctcagagatgacttcccaggggcagagggcaaagccaggcctctctgggcaggtttggtttcttgaccacacagcaggcaagggccgactcacgttctgggtgaagtcttggtgcacagccacacccacccactcatgtcacctggggctgacacttgccaccgtgatgaccacagagggcccgaggagctggaagtgttgactgcctggccccgtcagggaagttgccagcctggcttagagtcctgtcgggggatgtgttatgtgagctgcacatgccatcttaagtgttctagtcagcacgttaaaaaaaggcaaatttacttcatggaccccaatgtgttcaaaataccatcctttcagtagtggcactctcccatggctggtggctgctgtgtggggcctgggtgatgagcggtgggcagccacgcagagacctctgagaagagtggtccaggccacgagagcagccagtgcaaaggccctgagccacctcgagcggcacaggggccctgagtgagggggtgtttgcggccaggcctgagtccccagtggcaggagggtgaagagtcagagcagtcgcgtgttcctcataagtgcgtaccgagtgcctgctgggtgctgagatgtagcagcagagagggggcatctcggtgaggcaaagcgagcaaagccttcagtccatggcagccgggcggccttccttccttccagagggagcagctcccgtcaaggctgccagtggcctcatccgtctcccttctcatgcggcccgaccagcccccagacactcccccctcttattgtctgggatacagctcgcccctcctctgctcctgcctcctggcacctctgtgctggctctggcttctctatcctcgccctccttccgggtcattgttcccaaaagtgggttgtaacaaatcacaaacgcagcggcttacaaatcacaaacgcagcggcttagaaatcacacaagtctgttacagttctggaggtcagaagtccaaaatggtttggtctcatggcccaaaatcgaggtgtctgcagggccacgtcccttctcaagtctccaaaatcaaggtgtcatctgcagagccacgtcccttctcaaggctctaggagagaatccgtttccggccttttccagctcctagaggctgcccgcattcctcggctcatggcccttcctccgtcctcagagtgctgcactccgacctctgcttccatcccccatcactcctccgaccttgacctctgcttccatccccatcactcctccgaccttgacctctgcttccatcccccatcactcctctgaccttgacctctgcttccatccccatcactcctccgaccttgacctctgctttcatccccatcactcctccgaccttgacctctgcttccatcccccatcactcctctgaccttgacctctgcttccatcccccatcactcctccgaccttgacctctgctttcatccccatcactcctccgaccttgacctctgcttccatcccccatcactcctctgaccttgacctctgcttccatcccccatcactcctctgaccttgacctctgcttccatcccccatcactcctctgaccttgacctctgcttccatcccccatcactcctctgaccttgacccacttaggtcctgtggtcacttatttatttatttatttattttactttaagttctgggatacatgtgctgaacgtgcaggtttgttacatgtgccatgaaggtttgctgcacataccaacctgtcatctaggttttaagccccacatgccttaggtgtttgtcctaatgctctccctccccttcccccaccccccgacaggccctggtgtgtgatgttctcctccctgtgtccatgtgttctcattgttcaactcccacttctgagtgagaacacatggtgtttggttttctgttcctgtgttagtttgccaaggatgatggcgtccagttcatccatgtccctgcaaaggacatgaactcattctttttcattggtgcatagtattccatggtgtactgtggtcacgtcttaggtcacctgtgatgacattcggcccgtcaggatagttcaggagagtttccccatgtcagtgcttaactccctcccatccacagagtccttgttgccctgagacagcagatgacaggttctggggatcagaccgtgtacatctttggggccattattctgtctgccacagaggcgaggtgaatgcaaggtgaagtgggggtggaacagaaccaacgtggaatctgtgagcctcggggtttcgccctttccagtttccatgactcctcagaacaggacctggcacatgggtgctgtctaggtagatttcagccactgttaccactctgagctcatgccatctgttttgttggcattaaaatgttcttttaggaaaagatggtaaaagtaggtggtggttattgttgcttttaatgtatatatcttgcaaaataaaaaaaaatcttccattcggggatgcagtgagagttctgttggttcagtgaatctaaaagtcgggaaatcaccaggctccaggccgtcgggactctcctgcgttctctgcttgctccgaggcgaacctctcactgtggctctgggatgtctttagcatctctcttgtatctgttactctctctttttaataagggcagatctcaggttcagagccttctcctatcagtgtccacacagacgggaataacactgccgtgagtgatggaatttcccatgacctctctctctggcacatgatactggctttccatttccagcaatgatacaacatggtcttaagtcagtgttattttagttttaggtaaaagtaaagaagagtaataagagcctgggcgatagccattgtagctgacggtggtgtatagacagctgacatctgggggcgctgctgtggattggggtttcttggcatctggtctgtgggagctgacggtgacgcatagacagctgacatctgggggcgctgctgtggattggggtttcttggcatctggtctgtgggagctgacggtggcgcatagacagctgacatctgggggcgctgctgtggattggggtttcttggcatctggtctgtgggagctgacggtggcgtatagacagctgacatctgggggcgctgctgtggattggggtttcttggcatctggtctgtgggagctgacggtggcgtatagacagctgacatctgggggcgctgctgtggattggggtttcttggcatctggtctgtgggagctgacggtggtgtatagacagctgacatctgggggcgctgctgtgcattggggtttcttggcatctggtctgtgggagctgacggtggtgtatagacagctgacatctgggggcatctagtgggagctgaccgtggtgtatagacagctgacatctgggggcgctgctgtggattggggtttcttggcatctggtgtgtggaaactgacggtggtgtatagacagctgacatctgggggcgctactgtggattggggtttcttggcatctggtgtgtgggtcctcgcctgtcctcagagttttcaccgagacattgccggatgagaaggagaggacagccgaggagaggctcctgtactggtagaaagcagtagagctcacctggaaacttttaaaaaatactgtcggccgggcatggtggctcacgcctgtcatcccagcactttgggaggccaaggtgggcagatcacctgaggtcaggagttcgagaccagcctggccaacatggcaaaactgcgtctctactaaaaatacaaaaatcagctgggcatggtggcacatgcctgtaatcccagctactcaggaagctgaggcaggagaatcgcttgaacccaggagctggagattgcagtgaaccaggactgcaccaccgcactccagcctgggcgacagagtgagactctgtctcaaaaaaaaaaaaaaaaaataccgttgccgggattttactcttagatttgaagttgcggttatgaggtgattcgggcctcagcttcagtaattttttaactgaatgtctccattctcctgttgaaggacatttgggttgattccagggttttgttttttttttttttttaatagagctggtttacgtctctgaataggtttctgtgtgaatacacgtttacatttatctagggtaagcgcccaggagtgcagttgctgggttgcgtgacgtcttagtctgtttgggctgctgtaacaaggtaccataggctgctggctgaaaacaacgggaatgtatttctcacagttctgcaggctggggagtttgagatcaaggccaactcagtgtttggtgagggtctcctgctggttcacagatggtggcttcctgctgtgtcctcacagggcagaaggggtgaaggggtctctctggggtctcttgtagaagggcactaatcccattcatgagggctcccccttcatgacctaatcacctcccaaaggccccacgtaatctcattaccttcagggttaggatttcaacatagaatttgagaggcacacagacatttggtctgcagcagtcttctgtccattttcagactgggttgttttcttgccctggagattccttcatgttagtctggatgcatcctctgccagctagtagactttcacattttttttaaaagtgcctcatgacctgtgtgagccactggagttggggaccaccaataagagagagcccgtcatccaggagggggcaggctcttccatttgggggagaacaggggacatttgggaatcacagcctccatggttctaaggactgttcccatctcctcagagtctaggggacttagagaaatatatagccttcttggctacgttggccttgtcgagtttgtttatgacttttttatggtatgtctagccccagctggaatgtagtctcatatagtctcctgtgggttggggccttgtcttttgttcagtgatgtgtccctggagctcaggatggtgctgggcacatagtaggtgctacaaaaatactcgttgagggaatggctaacccttcccagcctcctcttctcctgctgtggagggaatggctaaccgttcccagcctcctcttgtcctgctttgatatacaggatttgacaggaagaccagggtatggtcagcttcctcacttctgtggagagagaatctgatctgtccagaaagatcgaatgacctggctgtagtcactcagcatctggcctcaggcacacaatagggaaaggggatagtttaagacggatgggggcagggcgtctgccaatcggggaagtgcagagaaaagccagtggggtaggcctgggaggtggggagaggcagctccagccagtacctggttagcttgacaggaaatgccccagtcagcctgcgtctcaggtcggaattgaaggggaggccctggggctccagaggcagctgggagcacaggaaaatagcacagggtagctgttcaatgtagaagccaaactcagaagattagcagaggacaggttgataatcaaggtccaaactcaatatttgaaaagaatagtagaatagtgcaaaccttcagcaagttgactaggaggaaaacaagaaacagcacaaacactgatggtggaagcaagcaaagccggggatggagcggatttgacaaccgttgagaacaccgtgttcaacgtacacaatgcattcgaagtcctagatgaaatggacagttttctaggaaaatataaatcaccaacatatgctcatgatgtagtggcagatgtgagagtctggaaaccagaggggggagatcaaaaggtgatgaaagaccttcgcgtatagaaggcactggattccagcactttatgtgtaagttctaccaggcctccaaggaactgatcattctcatctgttcttttttttgaggcggagtctcactctgtcgcccaggctggagtgcagtggcgtggtctcggctcactgcaacctccgcctcccatgctcaagcaattctcctgcctcagcctcccaagtagctgggattacaggtgcatgtcaccatgcctggctaatttttttgtatttttaggagagacggggtttcaccatgttggccaggctggtcccttttacacaaacttccagaacacagggaaggtgttcctcagctcactggcaaggctgccacccccacccccacccccaaccacctaacaggacaaggacagcacaggaaaagaaggttgcagccagtctcatgggaccctcaacagaacatcggcagcttgattccgcagtgggtggacagacctatgtgctggggcaggtggagcttagcccagatacacgaggatgcttcatccttaggggatcctcagcagaacatcagcagcttgatcccacagtgggtggacaggcctatgcactggggcaggtggagcttagcccagatacacgaggatgctgcatccttaggaagtctctcagttagtacacagacttcaaagccgaccagagtctctcagttaaagtacacagacttcaaagctggatatgagtcctgcctccaccttttccaagctgggtgaccttggacgcatgtctgggactctcagagccttggcttcctcagctgcaattttggaatctcgattcctgagccctccagggatgggtgtaaggagggctccatcaggcagtgtgttcctggctgtgccaaattggctcagtcagtcacacacagggtcacagcttattacagagaaaggacacagatgacaaccagccaagggaagagatgagtggaatgggtggaggaaggctctgtgctcggagctcccaactgtcctcctgccgtggagtgtggacggcgctaactcctcccggcaacaacgtgtgacaacctgcagggggtgctgctggccaggaacgcttccccgagctcggcactcggtctctgttggggttgtgtgtagatatgctgaccttcacctccatccctggcagaggccgagctgatgcacatggcccagacccccaaccctgagtcacgctgtgggctcagcccacccgggtggcccagggccccaggtgagcagaccctgccatcaggcagtgtgttctgggggcatagaggtgaccctccctggagccaagggcagaggccagacctctctggacagggctgagcctcactgcacagcagcagcatctcgtcagtctccacgcagcctgcagggtccgtcctgggtactggtgtcatctcagggaaggaaagcagcttgcccgaggtgacacagctggttcaggggcagggggggatctgtggaaaaaacgtactcaaagtatctttttctattctcagcatcagtgaccacagaagacgtctgtgaccaaatgttggagggggtgtcccctcacataccgaacaagcaatcaactctgcagcagacacaagctgggtgtcctctaatgcatttccaacatggtctccctggagacagtgccagatcccacaggttgagggctcacatcccaagactgaccccccatttctgatgccagtcacaagccccaggttatttcatctgtgcttccaactgacaggctgtacatcgggctcccacagcccttcctctggttccgttaatttgctagtgtgctcacagaaccagggaaacatgtttaccgatttattgtaaaggagattttaaaggataccagtgaacagccagatggagagccacgtatggtgaggtctggaagggttccgagcgcaggggcctctgtccctgtggacttgggatgcaccatcctcctggcatgtgggtgaggtctagtttaccttgctgtccacctccacgagttcagctctctggaagctccctgaaccctgtccttttggccttttatggagacttggttgagaggcataactgaagcatggacagccatgtagaaatgtgattagataaaacgggtgtgatcgaatccgagtagaccgagcggggaaacctcgcaaggcctgtgtgttcagacccttcttggcctcctttggctttctttcctccagggtaggggcaggaccccttctgaaggggggtgttatggcccacaatcagacaaattaggtcagaaaaattttttatggccagaggtgggggaagatttaaggatatttttagtttttaaggcctgccttgtggagaaagaagagcaggtgaaagtagggcagaaggtcagggagagactctttttctgaggcctaaagcttcccatcgttagaacaagaccgtaacaagggctgtgggagtcatgagccaggagccgtggacagagcccaatgtatacgtatcataaaatcacagggagggttaggaccccggggctgctccatgctccccccttctgtgtgcctggccccacaaggcgcgcctgtccccgcatgggtgtgccctggatgtctcttcctgtggacaatgcctggccagcgtcccctgtctctggggcctcaaaccaggaagttccccgaggaatgggtggatctcaggcttttctgtgcccaagatctctgggagaaccgtctgctggcacggcttcccaggctccactctcaggtgtgtcaaccccggtgcccttgagctgaggccaggacagcacccctgcccagcctctgcctgtggctgacaccacacaagggtcatgggagccccgccaagggccaaggagctggagggtggtccagggtggtgctctgggcccgagtgagactgtgctcttctgactctctccgatgggccccagagcccatcacggtcccacagccaggttgcgaggcacctaggatctagtcagcgttgtgccaagcccccatcctcatgcctcagctgcctgagtcactgggattacagtcatgagccaccaggcccacgctcttgtattttgacccccttatttaggaaacgttttcttgtctgtcagagtgagggcaggtggtttgcccctgccgctttgcttttttttttggagacagagtctcactctgttgcccaggctggagtacagtggtgtgatctcggctcactgcaacctccgcctcccgggttcaagtgattctcctgcctcggcgtcccgagtagctttgattacaggtacgtggcaccacgcccagctaatttgttgtatctttagtagagttaggatttcaccatgttggccaagctggtctcaagctcctcaccttgtgatctgcccgcctcagcctcccaaagtgctgggattacaggtgtgagccacctcgcctggcctaggcattgctaattttcacaccagtgattgctttgtgatccacgtactcctctggccaaaaatatttgaaacggggaaaaggtgtggtgcgtgacttagctgtcataggcaccagaagaattctcatccctttcccttggggacgtggttttgaggaattatgtagtagggcgaagaaaccacaacgagttggactgaaactttttaaatttttggtcttcctggttggtgccgtcctgcttggcagctgttctgctgtttcacaccaagaaaagttgtttctgaacttagtttacttttttcccaagttaaaagtagcttatatattctgcattttgttaaggagcttgcactttatccaaagggcaggacgaagctgatctgagacaggtgtattagttatttcttgcttcctgacaagtcaccccacactcaggggtgtaaacagtaacatctgtcagctcagaaagcctctgtgggtccggagtctgtgagtggcttgggcacgcggacctggcccagggtctcctgtgaggtcacagtgcagtgttggccaggctgtcatctgaaggttggtggcttcaagatggctccctggcagggggttggcaggaggccttggttcctcacctgggggcctctctgtggggcagcttcagtgtcgcccagcatgactgtggcttcctcccagcagggatgggattgcacagctggtcgacggtggttgggagagggagaaatagaggcccttgctcaggtttctgagttcaaaactgtgctctcatttcaggggccagcagcctcccccgatgggtcgtcagcaacgagggtgcctcaggatgtgacgcagggccctggggccacaggtggaaaggaggacagtgggatgattcccttaggtgagctgctggcctctctggttctccccgccagcccccagcaccggggagggggttcagtgaacgatcctggcaccaggacccaggacaaggacagacttggaccccagcccttgaggagccccggggttcggacccaaggggcgggcattgggggtatgggtgggcctcggggttggaggttcatccatccatctatccatccatgcacccatctagccatcatccaccctccacctatccattcctctatcatatacccacccattcacccatccatccctctatcattctcccaggcatccatccatccttcacatgttccccctcacaccaatcccaccatccctctgtcatccatcatcatcacccatctatccatgacccacccatccatccatctactcatccacccatgcacccacccatccatcatctgtacattcatccacccatcatccgtccatccatccacccatcatccacccatgcattcatcatctacccatccatcacccatccgtccatctagtcatccacccacccatccatcatctgtacattcatccacccatcatccacccatgcattcatcatctacccatccatcacccatccgtccatctagttatccacccacccatccatcatctagacattcatccacccctcatccacccacgcattcttcatctacccatccatcatctgtacattcatccatccatcatcggtccattcatcacccatcatccacccacgcattcttcatctacccacgcattcatctacccatccatcatccagccagccatcatctattatgtattgggcattgactgtatgccaggcactactaggtaccgggacacaggtatgaataagaagcccacagcccagccctcttcccaccccaatggtttctgcctttaagcgttccctccctgcctccaccccagcctgtgctgtccttgccccgccctcgtgccgacccagatgctgactctctttcttttcccagcaggcaccgcccctggggctgaggggccggcgcctggggactcccaggctgtgcgcccctacaagcaggagcccagcagccccccgctggcgcctggcctgcccgccttcctagcggccccgggcaccacgtcctgccccgagtgcggcaaaacgtccctgaaaccagctcacctgctgcgccaccggcagagccactcgggcgagaagccgcacgcctgccctgagtgcgggaaggcctttcggcgcaaggagcacctgcggcgccaccgcgacacgcaccccggcagccccggcagccccgggcccgcgctgcgccctctgcccgcccgtgagaagccccacgcgtgctgcgagtgtggcaagaccttctactggcgcgagcacctggtgcgccaccgcaagacgcactcgggagcgcggccctttgcctgctgggagtgtggcaagggcttcgggcgccgcgagcacgtgctgcgccaccagcgcatccacggccgggcagcggccagcgcgcagggggcggtagctccgggcccggatggtggaggccccttcccgccctggcccttgggttagccgcctcccggccagcgccatctcccgcccttggtgctgcccccgggcggtacctgctctctcccagcgccacttggcctcttcctctcctccttccctcccatcgtcctcctccacctgcgcctcccttgtctgaacttcccaacgccttcctattcctttccaactccttttcccccaaatttcactttccttctcaggtctcacctcagccccccccttctccctgatttctcggcctctctctctgtgtgaaggggcctctccctaatgtctcctccttcccccctcttctctctcctgcggcccagcctccctctccctcctccattcctctctccctgcccttttcctgcctgaagagcagaggtgaggacctgggacccctgaggggcaggccaggaggagctcgggcgcaggccaggcccccttggtgaagcagaggctgaaggaaaggggtctgggtcttgtccctaggaattctcctccctcaggagattgggggttgggggaggcagcgggtgatggctctgaagctgaacccagggcctggctgtggtcttcttggtcttgctgccccctgtgacccaaaggcatgggatggacagagatgcctgcccccgtgaagctggttggggagggcagttcaccagcatccatagagtaataaagtcactgtgtgtagacccggagtctgagctctgtctggagtctgtccggcacagccaccctcccagggccgagcgtctggggtgcccggggcttctggggtcagctgtcttggctcccaccacagactctcttggcatgagagaggctctgggagtctgggcacagctgtgggaggcagtgcaggaaatgtgtcctcaggagggctgtccccacctccatcctacggaggcagggatgaggctcctggaagggacctgccgagtgccacactgagtcaggttcgcatctgagcccttcagcttcctggctgggaacctacaggttggtcataccctctgggcatgagttccacatccgcaagtgatgataatggcacccacctcccttgctaaggccactctgtttgactggggtcctgagtgtcagtgttggtaggtcttgggtggcccattctgccacgcaaggaattctctcacctttagctggagccattggccgagggggggactccgtatggagggcaggctttggccagctgcatctttccaggatgccacctcttgtcagctcagcgagcaaccccggttccttctctccagagaggaaatctgtagcctctgccgggtggatgaagggcagttgccgggctttggaaagcgtaggatgagagcgctggtctgaccactcccctgccgcccagtcttggggctggcttcaccctggtccttttggttcctgtgtgcccagcgcctgagcctgggaggggttctatgtcaaaccctccatggttgccgccttgtggctgagcccgccacggtaccaccttgcgtccaagcccccccacggtcactgccttgctctctgcttcagcttctggctcagtgtcaagggctggggcaggtacagcctgtgccgggctgcgagggcatctggaaacagccacctggacggtccagtgcacatcactggagtctaggtctgccttcaagactcaacagtgcagggaagggtttaggtgccaggctatccaggaagggcaagtgaccacaggcctcagcacccacctcctaagacaggactggtagtaatgcccctcctgaaaagggactgtttttgaaaattaaataaggctgggtgcagtggctcatacctgtaatcgcaacactttaggaggctcgggtgggtggatcacttgagctcaggagttcaagaccagctcggctaacatgctgaaaccccgactctactgaaaacacaaaaattagccaggcatgatggtggacacctgtaatcccagctactccggaggctgaggtgggaggatcacttgaacccaggaggcagaggttgcagtgagctgagatcgcaccactgccctactccagcctgggcaacagagcgagacttcgtctcaaaagaaaaataaggtaatgaatgcagaatacttacgggaacttggtgtgtgatctcagcctgctgctttcacactgacaggtgcatgttaaggacgttaccatgcccaccgtgtggggaagaagacgggctgggagaagccgtgtcgtctgctgcagactttcaggaagtgactaagaggcatgagagggagtatgaggtggtgtcaggccagggtctgaggacagggttctgataacagcaaacacagagtgagtctgctgggccagacctttttaaaatccagtttgtttatcatcataaccaaccgatgaggcatgcactgttgttatccccatggtacagatggggaaactgaggcaccaaaagagtaagggaccgggccacatctgtggatctcatcccaggtgtctgggctcacagtattcactccagctcctaacagcacagctgctgcttttgcccattcaggctccatctcttctcttctgaaaagcctccccgggacttctgtgccctttggggacccctccaacacacacacacacacacacacacacacacacacacaccccgtgtctggtctcggagggacagtcggccaggctgtcctgccccactcttttgtgtcactcaagatggacagtcccggatggattggaggatgctggaagaacacccctgcaaaggactagaaacaaggcgagaccagatagatggagatctgactcccgcaccctcctgcacccacacctgctaagcctgggggagctttggtttgacatccgatgacgagtggtgtctgcctccgaggctgtataacggagtggaggatgatcccccccaaacaggagggaaattctggaaggccgaaacaaaacttgaatattctccgcatgggcaacagaaaactttccagagagacaacctagcagtccttcctcagagtgggcggtacttccacgagagtgcgcagcctttcctcagactgcgcagtccttcctcagagtgcacggtccttcctcagagtgggcggtacttccacaagagtgctcagcccttcctcagactgcgcagtccttcctcagagtgcacagtcctttctcggagtgtgcaggccccagccagacagactggcacaggtgcatccgcagaaggtcctgcatagcgctgttcctcatggtgctgcttgggatggcagagaatcagagcaacgtaaatgtccgttactaggagagggggaacgaagaaacattgttcaggaaaagtaccgaaacgtggaagtaggcaaaatgtcaattgtgcagccttctaaaatcatgctcaattgtcttaaaaatagtcctgcctgggccgggcactgtaatcccagcactttgggaggccgaggtgggtgcatcacttgaggtcaggagctcgagaccatcctggttaacatggtgaaaccccttctctactaaaaaaaaaatacaaaaattagccgggtgtggtggcgagcacctgtaatcccagctacttgggaggctgaggcaggaagatggcttgaacctgggaggtggaggttgcagtgagctgagatcgcaccactgcactccagcctggatgaaagagcgagactccgtctcaaaaaaaaaaaaaaaaaaaaggaaagaatagtaaggaaataaacccaacagctctccccaccaatatccactctgatggagcaggtgccatgagggctgtcctgtgactgatacccaccatgtctgttggacactatcacatctacgatctttatccatcaaccccaataccacagaccagagaacatctgaattgtggttttggatgctggccttgactttcttgcttccgtctttattgcttgaggggtgagattgttttaagaacctgctggtggcatgaggtgatttttttttctgcttcctctcctgggggccctggcaccaggggctctgccaggacccagcaggggttagttaattctactcaatttccctgggtgactgcccctcccctcaccccttcctctcccctgctaaagggttccggctctggggttccatacaccaggttcaaacctcaactctgcttcttccttgctgtgggaggaggtcgatgataggagtatcctggtccaagccgctccagtcctggtctctctcacaggtgattgctaactgggtccccaatccataaaagttagctgggtgtggtggcacatgtctgtaatcccagctgctcaggaggcttgagtcaggagaatcgcttgaacccgggaggtggaggttgcagtgagccaagattgcaccactgcactccaacctgggcgatagagtgagatcctgtctcaaaaaaaaaaaaaaaaaacaactagaagtttcctgatggggtggtccctgtctacctcgtaccctccaccctccccagttagtctgcattccaggtccagctcatcacccagttccttcagcccttccttcctccaccccactacaggacttttgcacaggccattggctccacatattaataaaatgttgttctttcttcctgcatttgcctagtgaacacaagagcaaaactccatctcaaaaaaaaaataaataaaaaataaataaaataagggcatgaatcccattcacaaggatgaagccctcatgatgtgatcatgtcccaaaagtcctacctatttactatctattgtctatctatctatctatctatctatctatctatctatctatcgttatatctccatctgtccatccatccatccatccctagactgctcaacagacacgctacctcttaatattctcacgttgggtattagttttcatcatatgaatcttcaggggactctaacattcaatccataacatgggggttacagtgagggctaaatggggggagtccacaagtcatgctcacgcctgtaatcccagtgcttaggaggccgctgcaggctgatcacttgaggtcaggagtttgaggccagccaggccaacatggtaaaacctcatatctactaaaaatacaaaaattagctggtgtggtggtgctcaactgtagtctcagctactaagaaggccgaggcaggagaatggcttgaacccgggaggcggaggttgctgtgagccaagatggcaccactacactccaggcttgggtgacacacagcaagactccatctcaaaaaaaaagaaaagaaaagaaaaagaaaaaaaagaaaagttccgggcgtattggctcacgcctgtaatcccagcactttgggaggccaaggggggcaggtcacttgagatcaagagctctagaccagcctaacaaacatggtgaaaccctgtctttactagaaatacaaaaattagccgggcatggtggcgggcgcctgtaatcccagctactcgggaggctgaggcaggagaatcacttgaaccgggaagctgagattacagtgagccaagatcacgccactgcactccagcccgggcaacacagccagactctgtctcaaaaaaaaacaataaaaaaaaaccccaaaaaatcattaaatattcacgattttgggggggcagtggtgagccagttgttaaactgttggtatgttgaaattggccctaatggaatatttacactatgggaattggctaacagtacaaatgcaggcatttattttattttattttaaaaagctgacattggctgggtgaggtggctcacacctgtaatcccagcactttgggaggctgaggtggatggatcatctgagactgggagttcgagaccagcctgaccaacgtggagaaaccccatctctactaaaaacacaaaattagccaggtgtggtggtacatgcctgcaatccccagctacttgggaggctgaggcgggagaatcgcttgaacctgggaggcagaggttgcagtgagccgagatcgcgccattacactacagttacttgaatgacagtgactctgtctcagaaaacaaacaaacaaacaaatagaaaaacacagaaatctagatctttatgtaaaagttttgaaaccctatatgctcgtgattcgatttgcaattttcaaaacactgtgtggaagtttagcccagtgtggcaagcacacgcctgtagtcccagctacccaggaggctgaggttggaggattgtttgagcctgggcagtcaaggctgcagtgaaccaagatagtgccaccgcactccagcctgagcaacagagcgagaccccatctcaataaaaataaaataaaataaataaataaataaagcaagcaagcaagcactgtgtgagctacaatatgaaggaaccaaaacaaacaaaaatcataatgcaaacaaacaaacccaaagcacgtctgagggtctggttttggctgcccgtttgcaagttctgagctggttcctcagtttaccaaagaggagatggaggcccagaagtctgtagtgaattccctgcagccccatagcgggccagtgaaatgtgaggttgtttcctcattgctctgagagttggcattgagtgaagatgagtccccaacccctcctctctgggggatgaagtggtagaaatggctggcagggaggctgaggttggagcaacactgacctttggaattatgggcaggaaatgtgtggggcttttttttttttttagatgaagtcttgctctgtcccccaggttggagttcaatggtacaacctcagctccctacaacctctgccttccagtttcaagcaattctcctgcctcagcctcctgagcagctggaattacaggcatccaccaccattcccagctaatttttatatttttagtagagacagggtctcaccatgttggccaggctggtcttgaactcctgacctcaagtgatcctcccgccttggcctctgaaagtgctggggttaaagacatgagccaccacgcctggcccggggtcttaatcctaactaaatacccaaccttaagcaacagcatacccatgtcctttagagggttaactgtaaccccttaatttgggttcatggtaaggaagaactgatccagggagacgatggaatattcagcacaatggacagagacatttcctccaagctgagttaggggaaagaaaggtgcagacttccccgcccccagtgctgacctcccatctcaggtggggaagagaaataaagcttttgtacacgttttttttgttttgttttgttttgagatagagtctttctctgtcgctcaggctggagtgcaatggtgagatcttggctcactgcaacctctgcctccctggttcaagcgattctcctgcctcagcctcctgagtagctgggattacaggtttgtgccaccatgcccggctaatttttgtatttttagtagagacagggtttcaccatgttggccaggctggtctcgaactcctgacctcttgatccgcccgcctcggcctcccaaagtgctgggattacaggcgtgagccgccgcgcccggccctgtacggattgcttttaacttgcacaaggactatcccctcccacttttcattgtttcgtttagtgtatagatggggaattctttggtgagatgcaaagacaaatataggtttacattttgacatcttaggagttttttgtttttgtttttctgagacaggatctccctctgtctcccagactggagtgcagtggtggcatcaaggctcactgtagcctcaacctcccaggctcaagcgatcctcccacctcagcctctggagtagctgggactacgggcacatgtcactacacacaactaatttttgtatttttttgtacatggggtctcgctaggttgccaaggctggtctcaaactcctgagctcaggcaatttgcctgccttgaactcccaaagtgctgggattacaggtgtggaccactgcacctggctgttttttatgaatggcgaactgctggatgacacagaatgtgggcatggatttttaaagcctgcctagctcacaaggggtaaaatgtgtctatttaggaagatatgcccattgacatctgaacaccgaaaaacacctccatgctgtagcccttcctcaaaccattatgatacccagagttattaagaaagatgcagcctcccacagttacatcaacatcctactccaactttccatggagctcattttattttacttttcattttttccaaacctactgtgttgcaggttctttttttttttttttttttttttgcgacggagtctcactctgttgcccaggctggagtgctgtggcatgatctcggctcactgcaacctccgcctcctgggttcaagctattctcctgcctcagcctcccaagtagctggaattacagatgtgccaccatgcccggttaattttttttatttttagtagagatgagggttcgccatgttgagcaggctagtcccgaactcctgacctcaagtgatcccacgcctcggcctcccaaagtactgggattacaggtatgagcctctgcaccccatgagagtagattttaaatgctttcagtacaaaacgatgtctacgagctggtggatgtgttaattagcccaatttaataattttacagtgtatacatagatcaaaacattatgctgtatgccataaatagattcaatttgtatttgtaaatttaaaaaaattttaagaaaaaaataagcaaatacataaataagtaaatagacatatttttaaatggtggtcataataaatgtccctgagaagaggataggaagtcatccacacgtagctggcaagaacattccaggcagagacaatggcagaatgcactctcttttcccactcttgtcaacattctacctgcttttcaatttaactaatatcatctgtgcacctacagaaaaaacaaaagccagctgggcacggtggctcacacctgtaatcccagcactttgggaggccgaggcaggtggatcacgaggtcaggaaatcaagaccatcctggctaacacggtgaaaccccgtctctactagaaatacaaaaaaaaattagccgggcgccgtggcgggcaccagtagtcccagctactcaggaggctgaggcaggagaatggcgtgaacccgggaagcagaacttgcagtgagctgagatcgtgccactgcagtccagcctaggagaaagagtgagactccatctcaaaaaaaaaaaaaagaaaaaacaaaagccagctgggcacagtggctcacacctgtaatcccagcactttgggaggccaaggctggcggatcacctgaggtcaggagtttgagaccagcatggtcaccatggtgaaagcctgtctctactaaaaatacaaaaattagccaggcgtggtggtgcacacctgttatcccagctactcgggaggctgaggcacaggaatcgcttgaacctgggaggtgggggttgcagtgagccgagatcgagccactgcactcccagcctgggcgacagtgtgaaactgtgtctcaaaaaaagaaaaaaaaaaaagaaaaagaaaaaacaaaagccataaagatacaactcaggctgggcgcggtggctcatgcctgtaatgccagcactttgggaggccgaggcagacggatcatgaggtcaggagatcaagaccatcctggctaacatggtgaaaaaccctgtctctattacacacacacacacacaattagccaggcgtggtggtgggtgcctgtagtcccagctactcgggaggccgaggcaggagaattacttgaactcgggaggcaggtgttgcagtgagccgagatccagccattgcactcccagcctgggcaacagagtgaaactgtgtctcaagaaaaaaaaaaaaagagaagaagaagaaagaaaaaacaaaagccagaaagacacaactcagcccaccaacatgggagagcatgtcatttcccacctgggcgcctccggtgtacactgtttcccgctttccttctgattcaaggtcacgggaggctgctggctgcttctgcactcttgtttttgtaactggatgtccgggacctttggaaggcgaaggcacctgcttatttcatctcctccccaccgttgtcatgggccaaactccaggatgtccttccgccctggttagctcccgccatgagtcagccctctcctctccacgtgcccccacttgaaccactcctgtgaatgcagcgtcagcatcgatgatgtatttcacatgcagctctcagctttggacattgcgttggctccccttcactctgactcaccttgactctgcacagaaatgctcctgggagagaacgctgacacttctcttcctgactgcagattcccgtcctgtggccgcttccacatctgaatctttccaatagtgggattttcagcctcacccacccatgcctctttgaaaagctaagaatgcaacccctcttgttcaataattcagttaggtgtttctagcacatgaccaatacttaggtcttttccagcccctcccatgaactttccctaaaaaatgtaactttctcaagtaaaatgggaatctttctgtggtgctggtgggactgaaa

SEQ ID NO: 1894 - DNA, 2069 bp, Homo sapiens
tgtcgcgctcagacagcccgcgacatttgcgccgtcaaggccaaataggctgcagacgacgctttcgcgtatcttgggaaatgtagttccagtgttggcgaagacgccacgcggtgacaaacaggagtaaggcggtccccaggcgagggccaattggcagccgcctttgccgcgatgcttcctgggagttgtagttcggggacaggctgcgggaggagctgcaggactgaggtacagaggccaggggcccagggcaggacccagcctggacttgactccctgggatcccaggaagggcacaccctttcctcaccacccgagtgagcgctgccccctcacagagacctctttgccccctgggccaggcagagcaggcgctgcggtccgggaggccccatggaggtggcggtgcccgtgaagcaggaggccgagggcctggcgctggactccccgtggcaccgcttccgccgcttccacctgggcgacgcgccgggcccgcgggaggcgctggggctgctccgcgccctgtgccgggactggctgcggcccgaggtgcacaccaaggagcagatgttggagctgctggtgctggaacagttcctgagcgcgctgcccgccgacacgcaggcctgggtgtgcagccggcagccgcagagcggggaggaggcggtggccctgctggaggagctctgggggccagcagcctcccccgatgggtcgtcagcaacgagggtgcctcaggatgtgacgcagggccctggggccacaggtggaaaggaggacagtgggatgattcccttaggcaccgcccctggggctgaggggccggcgcctggggactcccaggctgtgcgcccctacaagcaggagcccagcagccccccgctggcgcctggcctgcccgccttcctagcggccccgggcaccacgtcctgccccgagtgcggcaaaacgtccctgaaaccagctcacctgctgcgccaccggcagagccactcgggcgagaagccgcacgcctgccctgagtgcgggaaggcctttcggcgcaaggagcacctgcggcgccaccgcgacacgcaccccggcagccccggcagccccgggcccgcgctgcgccctctgcccgcccgtgagaagccccacgcgtgctgcgagtgtggcaagaccttctactggcgcgagcacctggtgcgccaccgcaagacgcactcgggagcgcggccctttgcctgctgggagtgtggcaagggcttcgggcgccgcgagcacgtgctgcgccaccagcgcatccacggccgggcagcggccagcgcgcagggggcggtagctccgggcccggatggtggaggccccttcccgccctggcccttgggttagccgcctcccggccagcgccatctcccgcccttggtgctgcccccgggcggtacctgctctctcccagcgccacttggcctcttcctctcctccttccctcccatcgtcctcctccacctgcgcctcccttgtctgaacttcccaacgccttcctattcctttccaactccttttcccccaaatttcactttccttctcaggtctcacctcagccccccccttctccctgatttctcggcctctctctctgtgtgaaggggcctctccctaatgtctcctccttcccccctcttctctctcctgcggcccagcctccctctccctcctccattcctctctccctgcccttttcctgcctgaagagcagaggtgaggacctgggacccctgaggggcaggccaggaggagctcgggcgcaggccaggcccccttggtgaagcagaggctgaaggaaaggggtctgggtcttgtccctaggaattctcctccctcaggagattgggggttgggggaggcagcgggtgatggctctgaagctgaacccagggcctggctgtggtcttcttggtcttgctgccccctgtgacccaaaggcatgggatggacagagatgcctgcccccgtgaagctggttggggagggcagttcaccagcatccatagagtaataaagtcactgtgtgtagacccgga

SEQ ID NO: 1895 - protein, 322 aa, Homo sapiens
MEVAVPVKQEAEGLALDSPWHRFRRFHLGDAPGPREALGLLRALCRDWLRPEVHTKEQMLELLVLEQFLSALPADTQAWVCSRQPQSGEEAVLEELWGPADDGSSATRVPQDVTQGPGATGGKEDSGMIPLGTAPGAEGPAPGDSQAVRPYKQEPSSPPLAPGLPAFLAAPGTTSCPECGKTSLKPAHLLRHRQSHSGEKPHACPECGKAFRRKEHLRRHRDTHPGSPGSPGPALRPLPAREKPHACCECGKTFYWREHLVRHRKTHSGARPFACWECGKGFGRREHVLRHQRIHGRAAASAQGAVAPGPDGGGPFPPWPLG

SEQ ID NO: 1896 - DNA, 1931 bp, Homo sapiens
tcggggtgaggccggggcttcatggggagttgttgggctgaacgagcgactcggagtatgggattgggggagggggacgggggagtttggcgcaaagcctgctggggcatggagtcccggcgagctttgtgcgcatgtgcggggaggtgagggggcttggggggcctcgcctgagagagtgaggacaggctgcgggaggagctgcaggactgaggtacagaggccaggggcccagggcaggacccagcctggacttgactccctgggatcccaggaagggcacaccctttcctcaccacccgagtgagcgctgccccctcacagagacctctttgccccctgggccaggcagagcaggcgctgcggtccgggaggccccatggaggtggcggtgcccgtgaagcaggaggccgagggcctggcgctggactccccgtggcaccgcttccgccgcttccacctgggcgacgcgccgggcccgcgggaggcgctggggctgctccgcgccctgtgccgggactggctgcggcccgaggtgcacaccaaggagcagatgttggagctgctggtgctggaacagttcctgagcgcgctgcccgccgacacgcaggcctgggtgtgcagccggcagccgcagagcggggaggaggcggtggccctgctggaggagctctgggggccagcagcctcccccgatgggtcgtcagcaacgagggtgcctcaggatgtgacgcagggccctggggccacaggtggaaaggaggacagtgggatgattcccttaggcaccgcccctggggctgaggggccggcgcctggggactcccaggctgtgcgcccctacaagcaggagcccagcagccccccgctggcgcctggcctgcccgccttcctagcggccccgggcaccacgtcctgccccgagtgcggcaaaacgtccctgaaaccagctcacctgctgcgccaccggcagagccactcgggcgagaagccgcacgcctgccctgagtgcgggaaggcctttcggcgcaaggagcacctgcggcgccaccgcgacacgcaccccggcagccccggcagccccgggcccgcgctgcgccctctgcccgcccgtgagaagccccacgcgtgctgcgagtgtggcaagaccttctactggcgcgagcacctggtgcgccaccgcaagacgcactcgggagcgcggccctttgcctgctgggagtgtggcaagggcttcgggcgccgcgagcacgtgctgcgccaccagcgcatccacggccgggcagcggccagcgcgcagggggcggtagctccgggcccggatggtggaggccccttcccgccctggcccttgggttagccgcctcccggccagcgccatctcccgcccttggtgctgcccccgggcggtacctgctctctcccagcgccacttggcctcttcctctcctccttccctcccatcgtcctcctccacctgcgcctcccttgtctgaacttcccaacgccttcctattcctttccaactccttttcccccaaatttcactttccttctcaggtctcacctcagccccccccttctccctgatttctcggcctctctctctgtgtgaaggggcctctccctaatgtctcctccttcccccctcttctctctcctgcggcccagcctccctctccctcctccattcctctctccctgcccttttcctgcctgaagagcagaggtgaggacctgggacccctgaggggcagcgggtgatggctctgaagctgaacccagggcctggctgtggtcttcttggtcttgctgccccctgtgacccaaaggcatgggatggacagagatgcctgcccccgtgaagctggttggggagggcagttcaccagcatccatagagtaataaagtcactgtgtgtagacccgga

SEQ ID NO: 1897 - protein, 322 aa, Homo sapiens; identical to SEQ ID NO: 1895

SEQ ID NO: 1898 - DNA, 2052 bp, Homo sapiens
tcggggtgaggccggggcttcatggggagttgttgggctgaacgagcgactcggagtatgggattgggggagggggacgggggagtttggcgcaaagcctgctggggcatggagtcccggcgagctttgtgcgcatgtgcggggaggtgagggggcttggggggcctcgcctgagagagtgaggacaggctgcgggaggagctgcaggactgaggtacagaggccaggggcccagggcaggacccagcctggacttgactccctgggatcccaggaagggcacaccctttcctcaccacccgagtgagcgctgccccctcacagagacctctttgccccctgggccaggcagagcaggcgctgcggtccgggaggccccatggaggtggcggtgcccgtgaagcaggaggccgagggcctggcgctggactccccgtggcaccgcttccgccgcttccacctgggcgacgcgccgggcccgcgggaggcgctggggctgctccgcgccctgtgccgggactggctgcggcccgaggtgcacaccaaggagcagatgttggagctgctggtgctggaacagttcctgagcgcgctgcccgccgacacgcaggcctgggtgtgcagccggcagccgcagagcggggaggaggcggtggccctgctggaggagctctgggggccagcagcctcccccgatgggtcgtcagcaacgagggtgcctcaggatgtgacgcagggccctggggccacaggtggaaaggaggacagtgggatgattcccttaggcaccgcccctggggctgaggggccggcgcctggggactcccaggctgtgcgcccctacaagcaggagcccagcagccccccgctggcgcctggcctgcccgccttcctagcggccccgggcaccacgtcctgccccgagtgcggcaaaacgtccctgaaaccagctcacctgctgcgccaccggcagagccactcgggcgagaagccgcacgcctgccctgagtgcgggaaggcctttcggcgcaaggagcacctgcggcgccaccgcgacacgcaccccggcagccccggcagccccgggcccgcgctgcgccctctgcccgcccgtgagaagccccacgcgtgctgcgagtgtggcaagaccttctactggcgcgagcacctggtgcgccaccgcaagacgcactcgggagcgcggccctttgcctgctgggagtgtggcaagggcttcgggcgccgcgagcacgtgctgcgccaccagcgcatccacggccgggcagcggccagcgcgcagggggcggtagctccgggcccggatggtggaggccccttcccgccctggcccttgggttagccgcctcccggccagcgccatctcccgcccttggtgctgcccccgggcggtacctgctctctcccagcgccacttggcctcttcctctcctccttccctcccatcgtcctcctccacctgcgcctcccttgtctgaacttcccaacgccttcctattcctttccaactccttttcccccaaatttcactttccttctcaggtctcacctcagccccccccttctccctgatttctcggcctctctctctgtgtgaaggggcctctccctaatgtctcctccttcccccctcttctctctcctgcggcccagcctccctctccctcctccattcctctctccctgcccttttcctgcctgaagagcagaggtgaggacctgggacccctgaggggcaggccaggaggagctcgggcgcaggccaggcccccttggtgaagcagaggctgaaggaaaggggtctgggtcttgtccctaggaattctcctccctcaggagattgggggttgggggaggcagcgggtgatggctctgaagctgaacccagggcctggctgtggtcttcttggtcttgctgccccctgtgacccaaaggcatgggatggacagagatgcctgcccccgtgaagctggttggggagggcagttcaccagcatccatagagtaataaagtcactgtgtgtagacccgga

SEQ ID NO: 1899 - protein, 322 aa, Homo sapiens; identical to SEQ ID NO: 1895

SEQ ID NO: 1900 - DNA, 1989 bp, Homo sapiens
aggtgggggaggggaaggggaccctagcagagggtgggctgtgagatgaaagctgagtgggaagctggaccctacaaaggagtctgggggcgccgggaccggaccccttcggaaaggacaggctgcgggaggagctgcaggactgaggtacagaggccaggggcccagggcaggacccagcctggacttgactccctgggatcccaggaagggcacaccctttcctcaccacccgagtgagcgctgccccctcacagagacctctttgccccctgggccaggcagagcaggcgctgcggtccgggaggccccatggaggtggcggtgcccgtgaagcaggaggccgagggcctggcgctggactccccgtggcaccgcttccgccgcttccacctgggcgacgcgccgggcccgcgggaggcgctggggctgctccgcgccctgtgccgggactggctgcggcccgaggtgcacaccaaggagcagatgttggagctgctggtgctggaacagttcctgagcgcgctgcccgccgacacgcaggcctgggtgtgcagccggcagccgcagagcggggaggaggcggtggccctgctggaggagctctgggggccagcagcctcccccgatgggtcgtcagcaacgagggtgcctcaggatgtgacgcagggccctggggccacaggtggaaaggaggacagtgggatgattcccttagcaggcaccgcccctggggctgaggggccggcgcctggggactcccaggctgtgcgcccctacaagcaggagcccagcagccccccgctggcgcctggcctgcccgccttcctagcggccccgggcaccacgtcctgccccgagtgcggcaaaacgtccctgaaaccagctcacctgctgcgccaccggcagagccactcgggcgagaagccgcacgcctgccctgagtgcgggaaggcctttcggcgcaaggagcacctgcggcgccaccgcgacacgcaccccggcagccccggcagccccgggcccgcgctgcgccctctgcccgcccgtgagaagccccacgcgtgctgcgagtgtggcaagaccttctactggcgcgagcacctggtgcgccaccgcaagacgcactcgggagcgcggccctttgcctgctgggagtgtggcaagggcttcgggcgccgcgagcacgtgctgcgccaccagcgcatccacggccgggcagcggccagcgcgcagggggcggtagctccgggcccggatggtggaggccccttcccgccctggcccttgggttagccgcctcccggccagcgccatctcccgcccttggtgctgcccccgggcggtacctgctctctcccagcgccacttggcctcttcctctcctccttccctcccatcgtcctcctccacctgcgcctcccttgtctgaacttcccaacgccttcctattcctttccaactccttttcccccaaatttcactttccttctcaggtctcacctcagccccccccttctccctgatttctcggcctctctctctgtgtgaaggggcctctccctaatgtctcctccttcccccctcttctctctcctgcggcccagcctccctctccctcctccattcctctctccctgcccttttcctgcctgaagagcagaggtgaggacctgggacccctgaggggcaggccaggaggagctcgggcgcaggccaggcccccttggtgaagcagaggctgaaggaaaggggtctgggtcttgtccctaggaattctcctccctcaggagattgggggttgggggaggcagcgggtgatggctctgaagctgaacccagggcctggctgtggtcttcttggtcttgctgccccctgtgacccaaaggcatgggatggacagagatgcctgcccccgtgaagctggttggggagggcagttcaccagcatccatagagtaataaagtcactgtgtgtagacccggag

SEQ ID NO: 1901 - protein, 323 aa, Homo sapiens
MEVAVPVKQEAEGLALDSPWHRFRRFHLGDAPGPREALGLLRALCRDWLRPEVHTKEQMLELLVLEQFLSALPADTQAWVCSRQPQSGEEAVLEELWGPADDGSSATRVPQDVTQGPGATGGKEDSGMIPLAGTAPGAEGPAPGDSQAVRPYKQEPSSPPLAPGLPAFLAAPGTTSCPECGKTSLKPAHLLRHRQSHSGEKPHACPECGKAFRRKEHLRRHRDTHPGSPGSPGPALRPLPAREKPHACCECGKTFYWREHLVRHRKTHSGARPFACWECGKGFGRREHVLRHQRIHGRAAASAQGAVAPGPDGGGPFPPWPLG

SEQ ID NO: 1902 - DNA, 1857 bp, Homo sapiens
ggactgaaactttttaaatttttggtcttcctggttggtgccgtcctgcttggcagctgttctgctgtttcacaccaagaaaagttgtttctgaacttagtttacttttttcccaagttaaaagtagcttatatattctgcattttgttaaggagcttgcactttatccaaagggcaggacgaagctgatctgagacaggtgtattagttatttcttgcttcctgacaagtcaccccacactcaggggtgtaaacagtaacatctgtcagctcagaaagcctctgtgggtccggagtctgtgagtggcttgggcacgcggacctggcccagggtctcctgtgaggtcacagtgcagtgttggccaggctgtcatctgaaggttggtggcttcaagatggctccctggcagggggttggcaggaggccttggttcctcacctgggggcctctctgtggggcagcttcagtgtcgcccagcatgactgtggcttcctcccagcagggatgggattgcacagctggtcgacggtggttgggagagggagaaatagaggcccttgctcaggtttctgagttcaaaactgtgctctcatttcaggggccagcagcctcccccgatgggtcgtcagcaacgagggtgcctcaggatgtgacgcagggccctggggccacaggtggaaaggaggacagtgggatgattcccttagcaggcaccgcccctggggctgaggggccggcgcctggggactcccaggctgtgcgcccctacaagcaggagcccagcagccccccgctggcgcctggcctgcccgccttcctagcggccccgggcaccacgtcctgccccgagtgcggcaaaacgtccctgaaaccagctcacctgctgcgccaccggcagagccactcgggcgagaagccgcacgcctgccctgagtgcgggaaggcctttcggcgcaaggagcacctgcggcgccaccgcgacacgcaccccggcagccccggcagccccgggcccgcgctgcgccctctgcccgcccgtgagaagccccacgcgtgctgcgagtgtggcaagaccttctactggcgcgagcacctggtgcgccaccgcaagacgcactcgggagcgcggccctttgcctgctgggagtgtggcaagggcttcgggcgccgcgagcacgtgctgcgccaccagcgcatccacggccgggcagcggccagcgcgcagggggcggtagctccgggcccggatggtggaggccccttcccgccctggcccttgggttagccgcctcccggccagcgccatctcccgcccttggtgctgcccccgggcggtacctgctctctcccagcgccacttggcctcttcctctcctccttccctcccatcgtcctcctccacctgcgcctcccttgtctgaacttcccaacgccttcctattcctttccaactccttttcccccaaatttcactttccttctcaggtctcacctcagccccccccttctccctgatttctcggcctctctctctgtgtgaaggggcctctccctaatgtctcctccttcccccctcttctctctcctgcggcccagcctccctctccctcctccattcctctctccctgcccttttcctgcctgaagagcagaggtgaggacctgggacccctgaggggcagcgggtgatggctctgaagctgaacccagggcctggctgtggtcttcttggtcttgctgccccctgtgacccaaaggcatgggatggacagagatgcctgcccccgtgaagctggttggggagggcagttcaccagcatccatagagtaataaagtcactgtgtgtagacccgga

SEQ ID NO: 1903 - protein, 292 aa, Homo sapiens
MAPWQGVGRRPWFLTWGPLCGAASVSPSMTVASSQQGWDCTAGRRWLGEGEIEAQVSEFKTVLSFQGPADDGSSATRVPQDVTQGPGATGGKEDSGMIPLAGTAPGAEGPAPGDSQAVRPYKQEPSSPPLAPGLPAFLAAPGTTSCPECGKTSLKPAHLLRHRQSHSGEKPHACPECGKAFRRKEHLRRHRDTHPGSPGSPGPALRPLPAREKPHACCECGKTFYWREHLVRHRKTHSGARPFACWECGKGFGRREHVLRHQRIHGRAAASAQGAVAPGPDGGGPFPPWPLG

SEQ ID NO: 1904 - DNA, 2048 bp, Homo sapiens
ctgagtgggaagctggaccctacaaaggagtctgggggcgccgggaccggaccccttcggaaagtcaacgaaatggagatacagggtattacaaaaggtgccttgtacctcgtccaaggacacagagctggtaggaggcagagctggaatttgccccagagcctttgtgccgtaggacaggctgcgggaggagctgcaggactgaggtacagaggccaggggcccagggcaggacccagcctggacttgactccctgggatcccaggaagggcacaccctttcctcaccacccgagtgagcgctgccccctcacagagacctctttgccccctgggccaggcagagcaggcgctgcggtccgggaggccccatggaggtggcggtgcccgtgaagcaggaggccgagggcctggcgctggactccccgtggcaccgcttccgccgcttccacctgggcgacgcgccgggcccgcgggaggcgctggggctgctccgcgccctgtgccgggactggctgcggcccgaggtgcacaccaaggagcagatgttggagctgctggtgctggaacagttcctgagcgcgctgcccgccgacacgcaggcctgggtgtgcagccggcagccgcagagcggggaggaggcggtggccctgctggaggagctctgggggccagcagcctcccccgatgggtcgtcagcaacgagggtgcctcaggatgtgacgcagggccctggggccacaggtggaaaggaggacagtgggatgattcccttagcaggcaccgcccctggggctgaggggccggcgcctggggactcccaggctgtgcgcccctacaagcaggagcccagcagccccccgctggcgcctggcctgcccgccttcctagcggccccgggcaccacgtcctgccccgagtgcggcaaaacgtccctgaaaccagctcacctgctgcgccaccggcagagccactcgggcgagaagccgcacgcctgccctgagtgcgggaaggcctttcggcgcaaggagcacctgcggcgccaccgcgacacgcaccccggcagccccggcagccccgggcccgcgctgcgccctctgcccgcccgtgagaagccccacgcgtgctgcgagtgtggcaagaccttctactggcgcgagcacctggtgcgccaccgcaagacgcactcgggagcgcggccctttgcctgctgggagtgtggcaagggcttcgggcgccgcgagcacgtgctgcgccaccagcgcatccacggccgggcagcggccagcgcgcagggggcggtagctccgggcccggatggtggaggccccttcccgccctggcccttgggttagccgcctcccggccagcgccatctcccgcccttggtgctgcccccgggcggtacctgctctctcccagcgccacttggcctcttcctctcctccttccctcccatcgtcctcctccacctgcgcctcccttgtctgaacttcccaacgccttcctattcctttccaactccttttcccccaaatttcactttccttctcaggtctcacctcagccccccccttctccctgatttctcggcctctctctctgtgtgaaggggcctctccctaatgtctcctccttcccccctcttctctctcctgcggcccagcctccctctccctcctccattcctctctccctgcccttttcctgcctgaagagcagaggtgaggacctgggacccctgaggggcaggccaggaggagctcgggcgcaggccaggcccccttggtgaagcagaggctgaaggaaaggggtctgggtcttgtccctaggaattctcctccctcaggagattgggggttgggggaggcagcgggtgatggctctgaagctgaacccagggcctggctgtggtcttcttggtcttgctgccccctgtgacccaaaggcatgggatggacagagatgcctgcccccgtgaagctggttggggagggcagttcaccagcatccatagagtaataaagtcactgtgtgtagacccggag

SEQ ID NO: 1905 - protein, 323 aa, Homo sapiens; identical to SEQ ID NO: 1901

SEQ ID NO: 1906 - DNA, 40894 bp, Mus musculus
cacataacagagaatgttggtgaggcgtagcagagtgtcaagacaccgtgcgtgggaggactcaggaaaagataagaaaaccaaaccaaagaaccacagttggctggaaacataaatcttgctgtaccagaggtgtgtgtgtgaccactctgctacaacttcctgtatttatcagaaatacacaagcctgcatggcccaggccccacacggagtagagatggccccacacagaatggtgatggctgactgtggatgctaactgctcatccatcttcatgttgggaatcctaggaaggacacagactcttcagtcccatctcatctggggctctggtgggcagtctcatgaccctgtctctcccctgaatgtggaaaggaagactcagtataaaggcaacactatcatttacaacagaaatgacccccaaaggtctagtactcaaaacccacttcacagctgatgttattaggaagggacagggctagtagcaggaagttatgtcattgacacaatggagaagagacctagactggaccccaaggtaatcagcttccccatggacctcccccacaaaatgttggctcaacacaggccaaagcagtgaagatgatggttcatagacagaaacctcccagcaatttttacagattatcacttggggtgttcatgacagtaacaggaaactgattaacagagaggctattattcagtccacagagcttagatattggaaaaacagggctgttccctattttcctgctgtgtctgagattttatttctattcatatatgcttagtctcttaaaatagttatttagtttatgcatatgagtgtttgcctatatgtatgtatgtatatatgtatgtatgtatgtatatgtgtatatgtgtatatgtgtatatatgtatgtatgtgtaccatgtccccaaggagggcagagggggacacaggatctgagggaactggagttacaggcagtggtgagctgccatgtgggtgctgggaatcaaaccaggtcctctgtgagaagagccagggctcttaaccactgagccccacatatgtgctgtcttggtcagagtactattgtgagaagacaccatgagcaaggcaactcttaagaaagaaagcattcaactggaactggcttacagtttcagaggtttagtccattagcatcgtgatggggagcatggaagagcacaaggttactagagcagtagctgagagctacctcctcatcctgatccacagtcagagagaaagagacagacagacagacagacagacagacagacagacaggaagagagacatgcagacatagagagcaaaagagagacaaaaacagacacacacagagacagacagacagacacagagagaaagaggcagacacagagagacagacaaacagacagggagacagggagagaatgcaccataagtcaggcatgggcttttgaaacctcaaagcccacccccagtgacacactttccccaacaaggccacacctcctaatccctctcaagaagtcccactccctggagtacaaacatccatatatgagcctatggggcccattttcattcaaaccactacatgtgcttctccagtttccaaggtcattacattcaaagatttagaaaaaaactcaaaactgtctttaggcttctctctctctgtgtttctctctctgtgtgtgttctctctctctctctctctctctctctctctctctctctctctctctctctctctctctctctctctgtttttctctctctcttgtcccaactgtgactgaagtttacactaactgtaaagccagctctcccaaaatgtccatagactgtgctaacgtttataaccccaggctaggatggcatgtgcattctgggaactgatgtgccaggcccaaggtgagggacagtgtgacagctacccaggacaacatgatcattctgtaatcaccatagactcccagggtgaccatttctcaccgggtgcccattggactgaccatcccttcagagtttttgtggtgcctctaatgagcttttctccacagacctctcagtattttgctataaaacatgttttcctttagtgtgcttatgtgtaaatgtgtgtgtgtgtgcgtgcgtgtgcttctgcatatgagtgtaggtcacagaacaaccttgggtgctggtcattcatttccttccactttgagacaggttccttcttctgttgtttgtccctcagagctggctggccccgctggtttctgtggattttcctgtctctgtcttctacctgaccacagcaatacttaagagtacagacacatgacacaatgccctattttacaagaggtctggtgatacaaacgcagttcctcacatttgcaaagcaaacgtttgacccactgagaggtccccagcctttctctgtaaaacattcttacctcacttcttcactggctcttcattaaagcaaaggctgagcctcctcactacaagttaacaggccaagaccatgcatgtatgagggacactgaccccatggggcagtggttctctgtcttcccaattctgcaaccttttaatacagctcctcgtgtggtgggaactccaaccacaaaattgtttcattgctacttcataactgtgattttgcactgctatgaatatttctaaatagaaaactgtgttctattccagtagcaggatgaagtgttatgcagacttgctctatcctacacgggatgtgaaccacaactttgccctgagaatccacgcagtatatgttatccacccagatggcactacagaatttatttgtgttttatatatgtcttctacacagagcccggaggtgattttaactaacgtatttaataatttcatgtacgatgcaaagtttgtatgcaccaaaccatcggacttgtgacatgattttagaggtctgggatttcagattttcacattagggaaaggcctgtgtcagaaaggaggctgaacagagcagaacagtcagctttccaccattaatttttttcactcttttagaacttaagttgactcttaagttccttgatgtaagaggaaaagatggcatcatttaatgccaagactgagtatgggtttgatgtaattgaagtattcttacagctctgggctttagagcagctcaacaggtccagcccaaccactctggatcaggtttaggagatgaggcaggggtggctggcaatgagtagatctcttacttacataggcacagcattccaaatccactcatcacagtaaaaaaaaaaaccaaaaacaaaacaaaacagaaacaaaaacaaatacaaatgcactgtctatggacatggaaaaattaatgcataagctgtcatccattcctacagtggaaattgtatactgggtaagatagaagaagtatagctaacctcagacatatgggggaatcttataagtaccctggttcttcttgtctgtggcttcacgttataggcttccaatgaatgatccctattctgtagtgatctaaaaatgttaaatggaaaattctagaaatgattagtccataaactgtaactcgtgttacccccttaagtaggagtgaacgtttgtgaggttctggtctgtcctacccaggatgtggaacacagctttgtccaatgtatccaggaagtgtgtgttagccatcactttgaagcatcccccaaagttaagaggcactactgtatttgctgaataagaaaaaaaaaaaaaaagtcttagaaaataacacatggtagggccgaattttataacactcaagagtaagaacaactgaaatgcattgtttggctgcagacagcgacgtggggaaattaatagaggaagaaccaagtggtgagttccaaatggaaagtcctggaggcttctagaagcgcggcagagtgggatggggtgtggcctaaggcagcctggtattccttttctggctgctgtgaccgggacagaaacacttaaagaaagaacaggatctcagaggatcgaagccatggcctcttggcccctgtgtgcacggatagaaaatcatgctggtgggagggtgtgatagggggaatcttctcccttcacgggggtacaggaagcagggtgaaagagacacagaaaggggtcagggccaagatatactcaagggtgccccccccccaggaacccttcttccattgggtaagtctaatttctcaaagttgccagagcttcccaaagaccactaccagagggcaacccagcattcccaaggtgtgcctgtagggggcattgctttgttacttttctgttgctgagctaaaatatgagcaaaaggaacttaaggaagaaagggtttattctggcatatggttccagtggtacagaatccatcatggtgggaaaggcccggcaataggcaggacacggtaccagaagcaaggaagctgacgggtaacattcccacccacacacaggaaggagagagaaacagggggaaatggggggcggggaaaggaagtgacaagaagctagaaacccacaaagtctgccccagtgatgtccttccttcagcaaggctccacctcctaaaagttccacaacctccccagacaacgccaccagctggcgaccaagtattccaggaccacaacctatgcgggcgattcgcactcggtggagccattcacaagggcactcataaatattggcggggggggggggggggcggggcggggtagcacctcgtttactctgtgtggaatgctggtgtgggacagagatgtgcacaagagtgagaagatgaggggagggttctgaccgtcggggtggtctctgaacttgaagcggcagctctgggaagcagagagcagaagctacactgcaggccagcacaagcagcagaccatcagaggtttgaacaagcagagtgaaggagaaagggcagagaaggaagccttctctaggtgccctcggtagtaggaacacctccccctcccccactctatactttcttccaggaacagctggccccagggtaacaggactccactcagactagctgttccggcctgaaggtcatgagtctctggcccagcccaacgcagggagaaaaggaagggccagactttctcttgtactagaggtctgaatcctgtaagactgaaggaagaactcacaaggtagggatcctgggtctccagagtgctggcaaggtccaagccaggcctgagagtcagggtcttctttaaaccaaagtcacccttccctggtccccagtgagctggattgcagaagcctttgctgtcttctgctgtgaggagacacaagctctgggctggcattgccagccctactgttaagtggtgtcaagagtaggggcctgcttcctcctgcctgtgtaagacaccttccctttgtgtgttttggttgaggcattgagaaaaacaccaaagggaagtcctaagtctgcctttctctgtcccagcttagctagctatgctggaagcccagtgcgggctggatcttttcctggccctggtgtgtacagagagcatgctgtctgggccttacagccacagagaatgctcagggaagacacccatcctggggacaccaacagatgtttaccaagctgtttgtgagctctgagctgagctctatgcggctggacgctcagcactggctgtttgttctggaatattctatctctatagggcctttagtatgacgagagagaaacagaatctcagagtcatgagggtatcatgtcagcagcagtgggaatatcactcaaacctctgcaatgccccctaccccaaactgtacttggacagggctctctgatttgcatctcctttctctcccttaggggccacactgctgtccaagttcttcctcatggctgaccttctccctctgctgccctgggctccccagggggcccaggatgggaaccaggactcggcaggatctccaactgagcaacagacacagactgacaaagtccaggacctctcccctaaatcctggaggctcttgggggtgcctactattcacataactccatccagtgatggagagtcacctccaggcacccccactacaccacgatttcagaccttggacctggagtgtctgccgcaggacaggtcagtcttgggaatggaatgggaggtgttgtttgtattgcctcagctcgagtgtgggctccttttggttaacgtgctgaagctcaattagagtctagcctgagcccatgagacctgattcgaggccatgaaatagatgtgtatattagttatggttttttacgtgtaaccaaatacctgacaagaaggcattacagaggggtttgtttgggttcatgatttaaaggtatcattcatcatgataaggaaggtacagtactaagggagtcttgaggctgtggcagcaagagcagatggcttcaggtcctcgcatctctgaggaccgtgaaacagcgagatgggcacaccagcctatgctctttttctctttttctcctcttgtattcagtctgggaccccagctcaggactatgtggcacacattcagggctactccccccccccccccccacacacacacactctggaaatgcactcccagacacactcaaagctgtgccctgaaaggctctagttgcatcagtccactgaagtcagcaaaattaagtcagcacaagccacaaataaaggcccagaatgtgcttcgggaccagtgactgtgggcccaactgaatgctgttggcaagaaggctcccagcacaggctgaatgtaggtgaggcctggatgatactaggaagcaaaggtggcagactgtaaccagaatttggtttccaaatggaaataggctgacgtgcgaaacagcctaaggtaatggctcagagcttaagaacaagtgctcctcttgcagagaaacgaaattaggttcccagcacccacatcaggcagctcgcagccacttagaactccagctccagggcatcagataccttcttctggtttccatcatatgcaacatcttcattcccccccccccacacacacacacacatacactaatcaaaaacatcaaaacatcttttttaaaaataattttaaaaattaaaaataataccaaggacaagacaaagtgagggcaagtgtggtttcctgcatctctagtggcaagacatatttgtaagccatcacaagagctatttcctgttgtggctcacaggtgggtgtaaaacattcaaacaaaacttcttcaaagaaaaccaacttctagcccagggagactgaaaacaagaggttcaaggacaaagtatcagcaaaggaaagaacccgacagactgaccttaaatagaaagaactgtgtgctggggtttctccccagctatggatgctgagaaggaccaaatgtttaggaagcacagctctgccagcaccaaaaaagtctcagaaacaaggatgatcaagtgggagagtcaaactgtagaaggatacaatgggaactagttgtatctttcaacgatactgaatactgaggctggcttgttgactcctgtgttgtagcaaaaccgcacaggagtgatccacacagacttcagggcaatagacaggcagagacaagaggagtaggcacttgggcctttggtggtaaacgttatagtttatctgtttttaaaggtgtattttttaaatgcatcctcatgagcacctgtgcacgtgcatgtgagtgcctgcagaggccagaggaggatactggatcccctggcgctggaggaaatgcttactgggaacctaactcaggtccgtggccaaagcagaacagtccttaagcaccaagccagctcttcagccctgtttggtttttgagacaggctcatgctttattgtctaggctcagactcatggtcctccagcttcagcctccagagggctggaacaacagggtgtaacaccacgtgggacttaacactaagggacttagttagcccttcccctccctcctctctctcctcctctctctttctctttctctctccttccttccttccttccttctagactgtttcctgcattaccttggcaagtccaaactctctttgtagaccaagcgggactaaaactcacagcaatcctcctgcctctgcctcccaaagtcctctaataccacataagcttaacagcttaattcatctaaaacaaacaaacaaacaaaaatccaactaaaatgaccaaccacccacagaagtcctgagtgattttttgatatgcaaatttgagcacaatggccttccacttaaatactttaatgactttccattgtccttagaaacaattcagaacctttaacgaaattaatgaggctttttatgcatactgaacctcttatgtcttatggtgaggacacagatggccattatacacttttatttgaaatgaatattcactaagtaaaaatgtaaaaatttgtgcggttggtggttcctgcctgtaatcccagcatttaggaggctgaggcaagttcataaattcgagccctgactcagctacatactgaggtttgaggccagcccaggctatataatgatatccaacccacccaagccctcaccaccgaagtaaatgtctttctaagagtaaacaagctacggacgtataaaaagagcaacacagaaagatggaaggcagccatgcaagaagagcgagcttcctcctgtggaagggatagcagtgcaaaggtcctgaggccggaggcaggtgggatgagcaggggggtagattgacacctgggataatcaaccaggaggctaaggaggaaccagttagacagacaggtggaaggggcccaatcaggagggctctggacaccaagatgagcacttttttttttaaaacaaggaatgaggtggagccagggtagggcttgaagccaagaggcctctggccagacttggcgattcacaggctagagctctggctgtaagtggtaacagagcgggataggaatggaaaccaaacaaggtgggactgggcctactgtagctggacaagaggctgaaggccgaagaggggtggggagaaatccctgggctgggtcccaaagccagaggctcgttcacattgtgttctccaacaaggacgacaaccacgcctggcttgcagaggtgggtgcagggctggctggcacaagaactcgtcctacactgcaatgtatggtcatttcccgtcctgaggctcggcaggcttcccagtatcaaaaacgctgatgagccctgcccctgtgctgttctgggggaaaccccttgcctgggagcagggggctccccaggcctgagggacttgcccaagcgcacacagcactgctaggagccgggtgggctggaatctgacgtggtctgcacgattaggctggggaagtctccatacacacgcgcgcgcggaaaagtgaacgcttctaaggcaggaactgaggttctgaggctgggtggggagaacgggaagaggctttccaccctccagctgtggttccccgaccccacccccagacttccgccccaggccagttcttcccagcatcagcctgtcacccacctccatcccacttctcagagactcttctgggtccaggggagaagcccagggtgtttaaacttgtttgctcatttgttttgaagacaaattctcactctgcattccagtggcctggaattcattatgtagcccaagctggcctcgaactcatgccaatcctcctgtcttagcctctgggatgtgaggcgtgcgctatcacgccccgcccaggctgctcattttaaataaaaattttcttctgtctcccagccggactctttccccagccatcctaggcctaggcccgcgctcgcgtccatgtccccctcccggcgggggcggcgccgtgacgcgcggggcgggagcaggaagggggtgtcgctgacgccgaggcggcctccggcggctccggccttttgtgcgggtggcagggtccggtggaggcggcggccgaggcaggcgaggcccgggaggcccatctcagagcagccggccgggtcctgccctgcagccggggcgccgcatccatgttcgagtaagcaccgggcctcggggtgggaagcggggacggtggtgcgatcgggctgcggcagagggccggagctgggtttccaagctggtgcatgtaggagcgaccccgctggggaccagaaggggtacacgtgagggattgcaacctggcggcgagacccaagattggggcgtcactaccggcctgggacgcatatgggcagcggggagctcctctaggccctgatcgtccccctacggggagccctgacccaacacccagatgaaagggccgcgagcagccccaccccccatccccattactgggcaggccccgcagatcctccggtcggtggtccccgtttgtcgtgggggctggggaaaaggagcttctttgagcctgagatctcggcggggtgggggtcgggtgtgttctgcccccctcccgcccccgccactcctgcctggtcacctgtgcctgcgggtttccgtttgtgattgtgctcagcgtggtgtgtgtgtgtgtgtgtgtgtatgtgtgtgtgtgtgtgtgtgtgtaacagctgggattctttggggcaatgttgtgtggctgtctgtatgttatctatcatcttctgtgtgatggctaccacccaggtcgagtgcatctggtgctcttggacccactgtggttgtgtgtgagacgtgtctcattttctttgtggcaccgtgtgcaaatcacacattctgagcttgtgcctcattgtgacttgtacagcattccgcttcagtctcttggctgactgtacctataattcaccatgaattacgtctgtgagttacctccgtgagctctcattgtgatttgagtatgtgtgcatgtggttggggctcagctgctgtgcgcctgacatccacatttggatgtcttttggttccgtgaacaagtagaaattgcatgtgtctaccggtgacagtgtggtgtcactgggccctgtgggtggctcacttacctctgattccgtctgtgggaaagtcccagtgtatccaaatgtggcattgttgcatgccttgggtgtgtgtgggagattgtctctgtctctcagaccctttgtggctttgtctgttgaaagagacagagaccccttgtggttttctcagctgagaaccctccctcctgggatgttgggtgtaaacttaactgctttgcaaagcctgcccctcctcatgctgacccttcaatatctggcagtgcattgttcccaagccccccttgtctatgggaatgtcagggctctctcaccttgacagctgataattccattcctcgactcttgagaactggcccttgctttgttttctctgcctggtgaacacccaccctgcagttagagggtcagtcgggatgtgtaggttgatatgatgacttcccataggaatgcatgtctgggtcactgggtcccatgactaggtgccgtgtgaatagttttgttgtgggttttgctgtttgttttgctcttcagtgtaaaactttctcgtggttgtgtataggacgctgatttatgtggactcactgtgtttctctgattctgggatgctgtgcgactgtagcatatttgtagcgagcgtgcatgtgtgtgtgtgtgtgtgtgtgtgtaaaacgttcctggcagttgtgtatgaatttgacacacttacaatgctgtggttgtttatgcttgtgacacttctgtacgtgtgaacggcagagaggcaggtgggagagacttcgttcacctgcaggccagtttgcctgggaccctctgtgtccccagccatctttccctttcccacacacctgtgtgtgctcttgcccctctgtgctgaggccgatcctgaggcccaggacgcagagcatctgcacagtgaaaacgccattctcttccgagtctccgccccttaacggtcctcctctcgccactctgacccctcccttcactctctcaggactggctggctggctggctggctggctggctggctggctggctttggccaccctagggctctgctacccgcccttgagaacttcctctttgtctcttccaagagcaagagggatgaacttggcttgtctgtgccttcagcctgccattgagtggacctggggcttcagaatcaatcaggcccgaatcttagcccagaggtgagaagagaccacaggaacccccggggccttctgctctctagaaacgtgcagggtggcccagggtcctcagttctgctggtcgcttgctgttctcagacctgccagcctccttcctggccctgaacttgacgctttgagagagtccagcactgtctcccccacatttcgccagctctgttctttgtccccagcccttggcctcagtaagcctggcccagctaagccctttgcagtcagtctggctcacttaagaaaccctctctgctcctaattattctgtcagaattcaatgtgcatcagattttaagttgaggtttctgatgccggtgggggtggagatttacatttgagttttgtttctcttttgttttgtggcagtcctggtgatggactccaaggctttgtacatgcaaggcatatcctccagattctgttgggcggattctactgattcacatgcccagctccttattggtgatagctactggtgagccacgcccccaggccctcaccactaggttcagggccctttagctacacattcacaactctggagtccttaagacagactcttgctatgcagcctatgctggtctcaaactctgtgatcctcctgcctcagccctggaatactgaattaacaggagtgcctcaccgcctctggatggaatctgtttcaaacaggttcctggtccggttggtggagtgttctgggggagggggggaggggctgtgctaacctttacagcaaaggcaaatgtcagatgtcagaggccattattttcatttctgtggggttttgtgtgtgtgtgtgtgtgtgtgtgtgtgtgtgtgtgtgtgtgtggtgatctggctccctggttagtgcagccaggtagttgggacctgctgcttacagtgtccccactgtgttctgtgtatgtttagacagcaacaggaaggtctagggcaccagccgaggtccctccagagtcagcatagcttcttgatcagttccatgaaggttggtggcagaggtgtcccttttatttctgaagttgtgcccaggggaagctgtcatacattgcttcttcgtccctttgccttacatatcatttcttctccacgcagcctgaggaggtaagaaaaccaggtgaaagtgaggctggggaaggtgtagacgcggccctgtggctctgaggctgcaagcctttaggtcctttgaatccaggctctggagggagcaagcaagcctggtcactttgctcatgccatggtggtgcctactcatgggcacctactaggcgaaggggagaatgatggggagccaggaggacagcatgctcctggtagatgctctgagggcaagaaggtgaggggcatcggcagagggctgtgatttcaaatgggacgtggagacatgtctgccaagcatggcggggctctgggggagttagttctgcctacatctagtgagagaagggcatatggataaaggggagaatgaaggcaggagctagagaagagggagttcccatgatgagggccagggaagggttgaaggctttcctgggataagtagggtggcctgacagccaggaagtctcagctcagtgtgggaataggctttctcgggctgaaagttgggacagactgagttcagacaccagagcatggtgaccatggagagccgtagtgacccaggccactgttgatatccttttatttagtcatatcatttatacaatgactttataagaatcacatgacttcctctctcgcaccccatcaaagcagggctgcagcagagcgggaactaagacacccctctaacatgtccccagaaacccatagagctgctcactggggtgactgcggcaccagcagggtatcggaacccgcagaaggcagagaggtgcactaaagtcttgaagtgttgtataatatttgcaagggccaggcatgttcctgtggcctgtaagtgacttcttgatgtgactgcagaagcaacacaagccaggcatgatggcacagggctgttctacctcagaatgctgaggcaggacaaccaaaagttcagtcccagtctagactactgagtttaaagccaatctgtacagcttagtgagagaccccgcctcaaaataaaaagtaaaagggggtctgggacgtggctcagtggtagagcccctgcctagaaccccccagtgaggggctggaggtgtggctcagtggtaaaatatccactaagcgtataccaggttctaggttcaattcccactcagcaaaaaaagaaaaaaaaattgcagagcaaagaagaacaagggcaatgtggacagggagaccggcatgaactaaagattatatgggggagacatatttgaagaaacttcctgggggagcagagatggcctagtgggtaaatatgcttcactaaacccagccacccatgttgtattcctgggatccacacggtagaggggaccaattgctgaagaagttcctgaaagagaaaatagaccacttgtactccaaagtagatctgtgtactgaagttagaatccttcccagaaaccgctgtgcctcccactgtaaaactggacagtcctgggcccaggcacacagtgtttttgagcagcgataaaatcaatcactcggagtgtttgacagaatcctgataagaagtcaacaaagatgtcctttaaagtccctgcctctcatccccgccgcccttatggctgtcggtgtttgcacagttaccagaatgttctgtttgcttaacgtccacctctggcaggatgttaactcgccagatccaagacttcaggtctctgttagtgctgggcgcagccagatcagggccattcattcagtcccacggtgtttataagcattaattatgggccctgtctctaggtgctaaggataccgacagcaaccaagacttcctccagttcacagtttagggcaggcaataaagaaactgtgtaaacaaatgaacagggtgagtggagatagtgtgggtgagtcaggaggagggagggagctctttagggctgagggacgatggaggaggagggctgaggatggagtccgttatgctgaagctgtgggtgggcttgttagatggaggggaccacagatgcagggtgtgaccctaggagcttagagaacaagaggaggctggaatgactgggacagaagaagagcatgaggccagggaaataatgagacctggtcacatcgaaatcagacttgattttcatctggagagagggccagccagaatagggcttagagaaccctgagctgactcagctagctggtcaccagcttccagggctgcaagtgaggagagagactgaggcagagatagcagtagagaaccagaagcaagtttgtgtgccgtctgtgtggaaaggaatggaggatgggatgaggagacacagtaatgaaaggaaagatggaagttttagaggtggtgttggtgggggtcatggacagattagagatgaggaaaggaaaaacactaagaacggtactttggggctggagacatggttcctggtggctaagagcttatactgctctgtaagagaacccgagttcagttcccgttacccatacggtgattcacagccacctatcactccagctcccggagctatggcaccctcttttggtctatactggcactgcacatctgcagtctacataaacagtgcatgcgcacgcgcgcgcgcgcgccacacacacacacacacacacacacacacacatacacaaataaaataacactttttgaaaatgttttaacacttcaaaaggaggggtactgccgggcagtggtggcacacgcctttaatcctagcacttgggaggcagaggcaggcggatttctgagttcaaggccagcctggtctacagagtgagttccaggacagtcgggtctacacagagaaaccctgtctcgaaaaaacaaaaaaataaaagcgggagggggtacttaggtttgcattttgagtgtcacatgtcaataaaggtttgcgttatgaataaattagtaagattatgtttttaaagtaattgggtgttgggcatgggtaaaagcatttgccgtataatcctgctcacctgagttcaatccccaggtggaaggaaagaactgacttccagaagtcctctgtcccccagatgtggtcataaaatagcaagtgtcatcgagggcgcgctgtgtgcctgattgttagagagacttgacagtttgatttctttaatcccccataatcctacacaatgatgatgtatatggggtcatcattgcctgggctatagggaagcagtagaggcacagggatattcaggcctgctctagggctagagagacagaaggaggtgaatgggtgagtggggagatggatagaaggaaggaaggaaggaaggaaggaaggaaggaaggaaggaaggaaggatggatggatggatggatggatggatggatggatggatggactgacatgttgttgactaggttggcagatggataaacagatagatagttggatggacagatggtagatggatggactggtaggtgggttataggtggcaggtggatgactgtatggatgagctgtggttaggtgcgtagaggatccataaatgagtggacagctgcgttgggagatggatggatggatggatgaataaactgataggcaggtagatggctaggctggtggatgcatgaatgggcaggtagatcgttgggtggatgaataggtgggcagatggagccactagatggatgcaccttcaaaaatcaggctaattcctgcccctaaccttcccccccacttctcttcctctccctccctagcaccacgccccactctggccggagctcccccagcagctccccgtctcttcgtaagcggcttcagctcttgcccccaatccggccccctccggcttctgagtcagaaccaggcaccatggtggagaaggggtctgacagctcctctgagaaaagtggcgtgtcggggacactcagcacccagagcctgggcagccggaacttcatccgcaacagtaaggtgggtgagagctcaggtggggttgggagagggcggcagcaagggcagagaacacaagtctcctcctaacgcatgtctttctcttgcagaagatgcagagctggtacagtgtgagtatctgtctgcacatggggctcgataaaggtatgggagagggctctctgcctgctgggagctccagaccagagagagcagttaaggagtgggcgatacataagacgcttctatttaacacacaggacaggatgctgctatttatggtctctgaatggccttgggtgggtcttccactccctgcttgagaagtattagcctaatcttgtaatgccagagggaagagtggataagatttagtgatgctagtggcggtaccttgcacagggcctgactcttacatgaagtcagtaaacagagagatggttaagactactgtctgctttctcaaaggactcaggtttgattcccagtacccatatggccattcacaactacctgtaactccagttttagggaaccagataccctgttctggcctcctccagccctgggcactctccccatgcacccatatacatataagaaaaacactcgttcatataagtcattttttaaaagtcagtaaatggaaggtattcttatggtggtatgtgtgttgtgagcaaagaagccccaagggccgagaagactgagagggatcggaagttttggggggataaatagcggcttggaatcttcactcaggttcccgtgccccaaacctcttcacagatgctgtgtcccacatacaaacaacgcaacgaggacttccggaaactgttcagcaaacttcctgaagcagagcgcctcatcgtgggtgagtgtccatgcccccagcctccgttagtgacctggacgggagcttctggcttcttttcctgcctccctgctggtttgtgggctaccgcgccgggacagatcacgtgactcaccgtgtctgcccatctctccctctgccactctcagattactcctgcgccctgcagagggagatcctcctccagggccgcctctacctctctgagaactggatctgtttctacagcaacatcttccgctgggagaccacagtgagtcgagccgcaggtggatgctgaggggcctcagggccggcagggcttctggctagttctcactgccctgtgctgtcttttaagatttccatccagttgaaggaagtgacctgtctgaagaaggagaagacggctaagctcatccccaatgccattcagatctgtactgagagtgagaaggtgagtgatggatggatgggggtgaggggcacgcaccaggatcacagcggagacaccttccccccctccccccagcttacctagacatgcccatcagagcagatccccatttgtgttgaacttggcctgtttattgtcttggccctcgcagtggtccatccccactcattttggctggggcccctacagtattctcctgtgcaatggcccccttacatagatgttctgcaatgcactgatcctaaaatctcccacgaacccatcagttcggatgtccccacccccacccccagccaaagctgggatagaaacccagggctttatatcttccagaaaaacactccacccctgagccatctctctagatcttgtttgtttgctctttgtttgggtaacagggtgtcttatgcagctctttctgtcccagaacccactatgtggttcggggtggctttgaacccacagagatctgcctgctcctgcctcccgagtgttgggattaaaggcttgcttgtttgtttttgttttaagtatttatttctttttatcctgcatatgtgtacctcatgtctgcagtccacacgaaagccaaaggagggcgtcaaacctcctagaactggagttacagatggttgtgagctccttgaagtgggtgctgggaacccaagctgggtcctctgcaagaacagcaggcgctcttaacaactgagcgatctctccagacccttgaccttgtttgtttgtctgtttgtttttgagacggggtctggctgtgtagctccggctgaactcaaactccaaatcttggctccactgccctagtactgggtcagcaagaaccacacctggcattcgtcctcaatatctgcttggttgagagatagctgtgtcaatgtggagtcctaacaggaaacaggaaggaccaggggatgacctgacagcagactcccctttgtgtttgtcagcccagagctggaagagttagccatccctgacatcaaaaagggctaggaaaggcactgagcattgcttctgcctcaggcatggggaaggttttctctcccatcacctccaggaggctcttccccatggtggtgaccactgggtgtccctaccccatcctgcctctcagtctcctcacacccctctctttgcagcatttcttcacttccttcggggcccgagaccgctgcttcctcctcatcttccgtctctggcagaacgcgctgcttgaaaaggtgggtacgactgatgctcagggggatggggttaactagggaggacccggaactcataggaaactcccagcttttcttgtgggcaccaggctcttctgcatctgtggcttctccaaaggtcttgccagggataagccaagagttcccatgcctagcactgaacagagtccccgaaggaggaggaagggattggtacagactggcccccgatgctgagggaagcctccatgtgaggcaatacttagcagggaggaagggaatagggtgggcagtcattacgcctatccgtcaacactgctgatacccctgagacacccttccccatccctgctcggctgtgagcctcgccctctctgcggcactcatcccccagggcaactccaaacgggccatcctcaaaagtaagactgcgaaagacctccctcttctcaggagcctgatggggcagcatccccaaagaggacaaggccagaggagggcccttcagtcccattctcatcaccaagcagttgtgtgtggcaaaggggaccatctctacttcagagctcccaggactgggtgtgggctgggctcagtgatgttgcttatctcaaactgagtggattaggcattgctggggctctgatctcagctctgtcacctcccagcagggtgaccttggttgagctactgagcacatcgtgtcttgaagtcctgagagtgttgtactagtatctactttgaggtagcacttacgcagcgtttgtaggaatgtcagcagcggccactgccctggcagttatcattagctgttattatttcattatctctggggcccagcagataatttcccttgcagccaatcagtgggcagtgggatgcccagggctgctgaggatatatagaggagaatggagaccagatagcataggaggcaagaacttggactcttctggaatctgactagctttgaatccctgtgggtcatttgtgtgaccttgagcacatgacttctccttacagaatttccagatccttctctgtaaaaaagagaatcttccctagccagagcactatggacttaggagttctaaggtgtggcttttagggcctaggccccaggctctgcagaaagaggcaggctagtgatggatgccagctaggtagagatgggtagagagtctggcgtggatagccacgctgccctctcatggaagctaggggaactgctgggaccaggcagtagaaacaagaggccaacctcatatcccttatgcctagacactgagtcctcgagagctttggcacctggtccatcagtgctatggctcggagctgggcctcaccagtgaagacgaagactatgtctgccccttgcaactgaatggtcttgggtgagttggaggtagaagatggctcaaagggatgtcaggaatttctgaggggccttcctgggtcccttggatctgttgtctagagatgaattgtagacagacatgaggtgactatgcaaagcctggtggggtggagggagaacacagtgagtgtagcatgtggtggcaggagggtccagccatcgcccacttccttctttcccttgcaggagtcccaaagaggtgggagacgtgatcgcactcagcgacatcagtccctcgggggcggctgaccacagccaggagccaagccctgtgggttcaagacgtggccgggtcaccccaaacctctctcgagccagcagtgatgcagaccatggggtgagcaagtggatgcttatggggagagctgggaagattgggaatggaggagggagcacagaagatcggggcaagggggcttggcagagggatgagatgcggatgggtggagagaagaagacagggaaaataagaggtgaaccgggcaaatacggcagacttggaggaagaggagacacaaggggagcaagatagatggataggagaccgatgagcagcgaagctagtaggccaagcttccacataagccctcatccctgggtggtcctcaggcctctgtcagactagccaagagcctccaggtacagacatcatgtccccaggattggtccttctggccaggacctaaactttagtctatcaaacacttgtggccagagtcgacctgtgggaacccttgggctggggttgaggtgtggaagactagatggaccgcttctctgcaggccgaggaggacaaggaagaacagacggacggtctggatgcctcctccagccagacagtgaccccagtagcagaaccgctgagttctgagccgacaccaccagatgggcccacttcctccttgggtcccttggatctgctgtctagagaggaactattgacagacacgagtaactcgtcctcatccactggggaggaaggtgaggaaggaataggtggcccccattcattctctttggttatatccaagtcgggaccagtgagagcagaggcgttggtacccagggcacatcatacagatggtcggggatgtcgctcagacagcatcctgcattagtggttctgtggccagaaaaggccggctgtgaaattggttacatttgttttcactaggtaaactttactcttgtgagccccgagacagagccctaggcttggctacccgacaatatatggctcagtgactgccacaaaaatcccaggcatggctctgattggtctgacatgacaaatgattccagttgaccataggagttctgtgccaatgggcaccattgcagtggcttttattggctgggctggggcgtgtgcccaccttcggcaaatcctatagtacaggaagagtttagtattgtttcaggttcagaggaacccagagatgtacccacataatgaggacacttttgtctcccaggtgacctggctgcactgctgcctgacctctccggccggctcctcatcaactccgtcttccacatgggtgctgagcgtctgcagcagatgctcttctcggactctccgttcctgcaaggcttcctgcagcagcgcaagttcacaggtcagggggcaaaggaaacagaggaccctgtgtctggcacctgcagaagcaggcttcatgctgcttctggctagcaatggcctcggagagggttttcaacctcttgctcacactgggtgtgcttgtagagcttgtgttagtgtgaaacgtgaatgagttggtacctagaaagggcctccagcaggagctatgctaaaatctaaccaatggacattagtacctgctctctgagactcctagaatactgggcagccatggaatgtccgtggcagagaacatacaattggacttgttttaagcaggtattattattcctgggtagagcagacacaatcctcaggtgactagaggacagtggagctggcctggagagatggctcactcccctgaagtgctttctgtgcaagcatgaggaccccagtttaataaccagaacccacataaaaccatgggtactggatcagcaaggtggctcagtgagtaactgttcacccgaacccacatggtagaaggaagaaccaactaccacaagttttcctctgacacacttgtgcctggtacacatgccagcccccatagatagatagatagatagatagatagatagatagatagatagatagatagatagatagagtgaaagtgtcttaaacgggctagagagatggctcaggggttcagggcatgtactgctttgcagaggacccaagttctgttcctagcaccatgtgggtctgctctcaactgcccacatgtgactccagctccaggaggacccaacatcttaagcttccacaggcactaaactcacatggacacatccacacactgacacacagatacagacaaacatatgccatagacacacaacacacagactcaaacacacatatgacatagacacacagcatgcacacacagactcacagagacacacaaaaacacacatgacacagacacacaacatgtgcacacacagactcacagagacacacaacacaaaaacacacatgacaaagacacagaggcacgcagacacacccacagacagacagacacacacaacacaaaaacacacagacatactcacacaaaaatatacacagatacacaggcacacacagacactcagacacatacatgatacacacagagaaacccaacacatgcagtcacatgacatacagacacacacatgatagacacagagagacccaacatacacagacacaacacagacagccatacaccataccacatacatacatatactacacacacacacacacacacacaaaacactaagaataaaatagatctagaaattctttaaaagctgggcacggtggctcacacttctgagcacgtgactagcaggttaggcctggccagctgacctgtcccagttggtgagcatcaggccagtgacagactctatctcagggaaacaaggtggacagcacctgaagaggaacaaggttcaccactggttgttctctggctctacatgtatgctcccgtgtgcgcacacacatatatgcacctgaagaggaacaaggttcaccactggttgttctctggctctacatgtatgctcccgtgtgcgcacccacatatatgcagctgtactcatgagtacacatagacatattcacagtatatacatacggccctgcctccccaccctccccaagacaatagagagtaacatattagggaaagcaagcctaggactcctagggactgaaggatggtgcaatggggacccaatgggagggtgtggggaggtcctgggttcagtatggaacctggtatgtgtgagggttcaggggacctccaagggaaggtgtcacaaaggttggagttccttcatttgacgcttgggagaaaccaagcctgataccaaaaggaagctcaggctgagtctatggcaatgactgaggcggtcgcagaaggtgtcagaaactccccttctgtcattaccgctgcagtctaaattgttttagcttctaaactaaaagtggggtgggcagcatggtggagacacagtgtagggtggtgggtgcagttggggacaagtccccagagaatcgaaaccctccagaaaggctgggtttcctccagcctgagagcaaagaaaggagagtgtgctcttcattctccacctccctcccagatgtgaccttgagcccttggagcagtgacagcaagtgccaccagcgcagagtcctgacctacaccatccccattagcaaccagctaggccccaagagcgcctctgtggtggagacacaggtaggcttggggaggtggctggcgggtgggctggccccgtggagcagccctgacctcccgactgctccttctgtcccctgcagacgctgttccggcgcggcccacaggcgggcgggtgcgtggtggactctgaggtgctcacccagggcatcccgtaccaggactacttctacactgcccaccgatactgtatcctgggtctggcccggaacaaggcccggcttcggtgatcccgagtgtgccctatctctacctcacctcagtggtcagggctgcctccacccagcattggaagaggtcattgtgaatagaatagttgatgtgctcagctgttcactgaacccctgagcatgagttgaacatagatattctaggtctcagggacaaagattcccctgtaagggaccttaaacgtcactgggaaaattccagtgaattaagtgattgcagaatgttattcagttcactacctcacctggctttagagaaattcacaggaggctggagtgagagagcaaggggttgtactacgatgatcaagggtggaccttctgagaaaggaatattttgtaatagaggaaggggcttccattcagaatggccaatacaaaggccctgaagtgggagcataggagtagctggagtagagaagcaggagcatgggagtagctggagtagagaagcaggagcatgggagtagctggagtagagacataggagtgaggtgcattcacggaatcagtttgagcccagaagaccctgaataaattccacagacaggcttcatctggctgtaaatgggagtgggataggagaccaagagaagcccacccactctgctgtctaggtgtagaggtaggggctaggaccagttgggagtggcaaaaaggacaatagttggattctggataggttttgttgagagcagggcctataatgtcagcactgaggaggctgggaccaggggatcctaggttcaaggctgcagtgagttcaaatttgtaagggcctattacaggataaaaaagactggtgtagactccactgggggagggcctgagggtagagctcaaccgtagaactcttgcttagcagataggaatttcagtccctagtatagccccaaatcaatggcagttatagggagacccctaaagtgtgatttaagtgtaaatgtggatggaggaagccaaagagtccaaggcctaggtttgaggtgataaagacccttctctgaattagaagtctggggcttgtagagtccccctacaaacctgacctaggtccctcttgtcctcctcctagtgtatcctcagagatccgctaccgaaagcaaccgtggagcctcgtaaagtcgctcattgagaagaactcgtggagcggcatcgaagattatttccaccacctgggtaggggactgaaggctggcggcgcaggggcggctgtggcccagcagggtacagacataccgagccatctcttgtccctcagatcgagaactcgccaaggcagaaaagctgtccctggaggaaggagggaaagatacacgtggactactgtcaggcctgcggaggaggaagcggcccctgagctggagggggcacagagatgggcctcagcacccagacccagacccctgcacccagaccagcatgcacacctcaggtgcgttacctcgagataggcagctggaggaaatggaccctggggtgctcctggctcaccccaagttgttgttttacaggttccctcagctctcgcttctcggaaccatctgtggatcagggccccggggcaggcatccccagcgccctggttctcatcagcattgtgtgagtaaggaagactggcatgggttagcagcctggctgtgtgatgtggaccacatgcttggtctctctgggcctctgctttggttgggatgtgggtgcaactcagagcaaggattgcatattgggataggtccagcagagttcccacatgctgctccatttgtcttagagaagtctttattgctgggacagcagctaccctggggcccaagggaagtcagagggaagaaatttctggaagaagagacaaagtatgtgaagttagctactcaaaagaagccaagttgtagatacattgtttttctgcacccagtcctgagctgcatgaatctgtagacacagcagtgaccaagagtcccatgggaatggtggagagttgttgtcagacccgagggagggggctgggttggtgtgggaggtcgtggcagccagagatgagaagacatcatagtttcggggaagccaaggacagctgagctgaaacctccgtaggacttgggcagggacacaggcatttggaggccagtgtgtatgggaagggcaggacagtaaggaaatgcaagtaagaccccaacacacccgcttagagctgacccgagcctcatgctcagcctcttgaggcctcagtttcccaagatcacccaggaaccctgtggtcttgaggttcagagctagacgccctaggtggaggaaggccaggtaccaaccctgccctgggcagttctcacatcacttgtcttcccctcactgcctccgcaggatctgtgtgaggtagggcatcctctctctgccattctcctttattgaagctcatccccctgcagcgttctctccctgttcaatgtccctggcttttccagggaagatggcttagtatggccagcaagcatgtaggcatgacataggtcaaagcgcaaaccctgtcttttctgcttatgggctgtgtgaccctaggcatatccgtcaccctctctgagcccctttcctctgaaaagggtgggtaatgacggtgccctttaaggtatggttgtgctagtgtgctgtgggcgggtgcagacctccaagcctgactggaggggatatccatcatgatcccaggggtctgatttcggattctgtccccagcctcatcgttctcatcgccctcaatgccctcctcttctaccgtctctggtctctggagagaacagcccatacctttgagtcctggcacagcctggcactggccaaggggtaagaggagagagcctgagggtagaatttggggccagggctcaagcacgttaagatggccagggccattctcactctgattcttcatctccacagcaagttcccccagacagccacggagtgggcggagatcttggctctgcagaagcacttccacagcgttgaggtgcacaagtggaggcagatccttcgagcatccgtggagctcctggatgaggtatgcggcagccatgcggggctgtggggccttgggtcaggatgcatcacaaccaaggggttcagtttcctccgtcataaaatgaggaagctagttccggtagctgacctcttagtttgctggggagatccatgggacagaaggaacaagactcatatcctggaaaagcatccttcaggcatggctggatccagccatttggctgtagtaagaatcccctctttctatgctgctagtagcaggttggtttagggagacatgcagaggatagtcctttctgtcactagctgctggggtcacatgtccatccttccccaatccgagtagccgggctgtactaggcttggttccctgcctgccttgggcttaggttggctgatagagtgactctcgcaagggcatttggttctcatctccaaaaagggattgatgaagtcactctgtagagttcaggggacactcaaggtcagactgactgctgtgtgaccttatgtaagtgactgtcatttgggccttggctgcgtcttctgaacttctagagtaatgccatcattcataagctgacagtgcactgacatttgaagtaatgccaagcacactgtaaacacttaatgttcttgctgttggtgagcctcgcccaggcttctaggaggtgctgaataactaccctgtcaccaaatagtgctcctcttagatcccagaggactgcagccagcagctgaggaagaccgaggaaaatgtgtggcactggggtgggtgcctctgatatggaggagaatgagggaaaggctctagctttggtccctgagggcatccctgagggaccgaactgaagaaatttgtggaaattctgtttagtgggccagagggcgtggctcaatggtagggcccctgcctagaatcccccagtgaggggctgggggcgtggctcagtggtagagcccctgcctagaatcccccagtgaggggctgggggtgtggcacattaatgagagcaagagcccttagcatagcagatctgtcctaccaccatccagaagtgacagtcctccagccagctgtgcagcaggaagccctatggattaattgctttctctgtgacataaaggtgaactggtgggtcttcttcctcctgtggcaacactgagcagcgactcaggaaaggcttattttatctcatggcttatcgatgtagtctatcggggtcactgggaaggctctgtccaaaagtagagatgacatagaaacagagagaaaggccaggctataatcatcaaggcccatccttagtctgccagctagacgcatcctggaagtcctacaacctcccttagcccaggagaggattaagtgttcaagtgcatgaggagagtgagggacatttcacagtcaagccaggaaaggaggaagtgtttattaggctcctgatgtgctgaccgtcctggggggtgtcctgggagcatgagaacaggcctcccctcgcaacctaagtagtcagggaggccctgcttcctgaaggggcagcagccttccgctatagtgccatctagtggggaccaatagacacaccaacctgtgggagatggttcagatttaagtagtaagcaggatatggtatgcaggcagcatcctttggttcaaggctaggtacttagtcccccagtgtactacttactcactgtggaccaggctctagcatccctcaaatctctgacaaaactctatgaagctggggtgttaatcaggtgattatattaatcacctgttctccaggcaaggaaacgggcccatagcaatgaaggaatttaccctcacactgttagtaataacaaagtccagatttgaacccggtccacctgaatccaccttgagacgttaccaggtggtgaggcagcatgaccgtgcagaatggcgtggagagtgtgctcatcctacctccctcacctcttccggcagatgaagttctccttggagaagctacatcaaggaattactgtcccggatcctcccctggacactcagccacagcctgatgacagttttccctgaggactcctgattgaaaagccacacccctaaacggacagaaggacacatggaaccctggcagtcactgctggcacagtgcgaatgccgccgggaggttcctgcctgcccctcactgtggccctgccaagagccacacagacctggggaccatagaaccaagatgcactttagatctgtgtgagcgattccagctgccactgcctgctcagccagggagctggcctggtctttggcagactccccctccaactaacttattttgcccagctggagttgtggggggcaccttttggggtgcacaagaaccctctgggtttaatgtatttatttgggaataatgaccccaataaagggttggaaatggctatggcttgtacctgtggggtcctggaagcagatggaggcttcccactaaccctgccgtcatgaaccaggtcctagagtcctgttcctgtcactgaggccagctgtaccttatgcaagcccaaagcaactgccccagtggcctgcatacctagcagccccttagtgggagcacatgaacacgggagagccacattgagaaccgccatcaaagagacttgctctttgggtattgggaattgaatctaaagccttcacttttgctaggcaaacactgtacccactgagtaccactcacaaccaggctttccacatcttgttttatttcttaatttaaaattttatttttatttattttgagtgaggttctactatgacagtctggctgtcctggaactcactatgttgagcaggcatgccttgcacgcacagggatcaacagcctctacctccccagggtatgggctgcctttagccagatttaataattaggtctctaaatcttttctgttgtgagataggttctcactaaacggcctgctggccttaaacttacccagtaaagccctagtagggccttaccttgccctgctcccacctcagccccatgaggagctgggatatcaggcctgcatcaccaggctcagcatttacgtggctcctaacaaggcttggcaaagagtaagtcaactatttaccacaaaagaattggaaaaatagactcatatagggaccatcaaatggggaccaagctgtacatttcattgtgggacaaaatctttttttttggggggggggatacaagacagggtctctgtgtagtcctggctgtcctagaactcacttcccaagctggccttcaaattagagaactgcctgcctctgcctccctaatgcagggattaaaggcgtgtgccaccaagccaggctttgtgacaaaatcttaacaccctcacggccaccactgaagcataattcctctccccctgacatctccagatttaactttttgttttagatttattatttattctttgtgtgtatggatgagtattttgcctgcatgggtgtttgtggaccatgtcctcagaactggatccccctagaactgaagctctttgagtggttgggaaccaccctgtgagtgctggaaaccgaacctgggtcctctgcaagagcagcaaatgctcttaaccactgaaccatctttctagcccctgatgttcacatttatacacaggatgccatccctccccaaaccaggtgcctccccgccaaccatctgtggtactagtagatcccaaccacgccctcctccaaaccctgggctgagagaggtctgtctgggtagaaggacctttggaagggcacatgccaagttgtggagtgggaggattgggtggaagcaggagcaagcaaagggcaaaccctgccctcccgccaccacagctgtgtgattaggctgccacccgtgctgcagctcgctcctcatacctgccaacggggcagaaggacagcaccttggagtaagaagaaatcagttcatcagagtaaaaggctgctctgcctctaccacagcagggctcctcttgtagggctgtgaagaggtgcccctgtgtccattgctaaggtctgtcctctctgcacctcctcctcccagcccccaccagagccacaggagctgggaaagggttattttctgcacaaggaatttcgcggcttggcttaggaggtgctggcgcaaaagcccagaccacaaaggtgtctggtgtccctggctcctggccgctaggtcctggacctgccccacactggggcttcactggggctttatttcatgctgaactggaagctaggacagggccagccaacccctgccaagagtctctctcccaccttggtcctggtggccctttaacgatcctagcagaagttaaggtgctagggacctgtttgggacacaggtcagtgccctcacccagggggtgaggtacacgcaacaaacagacaaatcatataaaagaatacgaacgtggtgtggtggtacatactgaagcaggagaccaccagttagaagtcagcatggtctacatagtgagatcctgtctccaaagttaaacatataggactcactcccccccccccaagttgccctctgaccttcatatgtatgcctcggaattggtgtatggtctcacacatacagagtaagtaaaatataataaaaaccaaaacaaacccccataatgttaggtactgacagctgttctgacaaagtaaataagagccaagatgatgtagtcagtgtggagaaaggcagattactcaaaatgggcacagaaaatactgtgaaggtgacattggagccctgggcttcagcacaatcagcccttccatcacctggggatagtaggcggggtcggggtggggggtgtccaggcagaatggaagtagggcaaaagccctgaagcagtgatgagctggtgtgctgggggtggaggaacggtggacgatggagtgggaggagagctgagaagatgacgtcagagtagcagcgggggatcgcgggaatggcccctttgaaatcccgcacctccgacccccagagctgtgggatgccaaggtacccttttggcttggataaggtctacaggtttctatgtatacctagcttgaccctttcactccgccatgccctcttaggtcctgagatctccagtccgagggatctcaggtgtcataagtaggtctctgggatgtctcagccttatctccccaagaactggataaggttaacctctataattaggaagacggaaattggtccctcaaactgtcctccaagtcctcttgggtgtctagagatgacctttctcagaagaggaagaggaaagggttccgacacccccagagagtctggtgaagccggaatgacctagaccatgcaacgggtgtgcagaagccacgaagccaccggagaggccggtgcccgggcgcctcccgggccgctgcggcaaaggctgggcggccgcgccctccccccgcggtgattcatcccgccccctcccgctccctcctccctcctccgtctccctcctccctcccgggccgccgctgcagtgcgcaggagcccgcggtccgcaccccagcgccgggagcccgagcgcgagcaacgtccggagccaggcaggggtcgccgcagcctggatgcgccctgtggcgcgcgcgcacgcagcatcccgagcctcccgccgcgcggcggggatgcctgctctccgagccccggggctgggcccccggcggtaaccggagcgggggggcgcgcccccccagcagcagctgccgcgcccgcgcccgggccagtcgccgccggggcccatcgcctgtcgccgcgctctgcgcacccaccgccttgcgcggccatggggacgctgctggctctcgtggtgggcgcggcgctgggtgagtgttgctgggggacacgcgccgtcggcgctcgggacgccccccgcccaagtggccggagccgcgccaagtcccggcctgggaagttgtgcggggtgcgaggtcgttggggtcgcgggaccctggacggcacagaaggatcgtggagatgcaagggtttctcgggggggtgtggagggacacttggtacagaggtgccgccgcgggcgccgggccgggggcgaggagacgcggagtcagctgcttgcagagccccgcaggctgcaatgtgacacccacagccgcgtgaggggtgggggaaggcagcgcctgggactggggcccgaaacgaaccgggaggcatggataccgagtgaggactccgggcatgccctggacgtggaggtaaactgagagacagactggggcagacagggacattggagggagagagttaggaaccggagccaggaacagagaaacttgagagcagcagaaagatctggagagaccaggaagggatggagatagagaggcagtcccaggaacagaatgcctgccagatggagtttaaaacaacaacagtaatagtaatggcgagacatacagtggtgggaaaacgacggaatacagccctgctgggatcttcagagacctttaggaggaataaacatgggggagactggagcaaacgggaaggtgaaccagaagccttgaagactaagagatcaggaggttgggggttggggagacaaggaaaagacccagagctaaagttggtgacatgacttatacagttagtgtgtggtgggacacaagaggtggcaggtaagtgggtgaaagagggaccagaggcctctaacccagtggtgaagcaaagaacttttaacttggggtgaaggtcttgaagcgaggaagtgagtctgcggaagaggggacagggcaagatggtgaagatcgggaggggatggattccaacacagaagctaggggaagaaagaaacagagctagagtgaaccccctcacccaaccttcctatctctcaacccacgactggctctgcagacctctttcatggtgggagtgacatttaatgctagagccaccacttagaaggctgttggctttttgaggacctgggcacttcagtggagttactcaccacagtgacatcctctttcccagggcctccagtgtgtgtattctacttagcaactactgggaataaagatgacagattcttccacctaacaggctaggggaaaggcaggtggaaaactgaggctctcaggagatgggtgactcgtcaaggtcacacagggagtgagaagcagggacaggtttggcatccactgttggtaataagggtggagaggaaacagatggtttccgtggggcagcaagcccggtgttgcctcgggtggcaggcgcctcgataaccggagtccactgtgtccgcagtatcctcagcctgggggggctgcgtggaggtggattccgataccgaggctgtgtatgggatgaccttcaaaatcctgtgcatctcctgtaagcgtcgtagtgagaccaccgccgaaaccttcacggagtggaccttccgccagaaggggacagaggaatttgtcaaggtgtgtgggtgcctaggctgggctagcacacaggtatggggtggagccagcagcactgggtctcagggttgtttgtttgcttgggtattgcttttagtgctgttgagaaagggtgttgctaagtagcttggtctggtttctaactcttgtcaatcctcttgcctcggcttcttgagtgctgggattacagacatgcgattggcttgtctgagtgcattgctaatgatgaggatgtgatacgctggatgacctggatttagagcaccacagactgctgaccaccttaggcaaggcacagagcacatgtccccagtgagggggcatggtcgctactccataattttaggtcactacatttatttttagagtatgtgtgtgtgtgtacatgccatggcgtgtgtatggaggttagaagacaagttgaagaagtccattctgtcatttcaccacacgggtcctaaggatcgaagccaggctgccagagtggtggcaagcaccttcacttgctaagccatctcgctggcttcaactccctaggtctgtgtgagggctgaatgagttgatgcagctggcattatggctggtaggggggaaaatgtcaaaaaatgtcactggaattacttggcaccagcaaaaatgtcttggacagccatagagcaaaatcaaagagtagaagcttttttttttttttggttttggttttggttttggtttttggttttttgagacagggttctctgtgtagtcctggctgtcctggaactcactttgagaccaggctggcctcgaactcagaaatccacctgcctctgcctcccgagtgctgggattaaaggcgtgtgccatcacgcccgacgagtagaagcttttgcactgcgtgtatattttgaaacgtgtacatggcaggagagggagactgggcgatgtgaatggaggctgggtaagaagtgtagagaaaggaggctgcggaagtcaggcaggcttcagctgtgaaattgtgtgtatatatgtgtcacaggattagaacagtcagggtctgctgtggtcccaaggcaagatctcaacttctttgatccctcactgtccgaagtcaagatgcctgagcttgggctagggacctggctcagtgaaagagtgcttgcctgaaatccaccagtaagaaactgggggcagggcttagcaatagagcccttgccaaaaattcaacagtaaggagctcaaggctggctcagagtcgagcctactctactctgagtaggttctacagctctactgacctaaaattcctaagtgaggggctagggtgtggctcagtggtagagcccctgcctagaatcccccagtgaggggctggggcgtggctcaggggtagagcccctgcctaagatccttcagtgaggggctggggggtgtggctcaggggtagagcccctgcctaagatccttcagtgagaggctgggggtgtggctcaggggtagagcccctgcctagaatcccccagtgaggggctggggcgtggctcagtggtagaccccctgcctaaaagcccccagtgaggggctggggcgtggctcagtggtagagcacccagtaaggggatgggggtgtggctcaatagcaaggcacctgcctcacatgtacaaagattacaatgccagaaccacacacacacacacacatacaacctaaaaaaacaaaacaaaaaagcaaaaagaaaacctcaaaagacgttgatcccatatatgcctcatctgtccttggggggatcaggatggggaacaggttgggaatggcatatggaagacaggcccagagggtgactcatctgccccactcatcactcaccaccctaagatcctacgctatgagaatgaggtgctgcagctggaggaagatgagcgctttgagggccgagtggtgtggaacggtagtcggggcaccaaggacctgcaggacctgtccatcttcatcaccaacgtcacctacaaccactctggcgactacgaatgtcacgtctaccgtctcctcttctttgataattatgagcacaacaccagcgtcgtcaagaagatccacctggaggtggtggacaagggtgagtcgagccttgtcactccctggcaagccagatggagggacagatggaaagtaggggacaggttggtgccacacagaggccagctaacaccctgcagccacagggagaaggacaccccttttctggctctggagtcttcagcccacaggaggttagattaggcctttcccctgacaaatggtatgtgcatcagaccacactcatgctgtgtgacctctgacaggtgtattcctatctctgagccccaagcttgtccccagggaccagagagaatattctctatggcttgattctccattctctctgctggggccccataggggagaggctggaggccttatttggggcacagcaggaatagcaaaggcctctggtgtttctgagcagagccagcattttgttttcagctgccttgggcctcttcaccaaaccatttttttttatatgtgtgtaaattcaaaatgccctgtttctttttttttttttttaattttttttattacgtattttcctcaattacatttccaatgctatcccaaaagtccccacacaccccccccactcccctacccacccattcccattttttggccctggcattcccctgtactggggcatataaagtttgcctgaccaatgggcctctctttccagtgatggccatcttttgatacatatgcagctagagtcaagagctccggggtactggttagttcataatgttgcacctacagggttgcagatctcgaaagtattcaccaaaccattttattgttttagtttttgaagcctgctttgtagcccaggctaacctccaactcttctttttttttgaataggtatatcctaaactttttaaaaatagatatatcttaaacgtcttctttaaaaaaaaaagatgtatttatttaatgtatatgagtgctctatctgcacatgccagaaatgggcatcagatcatattacagtgattgtgagccaccatgcggttgctggagtagaactcaggacctctggaagagcagttagtactcttaactgataagccatctctccagcccctagccttcaactcttgatattgatattgatattgatattgatattgatattgatattgatatttgggaagcctcagcttcccaaatgctgggactacagacatgtctcactatcacatgaggatagatcaccttctgatcaacatgtattggaattttccagagtcctatgtcctattgtcttagaaagtcagggagctattccaagcctggaggcagcgaagaactctgggaagtgggcccctgggggccggtagcagtgagcatcttcccagatctggcacctttacctctggcttcttaaaaagcccccgttggaccctcccaccagcatctaagggaggagcctcaccacccccattttatggacccaaaggcaaagtctcagggaatttagctcctgtgaccaagtcacctgactgggtcctggatttgaacccagccctgcctgggctaacgctccctccccaatctgtttctctagtgcgtcagccagagcctgtgggattctttttataattagcttttttatgtttctcatcaaaatggcacagaaggcaagtcagaggcacattcagggacatcaccacgctgcgtgtgtggtgggaggtggccacagaaagtgaagttttgcctgggtggacaggggtccacggagctaaggccacctcgataccaggcctcacacacccctgcttgtgagaaaaaaagctggagaacacagtcagtctctgtctcatgggggccctcactcagggcaggcctgtgtgcagagcagagatgccagctcagacctccctccgtgactgtaaagcctgcctttgatccacgttctctgccctgttctaactcttagagcctgcacaggcgactgcgctcagagcacagagagccttttcttttgagctcatgtttccagaagagtctcgccttttctactgctatatcataatactgcttctttacattctgtatgatgttttcatttattttgtgtgtgtgtgccatgggggcacatggcacgcacacacgcagtggtgcacatgtggagtcactggtaggagtcagttcttcttccccgtgtgaagcttggggagcaaactcaggttgtcagactcggcagccagtgccttaacctgctgagccatctcagtggcaatatcatatcatatcatatcatatcatatcatatcatatcatatcatacataccataccataccataccatatcataccataccataccataccataccataccataccataccacatcacatcacatcatatcatattctggtatttattttcttacttatgtgttcattttgaggcatgttctctactatctagctcaggctaacctcaaattcacattcctgatcaaacaagttcttctgcctcagcctcctgagtgctggaattataactgtgagctaccacacctgaaaggctagtgtttattgttttgttttctcagagacagagtttctccatgcagccctggctgccctgaaattctctctgtagaccaggctggcctccaactcagaggtccacctgcctctgcctccctagtgctgggactaaaggcatgtgacaccatgcccagctggccatgttttttgtttgttttgttttgttttgttctgttctgtttttatgttttatttttattcctgttttggggggctttcaaagacagggtgtaatgctcttcgggctaatgtacaacttgctatgtggccaaggatgcccttgaactccc

SEQ ID NO: 1907 - DNA, 2737 bp, Mus musculus
gcctccggcggctccggccttttgtgcgggtggcagggtccggtggaggcggcggccgaggcaggcgaggcccgggaggcccatctcagagcagccggccgggtcctgccctgcagccggggcgccgcatccatgttcgacaccacgccccactctggccggagctcccccagcagctccccgtctcttcgtaagcggcttcagctcttgcccccaatccggccccctccggcttctgagtcagaaccaggcaccatggtggagaaggggtctgacagctcctctgagaaaagtggcgtgtcggggacactcagcacccagagcctgggcagccggaacttcatccgcaacagtaagaagatgcagagctggtacagtatgctgtgtcccacatacaaacaacgcaacgaggacttccggaaactgttcagcaaacttcctgaagcagagcgcctcatcgtggattactcctgcgccctgcagagggagatcctcctccagggccgcctctacctctctgagaactggatctgtttctacagcaacatcttccgctgggagaccacaatttccatccagttgaaggaagtgacctgtctgaagaaggagaagacggctaagctcatccccaatgccattcagatctgtactgagagtgagaagcatttcttcacttccttcggggcccgagaccgctgcttcctcctcatcttccgtctctggcagaacgcgctgcttgaaaagacactgagtcctcgagagctttggcacctggtccatcagtgctatggctcggagctgggcctcaccagtgaagacgaagactatgtctgccccttgcaactgaatggtcttgggagtcccaaagaggtgggagacgtgatcgcactcagcgacatcagtccctcgggggcggctgaccacagccaggagccaagccctgtgggttcaagacgtggccgggtcaccccaaacctctctcgagccagcagtgatgcagaccatggggccgaggaggacaaggaagaacagacggacggtctggatgcctcctccagccagacagtgaccccagtagcagaaccgctgagttctgagccgacaccaccagatgggcccacttcctccttgggtcccttggatctgctgtctagagaggaactattgacagacacgagtaactcgtcctcatccactggggaggaaggtgacctggctgcactgctgcctgacctctccggccggctcctcatcaactccgtcttccacatgggtgctgagcgtctgcagcagatgctcttctcggactctccgttcctgcaaggcttcctgcagcagcgcaagttcacagatgtgaccttgagcccttggagcagtgacagcaagtgccaccagcgcagagtcctgacctacaccatccccattagcaaccagctaggccccaagagcgcctctgtggtggagacacagacgctgttccggcgcggcccacaggcgggcgggtgcgtggtggactctgaggtgctcacccagggcatcccgtaccaggactacttctacactgcccaccgatactgtatcctgggtctggcccggaacaaggcccggcttcggtgatcccgagtgtgccctatctctacctcacctcagtggtcagggctgcctccacccagcattggaagagtgtatcctcagagatccgctaccgaaagcaaccgtggagcctcgtaaagtcgctcattgagaagaactcgtggagcggcatcgaagattatttccaccacctggatcgagaactcgccaaggcagaaaagctgtccctggaggaaggagggaaagatacacgtggactactgtcaggcctgcggaggaggaagcggcccctgagctggagggggcacagagatgggcctcagcacccagacccagacccctgcacccagaccagcatgcacacctcaggttccctcagctctcgcttctcggaaccatctgtggatcagggccccggggcaggcatccccagcgccctggttctcatcagcattgtcctcatcgttctcatcgccctcaatgccctcctcttctaccgtctctggtctctggagagaacagcccatacctttgagtcctggcacagcctggcactggccaagggcaagttcccccagacagccacggagtgggcggagatcttggctctgcagaagcacttccacagcgttgaggtgcacaagtggaggcagatccttcgagcatccgtggagctcctggatgagatgaagttctccttggagaagctacatcaaggaattactgtcccggatcctcccctggacactcagccacagcctgatgacagttttccctgaggactcctgattgaaaagccacacccctaaacggacagaaggacacatggaaccctggcagtcactgctggcacagtgcgaatgccgccgggaggttcctgcctgcccctcactgtggccctgccaagagccacacagacctggggaccatagaaccaagatgcactttagatctgtgtgagcgattccagctgccactgcctgctcagccagggagctggcctggtctttggcagactccccctccaactaacttattttgcccagctggagttgtggggggcaccttttggggtgcacaagaaccctctgggtttaatgtatttatttgggaataatgaccccaataaagggttggaaatggc

SEQ ID NO: 1908 - protein, 538 aa, Mus musculus
ASGGSGLLCGWQGPVEAAAEAGEAREAHLRAAGRVLPCSRGAASMFDTTPHSGRSSPSSSPSLRKRLQLLPPIRPPPASESEPGTMVEKGSDSSSEKSGVSGTLSTQSLGSRNFIRNSKKMQSWYSMLCPTYKQRNEDFRKLFSKLPEAERLIVDYSCALQREILLQGRLYLSENWICFYSNIFRWETTISIQLKEVTCLKKEKTAKLIPNAIQICTESEKHFFTSFGARDRCFLLIFRLWQNALLEKTLSPRELWHLVHQCYGSELGLTSEDEDYVCPLQLNGLGSPKEVGDVIALSDISPSGAADHSQEPSPVGSRRGRVTPNLSRASSDADHGAEEDKEEQTDGLDASSSQTVTPVAEPLSSEPTPPDGPTSSLGPLDLLSREELLTDTSNSSSSTGEEGDLAALLPDLSGRLLINSVFHMGAERLQQMLFSDSPFLQGFLQQRKFTDVTLSPWSSDSKCHQRRVLTYTIPISNQLGPKSASVVETQTLFRRGPQAGGCVVDSEVLTQGIPYQDYFYTAHRYCILGLARNKARLR

SEQ ID NO: 1909 - DNA, 46138 bp, Homo sapiens
  misc_feature (1)...(46138): n = A, C, G or T/U
gaggaaaggaacccttgggaggcccaaactttaatgctctggttcataaaatgcaaaaaaaaaaaaaaatccattctcatccctcctgtcctgttattgtcaagatgctagctccttggacaattcaggatacaccaagctttctccccggatagccgcaagtttaagggcaggaaatggccttggactgggtgcctttgctgagagaacagcagcactttgatccaagatgtccaaaagacaaagcagaagttcatgagaaacagaggccccagcatcacttggggtggcggggagggacctgtgcagcttgcgccatggacacctcgttagtgcataggagtgcatcagttttacagaaacggggctccatctagcccaaagggagaacgcccaggctgtgatcaaaggattgagggtaggacatcaaaggttagggactttcccgagtggaaaatatgggaagggattgggtcaaaaccttacagagaatgtgggcgagatttggtaagacgtcaaaacttaaccagacccaagtgggcatatttaggggaaaaccagaagtcatagttcattggaaacagacagatacggtcaacaaatcttcatgtatctggggagtgcaaatatcacgttattccttattgtgtgtcagaaatacgcaagcccacactgtgttgagtacctgcgtgggagtgggagatgttcaggcctgcacacgacctatctgtgcctcagctcttcttgtggaaaagtgctatagaaacagcacaagatctggaccatccaactcaccaacccaccccagctggaattcagtaggcagtcccctgaccctgttattcctctgaatatgagaaaggcagagataacagaataggagggcgatggtttcaatccacagggctctttggatgagaaaacatgggggtgttgttaggtagccctggtctgcttgatatttcatttctggccaggcgcagtggcacatgcctgtaatcctggcactttgggaggctgaggcaggtggatcacttgaggtcaggagttcgagagtagcctggccaacatggtgaaaccccacctctgccaaaaatacaaaaattagctatgtatggtggtgcacgcctgtaatcccagctacttgggaggctgagacaggaaaatcacttgaacccacgaggcagaggctgcagtgagctgagattgcgccactgtgacaggcgtgggccatagcacagagcctggtaaccaccattctattctctgtttctatgtatttgagtttttttcaggttccacatataaatgagatcatgcagtatttgtccttctgtgtctggcttagttcacttagcataacatcctccagattcatccaaatggcagggtctcctcctttttgaaggctgtatagtattctgttgtattgtataccaagtacctttatctattcatcactgatggacacttaaggtgtttctatgtcttggctacggtgaataatgccacaatgaacctagtccaaaatgggaagtcctcaaatatccatcaatgttaaatcattaagtaaatagtggtatttattcacaatttatttcataggtggaatgctacacaatggtaaaaatgaacaaagtttagccatacacaataaggcggatgattcacaaccacaatggtaaatcagaacagctgggccgggcacagtggctcacaccagtaatctttgggaggctgaggtgggaggattgcttgagcccaggagttcgagaccagcctgggcaacatagcaagaccctgtctttttaaaaaatacaaaaattaggcagatgtagaagcacaccaggtacttgagaggcttaggtcggaggattgcttgagtgcaggagttcgaggctgcagtgagctgtgatggtgccactgcactcaggcctgagcaacagggcaaaaccctgtttcaaaaaacaaaaaaggaagaagaagaaacctaaacaaaagaattctaagtgtatcgttctatttgtatgatgttcagaaactggcaaaacgagagcttttgggaatacgcactcaagtagtaaaactctaaagaaaagcaaaggggctgggcgtagtggctgatgcctgtaatctcagcactttgggaggccaaggcgggtggatcccttgaggcaggagttcgagaccagcctggccaacatggtgaaaccccgcctctactaaaaatacaaaaattagcggggcgtggtggcacgcacctgtaatctcagctactcaggaggctgaggcaggagaatcacttgaacctgggagatggaggttgcagtgagccgagattgtgccactgcactccaacctgggtgacagagctagactctgcccacccactcccgaaaaaaagcaaaggaagggaagagggcagtgcttgtcttcaggaggaagagggtttggtgggaagacacttgtggtgtctaggggtgctgaccgcatgctttttcttgatctcagtagcggttgcaaggtgtatactttataattacatattaagctgtgcattcatattttagtcccttttctgcgtgtatcatctgtcataaaaaggttttaaaaaacatgaagcaacaaagaaaaaattgctgatggacacttatgtgtcttcacacaagatatgaaagaactttacaagaaaaacttaaaaaaagaaatagagatgggatctcaccatcttgcccaggctggtctcgaactcctgggctcaagcagtcctccgacctcagcctcccaaagtcctaggattacaggtgtgaaccacagtgaccggcacccccaccaaaaaaaaacaaaaaccctttattttaaaaaatgcctaaatgaggccgtgcgcggtggctcacgcctgtaatcccagcactttgggaggctgaagcatgcagatcatgaggtcaggagaccgagaccatcctggctaacatggtgaaaccccatctctactaaaaatacaaaaaattagctgggtgtgatggtgggcgcctgtagtcccagctactcaggaggctgaggcaggaggattgcttgagtccaggagttggaggctacaatgagtatgacggcagcctgggatagtgcaaccctgtctctaataaataataaaattaaataaaaaaataaaaatgtaagggaatgataaccatcaaacaaagggcaacggagacttctgaaaggaagacaaaagtggaatggggaggggcccaaggcagtcacagggtactccctggtaatgtgctgattctcaaactgagttggtggatggagttagggggtcgttttattgttctacaccccatatcttataacattttactgttatacattataacccacatctacgggtatatgtcaattctcatataataaaactggcacagtggctcatgcctgcaatcccaccacttttggaggccgaggtgggaggatcacttgaggtcaggagtttgggaccagcctggccaacatggtgaaaccccgtttctactaaaaaaattagccaggcatggtgatgcatgcctgtaattccagctacttgggaggctgaagccagagaattgcttgaacctgggcagtagaggttgcagtgaactgagatcgtgacattgcactccagccgggcaacagagcgagagtccatcccagaaaaaaacaaaacaaaacaaaaaaccaaaaaaaactggaaaagtaagagaaaagttcccagacctcagccttggggaatactaccagctttcacggaccagggagaggggcaggagttgtgcacgaaacgagatggagctgcatgaggtgggagaagaggaaaccgtgacatcgcagcggccaagggagccttccaggaggaagaagcgtctcccagggtcagggcttctaagagcagttggggaagacgaggactggaatttggatttggccacctgggggtgttttctgaacttggaggagcattcttgtgcccctacgatgcttgcagcagctaaggactccagacctgcagagtctgtcctgagacaggtcagacctcggcggtgggacgggaaaggggaactctctgtctagagacttgcgctccgatgtagttggaggtgctacactgtggctggccacagaccaacacgagcaatggaccacgagaggcctggggtagttagcctttccttcctgtgcagccaagaacggaaggatgagaggggttctttctgcctcctccttggcatgagcacctccacctccatgcccactctgtcctttctcccaggagcagctggccggagagtaacacgactccagccggacatggtcatgactatttcagcctgcaaggtcatgactctctggcccacctaggactcctaggggaaaggaagtgcctggtctaccgcccttcccctgcaagtctgaatgctgtgtggacagaggaggaggacccaataaggtaggggtattggagtactcgggtgcctgggaagatccaagcccggcctatagggtcaaggtcttttccaaaacaggggaaaccctttctggttcccgaaggtcctcccttccctattcgctgaacaggtgggtgccaagaagcccctgtcttgaggacagagagactgcggtctggcctccccagacccaggcagcctctaacatcacagccacagagcagaaactggcctggcttcctcccaggcccagaaggccccagctggccacctccctttgtttgtcttgggaggggcaactgctaagcaaacagggaaggggaatcccgattcggcctctctgtctgtccggctagccgttacccaggcccgggctctggtgcccactgaggcctggctccttcctgaccctttgtgtggaagggacacagggcaggagtgggtacagagaacacccagggctttccgaaaaaaatagcccaggcctcccacagatgagagaggagctatgtggttcggtaaacctcagttccagctacaggcaaatgggattaactgagcacttactgtgttggggccctggcctagccccatgcatgccagagccctccagatactgcctggccaccctgcagggtcctatcagatctcgagtctccaaaagaggaaacaggcttggggtcataagggaatgaggttagcaggggtggtaatcccacccagatctctctgactctcagatcacggttttttttttttttttttttttttttctgagacagggtctcgctctgttgcccaggctggagtgcaatggcacaatcatagctcactgcagcctcaaattccgggattctcatgtgatcctaccgcctcagcctcccgagtagccagggctatagggacgtgccaccatgcctagctaatttttaactttttgtagagataaggtcttgctatgctgcccagactggtctcaaactcctggcttcaagtgatccttctgcctcagcctcccagagagctgggattacaagcatgagccactgcgcctggtccccaactgtgctcttaatcatagctcatttctcttagtggagccacgggggaaggtggtaagggggcttaagcgggagctctatccctcatctcttttttctctttcccagagaccacaccgctgttccagaccctctccatggatgatgtcctgcccctgatgccttgggagaccctgttggcacagggcagtccccagggctcgcctgacctcccagcagggcagcggaagcagcagccacagggtgacagggcccagggcctggcctctgagtcctggaagctcctggaggtgcccatcattcacataacgccatccagtgatggggagtcccccgcctgcaccccaaccccccgacgccggcagcagcagaggatgccagacccgcagagtctgtcccaggacaggtcagacctgggcagtgggacaggaaagagggtctctctgtctagggagggttctctctgtcaagggtgggttccttgtggctgcgggtcagagcacaaccttagccccacagagggctgactcaaagccacgaaacagatgcacaaacaaaaggtaaaaactgagggtgtgcgttgggacaaccagctatgactgagctcagctgagttctgcctagtaagagtggaggggaagccgggcgtggtggctcacgcctgtaatcccagcactttgggaggccgaagctggtggatcacctgaggtcgacagttcaagaccagcctggccaacatggtaaaaccccatcttgactaaaaacacaaaattagccagcgatggtgatggatgcctgtaatccaagctattcaggaggctggggcaggcggtttgcttgaacctggtaggcggaggttgcagtgagccgagattgcgccactgctccagcctgggcgtcagagcaagactctgtctcaaaaaaaaaaaaaaaaaagagtggatgggtggagagggaccccacccagtgtttttcaaactgtaggtcaagacccatttaagggccataaaactaatacagtgaattgcaatcagcccttgttttttgttttttgtctttttctttttgagacagcatctctctgtcacccaggctgaagtgcagtggcatgatcttggctcactgcaacttccattgctcccccctccacccagcagctgggaccacagatgtgcaccaccacacctgtctattttttttgtatttttagtagagacgaggtctgaccatgttgcccaggctggtcttgaactcctgagctcaggtgatgcaccctcctcggcctcccaaagtgctgggattgtgagatgaggcacccggccgcaatcagcacttctttatccaaatcaaaataaaatagaattgcaaataacaccatgcgtgaggcctaatgagggtaagtgtggtttcttacaacttctgtggcattatgtgtatttctaagtgcgtgctggaagcccatgtgaaaggtatttcctgctgtagatcacaggccaaaaaaacaaaaaaaaaaaaaaaagaagaagaagaaaaacaaagaaaaaaagaaagtttaaacaaaacttctgaaaagaaacactatctctggtacaaggagacaggaaatgggaggttcagggccatagggggaagaggaaagaactctaccgaccctgaatagaacaagcagccactgtggtttcttccaacaagggacactccataagcgttaaagtttaggaagcagagctttgtgcatggatgtggagaaatcgcagaaacaatgataatgggggacagcaagttgcaaatgaaacagagggagcctaatcgtgtatctttttaaaaagatactggataataggtgatagtgttggtggatgcctcctgatgtagaaaaaggacagaaaagtacacagggtccaggcgtgctggctcatgcctgtaatcccagcactttgggaggccgaggcgggcagattaacctgagatcaggagttcaagaccatcctgaccaacacagtgaaaccccatctctactaaaaatacaaaaattagccaggcatggtggcgcatgcctgtaatcccagctattcaggaagttggggcaagagaatcgcttgaaccgaggaggtggaggctgcagtgagccaagatcgagccactgcaccactccagcctgagcgacagagcaagaccttgtctcaaaaaaaaaaaaaaaaaaaagcgcaggaaggaaacacaccaactgcatggcaggcagaaggctccttggggggcacgggaagggaaaggagggatggggagccaggcctttggttgtaagtgtaatcatttatttcttttaaaaaaaggacctgaagcaaaatggcaaaatgtccacatctattctatataggtacaggggacatagaggactgttatattttcttcctttttttttttttttttttttttgagatggagtcttgctctgttgtccaggctggagcgcagtggtgcgatcctggctcactgcaacttccacctcccgggttcaagcaattctcctgcctcagcttcctgggtagctgggattacaggtgcaagccactacacctggctaatttttttgtatttttgatagagatggggtttcactctgttggccaggctggtctcgaactcctgataggtgatccaccctccttggcctcccaaagtgctgggattacaggcgtgacccaacgcgcctgacctgaaataaatattatttaattaaaaaactaaaagcattacactagaagaaacagaccaaagagaaatctaaagagatcagttggacagaggaaggtggtgggaggagggcctctcttccattggccggtgggaggcagcaaatgtcagatggtggatgggggttttagaggtgggggttagcatgagaggtagggcacggcgatagggggggtgctgtccatgcagagggaataaccagtgcaaaggtcttggggtaggaggcaggaaggtgcctggtgagttagaagaacagcgggtaggctggatggggggtgtgagccagggggagatgaggagctgaagtcagagagctgacaggggccttgggtgccaaggtgaggactttgcttttacctggagtgaggtacagctggggcagggctctgagccaggagggtagttaactgactcaggtggtcccaggctctctctggctgcaggtgagaacagacagtaggggcagggatgggagcagggagatcaggcaggagaggatggaggctgggccagggcgtgggcagcggaggaagaagagtttagaatggagcgattgattttatacgtggagcccacagtttgtgacggattggatgtggtgtgaaggaaaagagagggtcagaaaagactctgaagttctgggcctgccattcatcaaaatggagaagtcaggtgggcttcttttgcaggaggaggggaagggttgatggagagggttgggaagggagttttttcaaaagaggcggggacagcgtaccctggagagcgctggggagccacagccccggagctgtgaggtgggactcgcatttctgtgtggttgggccaggagtccaggacaccacctgactctgacctcttgcagacggggcgggggaggggggacgcaggttatggcgtcagagcaggatcgaatccaactctgccgcctacctaccaggtgaccccaacaagtcacttcccatcttagaggccgggcttctccttccgtaaaaggactgattttgcccgttcctgcgctgtccccgggaaaagcccttaccaccgagttagtgggactcccagcactggggtgatgagcgcaaggtctcagcacagataagagccagggaggctggattctgacttggtacttggcctggctgaccaaaactgggaagtccctagaaacggaggcaccggacctcctgggaccaggaacccgggctcagagactgggagagggaaggaggaggcggccaaccggccccaccccttcccgccagcttcaggccccctcccccatacatacacctcggtttcccagcatctccagtcctcccccaccttcgccccggctctcaggttcctccctgggaggtccaggagcttctggccaggggcatagtagttgctagggacccttttctaggtactaggggagggggctccccaacctgcgggcaggcagctgcctccacgatgtttggttttaataaagtctctttgtttccttctctgtctctctgcccctctgctttcccttctctgtccagtccctctctccccggcttctccctccttctaggcctctgcggcccctccccgccttccctcccgggctgggggcggcgccgtgacgcggcggggcgggggaaggaagggggtgtcgctgacgccgcggcggcctccggcggctccggccttttgtgcgggcggttgggtcgggtgggggcggcggccgcggaaggccaggccggtgccctgcggggacgcccagcgcagcccagccccgcgcagcccagccctgccctgccctgccctgccctgccctgcgcccggggcgcgcccaccgcgccgcatccatgttcgagtaaggaccgggcgactagagctcagggaccgggcgcgcgggggaggccaccggagggagggggcgccgcgggcttggggagggggcggagcggcgctgcagaggtcgggggcctctgcacatggctctggccggggcgatcggggtgggggcggggcagggggcccccgggcgaggggtgcagctggggagtggggcgcggacgcagggcagggcccggggtctgggtcgccactgccggcccgcgacgcactgggttgcggggttggctgggggcccgcgggttcatctggcggggagggccctcaggcctggcaaccccctgcctggtaagccagggtgagcgcgaggccgaactggggctccggcctgggatggagacaggatcgggaccagcccaggcccacaggccgcggagccctgggcgcgccgggagtaggcagccccctcctgcctgggccccctcccaccgtccttggctgttgcgggtctcggggctgccgggggtgggggcttcctgcgtctctccaggaccgcgtgcttgaggtcatggagggcggggggtcctgtgtgctcggaattgacttcttactccccttccggtccaggtgggcgcatgtgcttccgactgtgaattgtcttgcaagtgtgtgtacgtgtgtctggggctgctagcctgcagcagctttgggcctctgatagagttcctgcgtgtaacttaaccactaattctgaccgcggctctgtgtgtcactgtaagttacctgtgtgtgtctggggctccaaatctgtggctgtgagcagctggttgtgtgcgtgttgtgtctcattccatctgtagctccctgtgcaaatataaattacccctgtgtgtctgagtgtgacgttggagtgtttgtacatgtgtctggagttaccgtgtgtagcagctctgatccttcttgggctgtgtgtgttttaccattaattctatctgtagctccaagcgttgctgtaagttaccagtgtgcgtcccattgtgacttagtggtgtgtgtacaagtgtgcctggggctctgggttctaccatgaccctctgtgcctgcatatgcctgtaatttagctctgaaacgctcttctttttttttttttcttttgaaatagagtctggctctgtcgcccaggctagagtgcagtggcacgatctcggcccactgcaacctcctcctgctgggttcaagcaattctcctgcctcagcctcctgagtagctgggattacaggcgtgtgccaccacgcctggctaagttttgtatttttagtagagatggggtttcaccatgttggccaggctgatctcgaactcctgacctcaggtgatccacccacctcggcctcccaaagtgctgggattacaggcttaagccatcgcgcctggcttgaaactctcatttagctctgtgtgccaatgtaagttacatttgtgacattgttgtgtgtctggggctctgtgagtgtggctgtaacttaatttgattccatctttgtgtgaacattcccttgtgtattcctttgtgacagtattgagtggtgcctaggcctctctgtgtacagctgagaccctctgtggttttgtgtgtgtgtgaacagtgtgagaccccttgtggctctctgtaggcttggaaccctcccttctaagaccctgggagtacccagggcactttggaggcaataatgataactgacgttgtccacctgttacagttagtatagcatgtgccacgcattattccactacctggccactgtgtcctcgagatccacgccctgctcggctgcattattcccaagtcctgcttgactgtgagcatcagggctctccaccagctacagccactgacacctccaccccttgccactttactttttcttttcctttttctctttcttttagacgcagtctcgctctgtcgcccaggctggactgcagtggcacgatctcggctcactgcaacctctgcctcctgggttcaagcgattcttctgcctcagcctccctagtagctgggattacaggtgcgtgccaccacacctggctaatttttgtatttttagtagagatggggtttcaccatgttggccaggctggtctcaaactcctaacctcaggtgatccacccgcctcggcctcccaaagtgctgggattacaggcatcagccactgcgcccagccccttgccactttagaagtagccttttctctgtcttccctgccagatggtgagcccagtgcgggcacgggaacaactcagtggggatgtgttggctgaccgtgggacctgatttacctgggactatgtatgtgtcacctggggtcttttgggactggtctttcactgtatggctgtctttggctctttgctgagacttcctcgtggctatgtgtgtgaatataatttatccgggactttctgtgggttgctgtatgtttctgtgaccctctgcagctctgtgtctgtgtgcacacatgcatgtgtctggataacttttctgggaaattgccatgtgactgtagcagactagcaatgctgcaggtgtgtgtgtgtgtgtgtgtgtgtgtgtgtgtaattactctgtggctctctgtagcatacctatgatgctgttgctctgtgcgtgtgtgtgtgtgtgtgtgtgtgtgtgtgtgtgtgtgcatatgagagagagagagaggaaagagactccttgcaattgtagggaaatgcagtttacccctgacacctactgtgtgacaatcattgagtttcccttttatgcacacctgtggatgcatccgcccttttctgaccagaggctgctctgggtccactggggcctaggaagttggaggtcaggtgtctgcggaagcaaaacaacatcccttccgagtctcctcgcccctataacagtcccccaggctcctcccttcactctgccttcagctatcctggttgggcagccgcagggtccgcccttgagtacttcctctttgcccagccctggagcaaaaactgggggcgtggtccctgccctgtctgtgtgccttgagcctctcttcaggattccggcccccaggccctgcccctagatctgtggctgcgggaaagtagggcaggtctgtgtttcaggctagagggctgagaaaagcaggcaggggaggatgtggtcctgctgcttaggagtctctccctgctcaccagtgctgtctgggtgaagccaaactcctgactagggtcaccaggcctgtgcacctccgctactccctcagccccactggccacctcactcacactcagacctgccaggctcagtcctgtccctgagcttgatgttctccacctggagtcttctcccagcctttgccacatgtgttctttgtcctcaggtgaacaagtgggctttgttcaggaaggcttttgctgactgttactaaagaaattggttgggcacagtggctcatgcctgtaatcccagcactttgggaggccaaggtgggaggatcacttgaggtcaggagtttgagaccagcctgggcaacatagcaagaccccatcactacaaaaaaactttaaaaatcagctaggcatggtggtgtgagactgtagtcccagctatcagggaagctaaggctggaggatcgcttgagcccaagagttcgggcctggagtgacctgggaggctgaggattgagaattccttgagcccaggagttcggagctgccgttaaccatgattttgccactgtactgcagcctgggtgacagagtgtgaccgtgtctctaaaaaaaatttaaaaagcatctctgcccccctagttgtcccatcccttatctctgtggtcctcaaacttgaatgtgcgtcggaatctctggccccaccccagttctgattcagaaggttgggagtgggtcctggactctgccttttgaacactttccaagtcctgcctgctgctctctggggctcatactgagcagcattgctttatggcgttcaccagtgtctgaggtcgccatccctgctcacttgttttcttactgacggtctatgtttccctgtttcagcgtcaggtccttgcaggcaggggcttgtatgggctttgctcacttccttgtggcgggtgcagggtatttagaggtgaaaggctggagttgagggtcagtcatggaggcgcctaacatcaggcgtagtgcttgtgaggtccctgtcagggtcagcagagcgtcatgggcagtggtgcactgggctggcagccgcgctgtacactccatcttagtccgccagtccctgtgggagggaaagcagcgtagttaaaccaggtgccctccaggtactgggctttgtggatctcacctcacctccatctctgtgcaaccctaggaggtgggcactaattcccatcatacccaagaggaaactgaggcacaggagggttcagacactagctcagggtcacacagaaaggacgcggtggcacttgactggaaggtccttggactgtggggcccacactccaggctgctgccctggagacctgcagggtccaaggagtcgtgcacctgctggaacccaagttctatggggggcggggaaggagggccgatcacccaggccatccccaacagtatgtgctcacggagcacctcctgtacgccaggccctgctctaggtgatggggacactcaacatcgtgggtgggggttgggggtggggagagaaggataagaactagggggaaatactgaaggtcccgggaggcagcagggagacttgctttgcagaaagagagcagggagggggatcgggagggcggggtagggggtgttaaatagggaggtagggaaggtgtccactgagcagagacctgagggaggtgggggagccctgtggatgtggatgtggatgtctgggaggaagggcattttgagcagaggcaccgaccaaggcgggagctgggagagggagtgcagggctgatgagggcagagagggaccacccaggaggaccctgatggactcagatgatcccaggctccctcccactacaggtatgggcagggatgggaacagggagaccagggaggaggctgctgggatggcccaggggaaaagcagtggcctgggccactggctgtttaattattttattcacgtattttattccacaaatttattttacaagtgttacatgagtgcctaccctgcatcctgtcccgcattgtgctggggacagagcagtgacccacagacccgtgaaggacttggacctgtcatcagacagtgacggcccagagtagtccaggatgggagctgcccaggggactgtggggtcacgcatgagccaaagtcctgaaggacaaataaggatttgctaggcaaagaagaactacgatctggacagacagaatggcatatgttaaggcttggaggtaagagagacaactttgagttgccccaggtggtggagggaatcccacctgcaccccagaatacatcaaggcccctaaatgggaatcctgccttgaaataaaccaagcccatggccaggtgcagtggctcacagctgtaatctcctagcactttgggatgctgaggcaggtggattgcctgagctcaggagttcgagaccagcaacgtggtggaaccctgtctctactaaaatacaaaaaattagctgggcatggtggtgggtgcctgtaatcccagctactgcggaggctgaggcaggagaatcacttgaacctgggaggcgcaggttgcactgagctgagatagtgccactgcactccagcctgggtgacagcgcgactctttgtctccaaaaaataaagaaaaaagaaagaaaccaggcccgtatcctatggcaagtggtttgccgctttgagctagtttcctcctctgtaaagcagggatggtgaatcatatcaaaggcaccggcttgagaaataatacggttaatcatacggagagcttgacatatttcctgataaggagtcaacaaagaatgtccttttaaagttcccaacgccatccccacagtccttattacagttcgtgtttgcacagtgaagttgggagtgtcctgtttgttcagtgtctgcctccccaccagaaggctcattccccaagggcaggggccatgtcctgcgggctctactgatgccagctccagccagcgtgcagattattcatttagcctctggtggttattgagcattcactatgtgcctagagttttgggctctagggacccggtggtaaccaagacctgaaggtcacagtctgggtagacagtaaacaaacagtaaacaagcaggacactccagatagcctggggtgtggcgacagaggtgcctgccttaggctggatgatgcggaaggagagcatttgagctgaaggggacagagctggtgatgccggggccatggaaggacattcaggcggagggactacaaatgtggaggccttggcgtgggaatgagattggagagcttagggacaaaagcaggctgggatggccaggggagaggaaggacagggagagggaggacatgaggtcagtgaggttccagggccaaatcaccacaccaaggtgaggtctttgcttttacctggagtgaggtgcacccagggcagggctcagacctgactcagatggtcacaggtctcctctggttgtaggacaccagtgaagaggctgctggggtgtccaggctggaggtgatggaggctggagcagggagaaatgggtataataaaaataacggatgctgggtgcggtggctcacgcctgtaatcccagaattttgggaggccgaggtgggcggataacctgaggtcaggaaggagttcaagaccagcctggccaacatggtgaaaccctgtctctacaaaaaatgcaaaaattagcggggcatgatggcgggtgcctatgatcccagctactggggaggctggggcggaagaatcgcttgaacctgggaggtggaggttgcagtgagtcgagatcatgccattgcactgcagcctgggcgacagagagagaccccatctcaaaaaaataaaaataatagaaatagagctgggtgcagtggctcacacctgtaataccagcactttggtagtgcccaaggtgggaggatcacttgaggtcaggagtttgagaacagcctgggcaacatagctagaccccatctgtacaaaaattttttaaaaataaaaaagctgataacagtggtgtgtacctgcagtcccagctacccgggaggctgaggcaggaggatcacttaagcccgggagctcgaggctgcagtgagccgtgattgtgccactgcactccagcctgagtgacagagcgagaccctatctctaaaaagaaaataaaaataaataatggaaatagattttgaaatgagagatgaagaaaataaagaaattaagaaagatgcttagggttttagctccgacaactgagtggaaagtcgctgttcaataaatatttgttgtatgaatcagtaagttaattttaaaaataggaggtataggccaggcgcggtggctcacacctgtaatcccagcattttgggaggctgaggtgggcagatcacttgaggtcaggagttcaagaccagcctggccaacatagtgaacccccgtctctactaaaaatacaaaaattagccaggcatggtagtgtgatcctgtaatcccagctactcaggaggttgaagcaggagaatctcttgaacccaggaggcgaaggttacagtgagctgagatcacaccactgcactccagcctaggtgacagagtgagagattccgtcttaaaataaaataaaataaaacagcaggtgtctttgagagctcgctatgtgccatgctctgttagaattactttacatgggctgggcacggtggttcatgcctgtaatcccagcattttgggaggctgaggccagaggatcacttgaggccaggattttgagaccagcttgggcaacttaggaagaccccgtctcaaaaaaaattaaagtaggctgggcacggtggctcccacctgtaatcccagcacttgggaggccaaggtgggcagatcatgaggtcaagagtttgagaccagcccagccaacatggttaaaccccatctactaaaaatataaaagctagccatgtgtggtggcaggaacctgtagtcccagctacttgggaggctaaggcaggagaatcagttgaacccaggaggcagagtttgcagtgagccgagatcatgccactgactccagcctgggcaacagagcaagactctgtcacaaaaaataaataaataaaataaagtaagataaaggaagtgctttacatgtcctgatttgtttaagccccaaaacaactggatgaggacatgtatttatcatccctggattactgatgaagtaaccgtagcacagagacgttaaggagcatgttctgagtgtcactgctgggaagagaaacaggatggctgggtggatgggtgtgtattcggggatcaatgggtgggcctctgaaaataggcctgtccccgaatcccagcctgttttttccagttaacacttctcttcctcttcctgcccccagcaccacaccccactctggccggagcacgccaagcagctccccatcgctccggaaacggctgcagctcctgcccccaagccggcccccacctgagccagaaccaggcaccatggtggagaagggatcagatagctcctcagagaagggtggggtgcctgggacccccagcacccagagcctaggcagccggaacttcatccgcaacagcaaggttggtgcaagcccaggtggggtggggagagggctagtgggggctggccggtgatctaggggctcatcctgactcctctccttttctttgcagaagatgcagagctggtacagtgtaagtgtctgggcaaggggcttgctggagggctgggaggaccgggtgctgggccaggagccccaggctgcaacagtcaaggagtgcgtgctgagatggagtgggtgcagacctagggtcacgttctatgctattatttatgtgctgtgtgaccttgggtgagttacttaacctctctgggcctctctctgtccttgagaaacagccccaccttacaaggctgaagggaacattgaatgagtcagtgatgctggtgggtgcttggtacggggcccggcttacataagaaatctgtaaatggcagctgtcattgtggctactggtgtgttgtgtgcgttggaatctgtcagggacttaagagactgagggggttccaggagctttgtggggcagcattgggagtgtgaacccccatccaggttctcacctctcaaacttcctcagatgctgagccccacttataagcagcgtaatgaggacttccggaaactgttcagcaaactccccgaagcagaacgcctcattgtgggtgagtcccggacccccagtcccagctcctagcccagccctgtgactctccgccagcccgcgggcgccggctgagcctcgtgacttgggtgtcctcctgtctctccccgcccctctcagattactcctgcgccctgcagcgtgagatcctgctccagggccgcctctacctctctgagaactggatctgcttctacagcaacatcttccgctgggagaccacggtgagcccgcagcggggcagggtacaggggcgggggcccccatggccaggccccaccccgctcctattgaccctcctgctgtcctcagatctccatccagctgaaggaagtgacatgtctgaagaaggaaaagacggccaagctgatccccaacgccatccagatctgcacggagagcgagaaggtgacggaggacccggtgacgggaccacgcggtcccccgctcagcaggccgcctcccccaaacatgcaaagccccatttgttctgcaccctgagttctctccgagctgtccccttctctctgttctcccggcccaggcgcccatcacccctgacctgatccccgcaccagcctctcctctctttccctgcaacctgttacctcacacagctgctcaggaacagcagaaatagtaaaactcttccatgtatgtggcacctcagccgcccctcccttcgtaagtctccccgatgttgtgtcctgtccctgtcattgtggcctcatgtccgttggttgcaagatggctttctcaccagcggtccaacaagaagggggacaggtgtgggggacacttcccagcagacttctctttgtgttttgttggttaaaagtggatctggccaggtgtagtggctcatgcctgtaaccctagcattttggggaggctgaggcaggaagattgcttgagcccaggaggttgaggctagcctgggcaacatagtgagaccctgtctcttaaaaagcaaaaaattaaccaggtgtggtggcacgcacctgtagtcccagctactcactcaggaggctgagacaggaggatggcttgagcccaggaggttgaggctgcagtgagccgtgatcatgccactgcactccagcctgggtgacaaagccagaccctgtctcaaaaaaaaaaaaaaaaaaaggatcaactgaccattcttagtggcaaaggaggctgggcaagttccctgggctccccccatcacatcccagcccctctgggctgaccctgtctagagatgcatctgtcccctccttggactgggagctccaaggacagggccaggggtcgtctccccatcccagtgattctggaattgtccagggcagggccgggcgcaggacagacgttttgtggaactaatgcaggggtgaattagtggattcatggggccaaagatgtggcgtcagcgcagatgagggtggcgcttccccacctctgtcctggtcgctccccaacctgctcacacctctctctctctctctccctgacagcatttcttcacttcctttggggcccgtgaccgctgcttcctcctcatcttccgcctctggcagaatgcactgcttgaaaaggtgggcctgggtgaggcccgggtggggatggggggtttccagggggaccatggagccagggaccccagaacttgcggagctggaggcagccctggctcttctccatgggcaccaggcccagtgcccctgcagctcctccctgggccccacctgaccccgaagctgagtctctggcaaagggacatgaattggtgtaaaccgtcgtaattcttccctggggctgggaatgattttcaccctgaaggacatccaggttccactggcagcgggggagtgtggatagaggctgggaggtcatcacaggatgccggctatggctggtccacagcacctcagagagccccagccccatcctccggctgagcggcactcacgcgctgccttctcagaggctccgatgtccctggagcaggcaggagtgctgagggtcccattcagcatcctgagagagggacagcgcacagtcaggccctaaggaggacagggcagagccccgggattccagccccatcccctggggcaagtgattgaaccccatctgtcaaatgggggccatccccacttcacagcacccagaattttgcccagaataagtactcagtcatgtcagctcttatgagcagagtagcccagcggttagctccctcgccaccccctctgccccccggctgtagaccagctcccctggggtcacatctcagcactgctacttcctggctggaccccagcatgtcaccttgcacttctcagcaccattgtcttaaaaggatgatgaggttagcacctactttccagatggttttgaagatacagtgagttagtacatctgtaaagtggttagaagaatgcacctagttgaccaggtggcaaatgtctgctgctatcatcacttactgttaactgtcatcactgtcattcagccactctggccatgggtggctgaaagctcaaggctcccgaggacacctgggaaaagattcggggggccacgatggcataggcatgggagactcagccctggagtctggcagggcttgaccaagtcacttggtgaccttgaacacatgactttccctacatgacttccccttcctgggactccgtatgctctgtaaagatgggaacattcatggctgggcacggtggctcatgcctgtaatcccagcactttggtagacgaagacgggcggatcgtggtgcccacgaggtcaggagttcgagaccagcctggccaacatggtgaaaccccgtctctactaaaattgcaaaaattagctgggcgtggtagcacgcacctgtaatcccagctccttgggaagctgaggtaggagaatcgcttgaacccaggagggagaggttgcagtgagctgagatcacaccactgcactccagcctgagcgacagagccagactccatctccaaaaaacaaacaaaaaaagatataaaaaaaatgggaacattctctggccagagtattgtggggacttgggaagcaggaagtttgagtcctgggcgcaggccctggaggggctgtagcaggggattccccgcttgctgaggccaggtctggtgcgggagatcgtggctgcctccttgtggaagccaggggaactgcggaggccgagggctggtggggaatctggcgggccgggctctggctggggtgagatggaggccaaccccaggtcccgcctccccagacgctgagtccccgcgagctctggcacctggtgcatcagtgctacggctcagagctgggcctcaccagtgaggatgaggactatgtctcccccttgcagctgaacggtctggggtgagttggaggtcaaaggaggttgaagggttcgggggagaacaggacggtcggcgtgcagagttcctggagtgctggggggcctgagatggttgtatgacgtctggaggattcaggagggtgtatggggtctcaaggacacagcagtcccgcttcctcccctttcccacaggacccccaaggaagtgggagatgtgatcgccctgagcgacatcacctcctcgggggcagctgaccgcagccaggagccaagcccagtgggttcgcgccgtggccatgtcacgcccaacctttcccgagccagcagcgacgcagaccatggggtgagcggtgggttggaagaggggtgggatactgataggaagagagaggagggctgggggtgcagtgggagaagaacagcctgacagatttggaggggaatggatagggggacaggggaggcctggatggaggaacaggacagggaggggaagacggacatgtgacagggaaagagagacagggaagagaggggacagacagaaaggatgagagacagaagggatgggagatgggtggatagatgaagcagcagacagacagacggacaggacaggtaagaaagcttatggctcaggcatctgagacaagcctggcaggggctgagaggggccctcatctgggtggccccaggctgctcgcagctcagccgtgagccctcggtgcacacaccaccccgggtctgcacaggctctggaatccttgtggccagtgtggacttgggagccctggggctgggatggaggtggccaaggctgcatcgggcctttctccacaggcagaggaggacaaggaggagcaggtagacagccagccagacgcctcctccagccagacagtgaccccggtggctgaacccccgagcacagagcccacccagcctgacgggcccaccaccctgggccccttggatctgctgcccagtgaggagctattgacagacacaagtaactcctcttcatccactggggaggaaggtgaggcaggcgggcccaattcattcgcctccggtacttgcaagcctcgctcagtcttaagcaagaggggatggattcgcccgcagcactgagaatccaggggcaggcgggatggcgttcaggcgctgttgctagaaatctctgtctttactctgttttgaaggcagcatggcagggtgaacacaagcacagactgaaggcagcttgccgcggttcacatcctggtcacaccacttcctgaccatgtcacgtgggcaaattatgtaacttctctgagcttgctttcctcctctgaaaatggggttaacaatgataatacccacttcataggattgttgttaagagactataaatgaggctgggtgtgatggctcacacctgtaatcccagcactttgggaggccaaggtaggaaggattgctagaggccaagagttggagaacagcctgggcagcaaagcaagaccccgttttgtacaaaaaagaaaaaaaagaaaaaactaggtgtggtggtgcacacctatagtaccagctacttggcagaccaaggcaagaggatcacatgaggccaagagtttgagacaagcctgggcaacatagtgagacccctgtctttacaaaaaatttaaaaattagccaggcatggggtcatgcaccctatgtagtctcagctactggggaggctgaggcaggaggatcgcttgagcccaggagttggaggctgcagtgagctatgattgcaccactgcacttcggcctgagcaacagagcgagaccctgtctctaaaacgaacaaagggagagaattaagtgatttcatacatttaaagcacttgggccagttagtaagcattgactattagtatttctattatcattattgtattcattttctctctccactaattttcagctagcctctattcttgtctcttatggggcagagatggcctcagccctgccccagaccagcccaatgagagagagcagcctatttttcctagtgtctacagcggacaccctagggttggctctgattgggccaacttgagagtgtgcctgcccctgaaccaatcactgtggttgatcggatagacctgggccacccactcacccctgaaccaattgctgtgcccctaggttgatgctcccaggaggcgtgctatctggtaatgaatccctgtgatttaaatctcagggcctaggtgtgttctccacccagaaccaagcacagtggctgtctgtctgggcctggagcacgtgcccaccctcaacccatccctgagtcacaggagggctctgtgtcagtgtccagctgtgctccaggaggtggggtccgcccatgcacactacaaggcctgggagtggggaggcgtggcccgcagagggagggaggagtggaggcagtcatcatcctcggctctcctctgtctccagcggacttggctgccctgcttcccgacctctccggccgcctcctcatcaactctgtcttccatgtgggcgctgagcggctccagcagatgctcttctcggactcgcccttcctccagggcttcctacagcagtgcaagttcacaggtcagcgggcgcatgaaggagaggctgaggttacccaggtgcaggggaggggtgaggaagggtagcccaggacaggggaaggcactgctagccagtggggcaaggcgaggtggtgaaaagcaatgtctgtcagaccagaagcagctctgccacttactagctgggtaggcttgggcagagttctgagatgctctgtgcctcagtttctccttctgtataatgggggtatgataatagtacctggcttattggttatcatgagaactaagtgagttcatactagaaaagttcctagagcaataccatatagtaagcgtttaataaatacaagttaagaggctgaggcggggctggtgcggtggttcacacctgtaatcccagcactttgggaggccgaggtgggcagatcactagaggtcaggagtgtgagaccagccagggcaacatggtgaaacctcatctctactaaaaatacaaaaatcagctaggtgtggtggcacacacctatagtcccagctacttgggaggctgaagtgggagaattgcttgaacctcggaggcggaggttgcagtgagctgagatcacactgcactccagcctgggtgacacagccaaactctgtctcaaaaaaacaggggcggggggtggggtgctgggcacagtggctcacgcttataatcccagcgctttgggaggccgaggcaggtggatcacctgaggtcaggagtttgagaccagcctggccaacatggtgaaaccccatctccactaaaaatacaaaaatattttagccaggcatggtggcgagcacctgtaatcccagctactcaggaggctaaggcaggagaatcacttgaactcgggaagcagaggttgcagtgagccaagatcgtgccgttgcgctccagcctgggcgacagagcgagactctgtctcaaaaaaaaaaaaaaaaaaggtgggaggagggccaaggtgggaagttcatgtcagcccagaagttggagaccagcctgggcaacataatgagactcagtctttacaaaaataaaaaaaaaaattagctgagcatgatgctgcccacccgtaatcccagctactctggaggctcaggtgagagaattgcttgaacccaggaggtggaggttgcagtgagccaagatcatgccactgcacctcagcctgggtgacagagagagactccattaaaaaaaaaaatgctcctgaggcctccccagaagccgagcagatgtcggcatcatgcttcctatacagcctgtggaactgtgaacccattaaacctcttttctttataagttactgagcctcaggtatttatagtaatgtaagaatggcctaatacagagctcctcagcctgacacgccagcccttttaggacataagcatagttttgggggccttgtagccccccaacacaaggcaccatcttcctgactgcaggggatactgcatgtctcatcaatacagaaaaagaaacaaagagaaactcccatctgacacgctcctcccctgcttgaatctcttttgtagcctcccaagttccttggctggtcccatgtcaacccttcagcctcacccagagctgtggctgcccctctccatacctggctgccccatcccagcctcaggggacttctctcaatattggcctccagcctcagggcctttactggtatcacgcggcctcctgggctcctctgccccgaccccttccttcctcagttcctccttcaggccttggttttgatttcacatcctcctggcagccttcccttaccttcctcagatcccagatacccccagatactcacagcttctgcccttaactcacaccatgccagtagtgtgtggtttttatttatagatatttcctgttgttctcaagagattctgggtgctaaggacaggagttcatctatcctggtctcccactggcctccaagccctgcataggcctgacagagtggacattaaatttgtgatcattaacacatatttatttatttatttatttatttttgagtcaggttcttgctgtcgccccagctggaatgcagtggcacagtcttgagtcactgtagcctctgccttctgggtttaagccattctcctgcctcagcctcctgagtagccgggattataggcgcccaccgtcacgcccagctaatttttgtatttttagtagagacggggtttcaccgtgttggccaggctggtttcaaactcttgacctcaggtgatcctcctgcctcggcctcccaaatttcccgaagtgctgggattacaggcgtgagccactgtgcccggctgcctcagggagcttttgatcatgctgaaaggcaaagggggagcaagtgagagagagtggaggggaggtgccacacacttaaatgaccagatctcggaagaactcactatcatgaagacagcagcaaaccatgagggatccgcccccatgatccaaacacctctcaccaggccctacctccggcattggggattacaattcaacatgagatttgggtggggacaaatatccaaactataccaaactcagactctgttctaggggtactggggagccatggagtgttctaggcagagaagggatagagtcaggcttggctttaacaagatgcccctggaccagatggggagactgaggccagacactcaagggaaggctggcaggggcactgggcaggcaaagatgggctgaaccaggagtgacgctcaggaggtttggtgaacacacagtgtaggtaaccatctaggggtttgagtagggggtgtccagggcaaggcctaccgctccagtgggagcctggaggaccctgggccacccctgagtgggggcctgggagatgcagcaggtttggggagatgctgaggctgtgtggagctcggtgggttcgaggggtccagggaccttccaggggaaggtgttcaaaagattacaggtccaatgctcagggcagaagccaagacgggtgcagagggggaaactgaggctgcagcagtggaggagatggccctgccccaacagctaaggttttaggctcctggaaggaaggtggggacacagaggagtggtggggattgggacaggtccccagagagacctcccagaaggctgagtctcctgtggcctgtgggcaaaggactggggtgtggcctcctcatgctgctcctccctcctctagacgtgacgctgagcccctggagtggggacagcaagtgccaccagcgccgggtgctgacgtacaccatccccatcagcaacccactgggccccaagagcgcctccgtggtggagacacaggtgggccaggtggggcagccgagtgggtggggcagctgggtgagtggggtggccctgacttctccggctctgtccctgcagacgctgttccggcgcggcccccaggccggcgggtgtgtggtggactccgaggtgctgacgcagggcatcccctaccaggactacttctacactgcccaccgctactgcatcctgggtctggcccggaacaaggcgcggctccggtgagtggtggctgggcccctccacccgatgccctggtggccccagggcctcctgtccactcctcaagtcagcagcagagccttggttcccaccctggtggaggaacagaagcgtggggttcctgaggcccttgtcctccgaatagtggagggtagaggaagagtggccctgggatggctcctcccatctacagagggtgtttgagcctcaagactctgaggatacagcaaagccaggcaatatcacctctctcagggagctcatattctagtggggaattggacaatagagaaatgatcaggaaaatctgcagaacattcactggcagttaggcctatggagaaaaatgaggaaaacacggcaggctaaagaagcagggtgtggaggcttttacacccgacacgctggtcagggaagggcctactgggaaagaaatgtttcaccaagaacctgaaggagctgagagcaactcatttgggacagcaggtgcaaaggccctgaggcaggggtgtgggcaatggctggagtggagtaagattgagtgagtaggagctgagattaaagtggtgaaccggggcccggcacagtggctcacacctgtaatcccagcactttgggaggctgaggcaggagtatcacttgagcccaggagttcaagagtagcctgggtaacgtacggaagccctgtctctacaaaaacaattttttttaaattagccagggtccaggtgcagtggcttacgcctgtaatcccagcaatttgggaggctgaggtgggcggatcacttgaggtcaggggttcgagaccagcctggccaacatggtgaaacccatctctactaaaaatacaaaaattagtcgggggtagtgatgcacgtctgtaatccctactacttgggaggctaaggcacaagaatcacttgaacctaggaggtggaggttgcagtgagccgagatcgggccactgcacttcagcctgggtgacagagtgaaactctgtctcaaacaaacaaacaaacaaacaaaaaacaagttaaaaaattagccagacatggtggagatttcagtgagccatgatcacaccgttgcacttcagcctgggcgacagagcaagaccctgtctcaaaaaaaaaaaaaaaaaaaaaaaggtgaaccagatgtggctcatggtgaagacttgactttacctggagtgaggtgcaaccaggccagggctctgagccaggagggcgctgacctgactcaggtggtcccaggctccttctggctccctctgttctggtgggaacagactgcaaagacaggtacaggagcagggaggccagggaggaggctgctgggacatccaggctggaggggacggaggctgaatcagggtgaggaaatggagggggaagagtttagattctggagagattttgcaggtttagctgacaggatttgctgagagattggatgtggcggtgagggaaagagagctcaaggaatatcccgaggcatttggcccaaatcactacaacttcggagctgcccttgacccagatgggggcggcagggaggaatgggtttggggaaagaccaggaggtcagtttgggactcagctgtctatgttgagctgagcccatgtggagctggggtgcagcagccgaatggaagaggttcaggggcatggtctggttaagacgtcagtctgtgagtagacagggctcaggccgccgggagcgttgcccaggtagtgggcatgggtggagaaggaccgagggctgagttggctggcatttgggctgggcgggtggtgtatggggtatccagggaagccatggggggtagggaacccatctgttttgtctgtgagtgacaaggggccctctctgaattaggggaaggaaaaaactcagcttgtgggacggggcagccagggctggagtcagacccttacctccttcccctgatctcccaaccccagagtgtcttctgagatccgctaccgaaagcagccgtggagcctggtgaagtcgctcattgagaagaactcgtggagcggcattgaagactatttccaccatctgggtagggacagaaggccggctggggcgtgggttgggggatggcctggccaggtatggacatccagagccccctctcttttacgcagagcgagagctcgccaaggctgagaagctgtctctggaggaaggcgggaaggatgcccggggcttgctatccggcctgcggcggcggaagcggcccctgagctggcgggctcacggggacgggccccagcacccagatcctgacccctgtgcccgggccggcattcacacctcgggtacgttccgttggggccgggttggggtaggcggaggatcgggggtcctggactgggccatctgactccaagctgctctcctgcaggctccctcagctcccgcttctccgaaccatctgtggaccagggccccggggcaggcatccccagtgccctggttctcatcagcattgtgtgagtaagagacaggagcagtggccacacaggcctgaacctgcctcctggctgtgtgaccttgggcaagtgtgtggcctctttgagctctctgcttaagtgggagcgtgggtttgctcacagcaaggattagacaaggcaatgtttgggatgtgccggtttgtcatggagaagccttccctgctagaacagcagagccggggggggctatgggagatcagaggggcctgacctcacccaaggatcaaggggggctttctggaggagcaggcacacaaagattctggaattaggtgcacagggagaggtgtgcctaacaagtgaggtcatttatggacattatgttctctgtgcccactcctaagctgggcgatgctgaggacaccgcagtgaccttgaggaaaagatagacctcacaccagaccagagtgatccgggctgggatgggggaggtatgggcagaggggttggggctgggagtggggaagccctgggaggccagcggcggcttcctcccaggccagagggggcagtcaggatgggcgtcctgagagagtggagaccgcgtaggctaagggcttgggcagggagaacccacactcctgcccagaagcctgcaggagttggcgggcaggacgctgggaggaaacagaagcaggatcccggggttgagcagaccctgcgaggtgagggtcaggccagctacatgctcagcctctgagcctcagctctcagctctcatccagtgagggggcgtggtgctctcagccaagagctgccccgggtgaggagggctgggggtgtcgggggcaggccaggcggcgctcatctctctgtctcccctcactgctgctgctgcaggatctgtgtgaggtagggtcccgagtcctccccctgccctcccctccctgcaccccacccctgctgcagcctcttctccccaccccatgccctccagctcccccagggaggtggcctggcatggcagtcaagggtatgggcatcagacagacctgggtttgaacactgacttccctgctatggactgtgcaaccctaggcatgtctctcatcctctctgagcctaattctcctcctctgcaatgggggatagaggtgtccctacaagatgtagttgtttgggggtgttcagagcatctagaccccaggaatcctgacctctgacccctgtccccagccttatcatcctcatcgccctcaacgtcctgctcttctaccgcctctggtccctggaaaggacagcccacacctttgagtcctggcacagcctggccctggccaaggggtgagtgggtagcctggggaaatgggggggcttgggcacatcgggggaggccaaggccctgctcaggcctggcatccccacagcaagttcccccagacggccacagagtgggccgagatcctggcgctgcagaagcaattccacagcgtggaggtgcacaagtggaggcagatcctgcgggcctccgtggagctcctggatgaggtaggaggcgccgctcgggcagggctcggggctgcggggctgcagggtcctgtgttgaaaccccaccgtgcggcaggcacttcccctctccggatctcagtgtcctcctctgtaaaatgaggaagccgctcagagtccccaccccacagcattgcaggggaaagcatggaagcatggatggaagacagaactgattggctcacgtcctggagaaaagtccagaggcgtctcacattaggcacggccgggtttggtcactcaatggcagtaagagtcagtctctcgtgcccactctgccctgtgcccatctccagggttggcttcattggaggccacccttttccccccacaggggaccacggagcttactctcattggctgctggggtcccaggcctacccctgacacatcacaacagccagggcaggccacgtgtggtccctctacccgctaccccactctggggtaactaaggggtcacatggtctgaaggggagagactctccaaaggacctgaggtctcatctccaaaacggagtggacccagacacccagtgtagttcagggacaatgtctactcagacaaccaggttccaattccggtgtgtgacctcgtgcaagtgattttgccatggtggccgtggactcctctgtgcacaggataatgactgatgctacctcaaagactgttgtgaggatgagacaagttgacattgggagtggtgccaggcctgcaggaaacactggatgtgggctggctgtcctgagtttgagcctagtgccagggacaaagcagatgcccaataaatgtgatgtcatcacacgacaattccctcaggccccagtagactcaggccagcagttgcggtgggtcagagcaagtgtcaggccagcagttgcggtgggtcagagcaagtgtcaggccagcagttgtggtgggtcagagcaagtgttaggcactcggggaaggtgtcgagggggaaagcggatgggaaacagagtctggcattgcctgcatttccaaggccatcagagctgaagttgtgggtgacggtgaaaatcttgtctcattggacccttccatatcagaaggctcatctttaggggtctcattgccccccgaaatcaagcttgggagaggctcacactggaaagggcggggcaggatggggtggggaggagatgaaggctgaggccccatcactcatagagagggtaggcagggccccccatcctgcgttattttattttattcttttgagacaggatctcattctgttgcccaggctggagtgcagtggcacgatcatggctcatcgctgcctcgaactcctgactcaagtgatcctcctgcctcagcatcctgagtagctgggactataggcaggcaccaccacacctggccaattttaaaattttttgtagagaccagagtctcaccatgttgcccaggctggtctcaaactcctggcctcaggcaatcctcccgcctcggcctcccaaagtcctgggattgcaggtgtgatccaccacgcctggccctgagttaaatttttatcattttcctctctgtcaaactgctaagggtgcagagttgacgtcacagattggtgctcacagtagatgtagactgagcacttacctgcagctgggctgttctaggttttaagcatgactgctttatccccacagccagcctttgagaagatgctcttgttatcccagtttttttgagacagtctcgatctgtcacccaggctggcgtgcagtggtgcgacctctgccttccaggttaaagcgattctcgtgcctcagcttcccaggtagctgggattacaggcacccgccaccacgcctggctaatttttgtatttttagtagagacgggctttcaccatgttggccaggctggtcttgaactcctgaccttaagtgatccaccggtctcagcctcccaaagtgctgagattacacgcatgaggcactgtgcccggccgttatcccggttttatacataggtaggcgatatgaggcatccagaggttcgaggagctcaggagcttgcccgaggtcacagagtgggtaatggtgacagctaacatgtgctgagcacttagtgtacaccaggttctcagtgctcttcagaaccctgaaataatcctgtggagcagatgtgttatagacccgtatttcaaatgaggggattttggctcagggtggttacgggacttgcctgaggttaactgaggtaacaagcagcagagccaggatttgaacctaggccatcggggtcacaggcacacactaagccccttcctctgctgcctctgagaagttaaactgggtgcagcatggctgtgctcttttcaccaagggaccctggggtggggcagtatggcctctagaccgtcctcagtttctcaatggcaaggtgggggtgggcgacatcaccccccagcctccagcgttcacccccgaccctgctcacctcctccccgcagatgaagttctcgctggagaagctgcaccaaggcatcacagtctcagaccctccctttgacacccagccccggcccgatgacagcttttcctgaggaccccggccacgcagctgttcccccacatggacagatggacacacagagcctcggcggccactgctggcacggtgtgagcgccaggcatctcccacccgcccctcccgacggcccaaccaggggctgtgcagacgtggggaccacggaaccgagatgcactttagaccagggagctggcccggcctctggcaggccccccactaacttattttgcccggctgaggttgtggggggcgcctcctggggtgcacgattccctcagctctgggtttaatgtattatatttatttggggccgacagtgccccaataaagggtcagaagtggctgtggctgtgcctgtggggccctgggagtgggtgggagcctcctgttgcactcagatcctgccatggtggggaggggacctctgtctgtgttctggggccatagtcactgaaacgatctggaattcccgcagcatcttacacaagctttacatcatctgaggtcaacgcaggaactccggggacagaccgtggtagctggagttcaaatcctgcttcctagcagtggtgtaaatgcagcaggtcagccccctggagctccagtgagctttcctgtgcaatgggtagaatggcagtagctgtctctcagggttgttagaaggcagtggttctcaaacttgagctgcattcgaatctcctggagagcttgatgaaaaacagactgtgggcccctccctccaaatttctggttcagtaggtctggggcagggctgggattctgcctttataacgagttcccaggagttgctcatggtgccatcccagacgacactttggttttttgtttgtttgttttaagttagggtctctgtcgcccaggctggagtgcagtggcacaaacatggctcacagcagcttcgacctcctgtgctcaagccatcctcccacctcagccttctgagtagcttggactacaggtgtaagccaccacgcccggctaattttttatttctttttggagatgggatctcactgtgttgcccaggccagtcttgaactcctggcctcaagcgatcctcccgcctcagcttcccaaagtgttgagatttcaggcgtgagccaccacgcccagccccagaccacactttgagaaccactattataggttcaaggagttcataaatgtggctacttataacagggcccggcacagatggaatggagtaagtattcaataaatgttacacttattgcataaaaatagagggaaaaaagtaactcgcgtagtgagtaccaagtacgtacgtacccagctctgtgccaagatctgatgttcattttattctcacagtgattccatgaggtggagacaaagatgtacacgcccgaggctacccagcagggaggcagactccaggcctgacccctggggtctccacatttacatgcaaggtcctaaccccctcaggaccccaccacagcccattcaggctgacgttggttggattcctgttttacagatgaggaaatgagcttggaggcaaagtccctggtccagaaagaacccaggtccacctcacgcaaaccttgtcctggttccagagggagtatgtggggtagagacacctttggcatgtcacacccccggctataagaatcatcctaactgatggcttggagcaggggactggaggagggtttggagagtggatcaggagtggcataggaggcagagccagcctctcctatcctctagttgtgtgatcatggcaaggtacccatgctgagcctcagtcttctatatctgtaatatgggtgtaataataataccacctataggaaaaattaaatgagctaatgttagtaaagtgcttagaatgcttagaacagcaccaagcccatacatagtaggtgctcactgaacatagcttatagggccgtgaggtgcctcctgtccagtgctgaggcctgtcctcactgtgccttcacctaccatcccccaccagtggaagggcccggaacagcaagagggttattctctgcaggggaatttcacagctcagaaggtgctggcgtaaaagtctagaccacagaggtgtcggatgtccctggctccctgcccctctgccatggtcctgccccacaccctggctcctcttgcctggcagggctgggccagggggattctgagaccttaccccacccggaattggaggctaggatctgggtagtgacccttcagccgagagtctcactcccaccctggtcctgacagcccagaactcccatctccattctctcaatttggcagaacctactggtaggacaggccactcaccactgctggggcaggattccacatccatcctaggccagctacatgactctgggcaggggcacggccctctcccagcctcagtttcttcatctgtaaaatggggataatagaacttgctgaaggtttggggcagtagaagtgggttctgcaaatcccaaggacttagtgaacattggcattcatttatttgtttgacaaatattgattgagtacctacaatgtgccaggaacagttcaaggtgcaagagacacaagacaatatcctcacctgggagattttttttttttttttttttttttttttttacatggagtctcactctgtcaccaggctggagtgcagtggtgtgatctcggctcattgccacctctgcctcccgggttcaagcgattctcctgcctcagcctcctgagtagctgggactacaggcatgtgcccccacgcccagctaatttttgtatttttagtagagatggggtttcaccatgttggccaggatggtctcgatctcttgacctcgtgatccgcccacctcggcctcccagaatgctggaattacaagcgtgagccactgcgcccggcctttttttttgagacggagtttcgctcttgttgcccaggctggagtgcagtgatgcgatcttggctcactgcaacctctgcctcccgggttcaagcgattcttcctcagcctcccaagtaactgggattacaggtgcccaccaccactcccagctaattttttttgtattgttagtagagacggggtttcaccatgctcgtcaggctggtctcgaactcctgtcctcaggtgatctgccccccttggcctcccaaagtgctgggatagcggggggcggctcacatctgtaatcccagcatggtcaacatggtgaaaccctgtctctactaaaaaataaaaaaattagccaggcatgatggtgcacacctgtactcccagctacttgggaggttgcggcaggataatcgcttgaacccgggaggcggaggttgcagtgagacgagatcagccactgcactccagcctgggcaacagagccagaccctatctcaaaaaaaaaaaaaaaaaaaaaaaaaaaaaaagaacataatgtcaggtagtgaggctgctgtggaaaacactcaacaagaggtaaagagtaaaggaggtcaggttaggagcggggaaggcagtttaccctgaagggacacagaagacctgacgaaggtgacattggagccatggaggcccacggagaggggcggggcagggggggagagccggggcagaggggagagctggggccaaggccctgaggcaggaacgggttccctgtgttgggaacagcaggagggcctgaacagccagagtggagtgggaggaaagaggggtagaaggtgacatcagggacataaatgggtgcaggggatcacgaaggggtcctcctcctgaaacagcacctccagattcccggggctgcttctctccagggtgccccgcctgcttgggtgaggtccggattgtagctgtagtcctagcctgacggccccccaccctcctctaatgcctacttggggtccctgcacattgacccccaggcctggatatcagggctcaggggagataacttggaggttcgccctctggaactcctgaggatgacctccatcatttgaagtcggaaacccggcccccaaactgcgctctaagtcctcctgtgactctgggggtgacctttccagactccctgggaaggtgggggggggggggtggtcctcagagccccagcggggtcggagacacacagaccaccctccccgttcccagaagtcgcggtccctgcgccacccggagaggccggtgcagcgggcgcctcccgggccgctgcggcaaaggctgggcggccgcgccttccccccgcggtgattcatcccgccccctccctctcctccctcgtccctccctaggccgccgccgccgccgccgccgccgccgctgcagtgcgcaggagaccgcggtccgcgcccgagcgcgcccgagccggagcgggaccggggtcggtgcacctagcggatgtgcccggctgcgcgcgccagcgcagcagcccgagcagcggccgccgcccgcgcggcggggatgcccggacgccgggcacacggggctgggccccacggacggtaaccggagcgggggggtactgagccacaaacactacctcaaccaatcgaacgagtgccacgagaccgaagctagagtgatggcacgacgccgctcgcccgggggaccattcctaacacgcacggcaagggatacacggcgcggccgtcatcgaccccccgcgcaaataaaataagccggacaggcccacaggggaggaggaggcagcaagcacagcagcacgcggccagacactgggagacggcatgcatggcaccctctacacggcacacagcagcccgcacacatgcggctgacgctgccaccgcgccgcgtgccgccgcacgctgggccccgcgcggagccccccgccggagggcccacacgagaacggaaaccggaagcgtgaagatggcagcctcggagaacaaacagagggcagnnnnnnnnnnnnnnnnnnnntgcgcggggggcgcgcgcggccggggggcaccgcgggggcactggcggggcggcgggagtggcgctcgggacacggggcagccgcgcgagggccacccccggcccatccccgggccccgccaagtcagcttcagaagttgtgcgcgcgggagccgggcttggggagggcagtggaggtgagggtgggctccagcgggtgggggccgggctggcacagcctggcggctgcaggcgcccagccgggggcgaggaaacgcggagtcagctgctcccggagccccgcaggctgcaatgtgacacccacagccgcgggaggggggtggggggaaggcggcgcccggagactgggacgggaaagacggagggacagggagagatgaagacgggaggaagggggcgagagacagagaaggactcggagcgcaccggagtggtccgctgggatgctggggacatgggggtcaagggggagacggagacagagagaggggtattggagagagagagagagagagagagttaagagactgagcgcgatggagaaagggaaacttgagaaaggcagaaggagatggagagaagagagagggagatgcgggtgcccgtgaacaccgggagagaatcttgcatggagtttgaaaagggatagacgtagaaaggtggaaagagattaggagaggtctccttctgagcccagagagtggacaaaaagtggagggaccttcagagagacccctgagagggacaaagataggagggactgagacagaggccctcagggagtctgaaagggaccgcaggggaggcggatggatgagaagtcctgaggatcaggaaacaaggacagcacagggctgcagcagaagagacacagcgttagctacagagtgctgggaggcagaaaggaggtgccaggtaagagtgtgaaggaattctaagactggaattcagtgggctgcaaaagccctggggcaggagagagctcaggaaagctttgagtagtggatggggttggggtgggaagagctctagaggcgaggagcctggggaagaggggatgatggaggcaggagaggccggggaggggatggctcacacaggggcttgtgggctgtggagaggggctgagtgtgggtcagccccggtttcagtgcccacctccccacaatcccccacccccagaccttttctcccaacccatttctcctggagctagctggttttacaatttaatggtgaaaatgactgccaccttaaacttctaacttagctggaattctcattctaccacctagatgcttgggttcctccagcaagggactttctgaggaaggggcactcgggtagcataaagtctgagttaccggcaacgttgacagtcccacttatggggcctcccatgtacaaggccctacctaatgtatgaaaatgggcccagccattgctggaagcaaaggaccatttctttcaacaagagagagggaaactgagactcagggatgaatgacttgctgaggtcacgcagtgagtgacagggctcagcctagcatccagtcctgtctgctggtaatcattgaggggggaacagatggtttgtgaggggtctggcattgcttagggcaatgggtgcctctgcctgacctgagcctgctgtccccacagtgtcctcagcctgcgggggctgcgtggaggtggactcggagaccgaggccgtgtatgggatgaccttcaaaattctttgcatctcctgcaagcgccgcagcgagaccaacgctgagaccttcaccgagtggaccttccgccagaagggcactgaggagtttgtcaaggtgtgcgggtgccgggaacgggcatgggagggcaggggtccacgagtgggaggcggtggggctggatctcagggagggggcttatttgtttaataatatgctgtgattgctgacctggattcagattctggctccaccagtggccagctggtgaccttggccaagtcagtgagcctctctgaaagtcagtttcctcctcggtaaagacggggtggcggtggtctctagcccataggtttgtgtgaggactgaatgcattgacgcacctggcacacggttggcatgaaataaatgtcagtggacttatttggcaccagcaaacaatgtctctgatagtcattacggagggaagacagaactgttttttttaacctcctttaaactatgtgtgtattttgcattatatatcggtgagggaaccataaaattctgtgacgtgctggagagttggggtctccagctgctggaatcaggctgccctgtctctgctggaggagtgtgtctggtggctgggaaagaacggcagagaatgatagcctagaggccagatggggcttgggaggatgactgaggaacgtgtgtgtgctcgtgtgcatcttggctagaggcaaaagcggggtctggttgactccaggcgtgatcctagccccccacccctgtgccctccctgcctgaggtcaaggtgtctgagcccatctgtgtgccatctgtgtttgtgggtgtcagggcaggggacagaatcagggtcaggtaagggaagagaggcccaggcagtgacaccttcccctccctggctacccctagatcctgcgctatgagaatgaggtgttgcagctggaggaggatgagcgcttcgagggccgcgtggtgtggaatggcagccggggcaccaaagacctgcaggatctgtctatcttcatcaccaatgtcacctacaaccactcgggcgactacgagtgccacgtctaccgcctgctcttcttcgaaaactacgagcacaacaccagcgtcgtcaagaagatccacattgaggtagtggacaaaggtgagtcgggtgctgcctgcccctttaccgtcacccaccggagagccagatggagggacagatggcaggcagtggacaggacaggctggctctgtgcctggccagccaaccgcccacagcagcgggctgagggggaggggagcagcccctcctgcccactccagctctggcctctgtttctctccagcccacggagaggtcaaagcatgcctgtcccccacagacgctccgggtacagaacccagctctgtcacctgtgctgtatgacctctggcaggtgccttctgtctctgagccaaagggttgtcctgggcttgcccgggataataatccgatgtgtttctcggggtgtggtttgagccattcttccatcatggggttcatgaggattgagcagctgcaggcacacgcctggcttccagcagagccttgcaggtggtggcgagggtggcggttcttactgttcgagtagctcagccctgctgccctctgtggtgatgaggcaagagagcgtgccacctagagcagagttccgcacacccctctgcactcctgccccgggggagccgcgctggcctgcagtctcactcaacacctctggggcgggcctaggggtcctttctaaagctctcaggtgaggcagtgaagggccacaggtgcggggcccaccctctgagcagcaagggcctacagcgcttttgaacgtctcatcattttgcctcagccaccctggaccccttttctgagggaggtccgccccttctctgatccatcttctgctcagcatcaattgcaattgtccagcgccctgtggccactggcttagagttggggaaacagcccaggccttgaagcagctacaagccgtggcagaaaggtctctcagggccacggcacacacatcctcatgggcaacacgcactgcccatcttttctgtgagatgggtgccggcctcagtgccttacacggagtcccttagtgaatcctctccccaccctctggggtaggggctcttcctatccccattttacggatgagaaaaccaaggctcagggagggaaggttatgtggccaaggtcatgtgattgggagctggacttgaatccagaggagcttgggtgactgtgtttctgttcttggcatgattcactgtactctgtgatcagccagagcctgtgggtttctttttataattagcatttttacgtttattgtcaaattggtgtagcagaatgcaattcagcaggcatgtctgagccactctggtgtttgtcacgatgctggggggtgggggtcacccgcagacatggatgatggagccccgcctgcggagttgctgtgacaaagatgcctgcggtactgggactttacaaaacctgtgttattgctcttgcaaatctgcagaggtgagatggggagagggtgggaggctccagggcactgttcagccacccaggttctttccatcttgttgtttggcagttggccagggtgttgtgtcctctgtacgccgtgacccaatagagcctctttttttttttttttaaatttagatttttattttttgagacggagttttgctattattgcccaggctggagtgcaatggcgtgatctcggcccactgcaacctctgcctcccaggttcaagtgattctcctgcttcagcctcccgagtagctgggattacaggcatgtgccaccaagcccagctaatttttgtatttttagtagatatggagtttccccacattggccaggctggtctcgaactcctgaccttaggtaatgatccacctgccttggcctcccaaggtgctgggattacaggtgtgagccactgcgcctggcctgagcctctcttttttaggattgcccactgtatgacactacatcccacagcctgtgctattaccagcatttaccatcatatgcagttccttatgttggccctgcagagtttgtgttttctgcactatccacccagttctagtgttttttacccaccatatgtagtattgccttttaaacattacccactatattatagtattttatattacccactataggatattttatattacacaatatattttactatcataatattgccaaacacaacagttttttgttttttgttaaagagaccaagtcttgctctgttgcccaggctgggatactgtggcgtgatcatagcccactgcagcctcgaactcccgaaatccagcgatccttctgcttgagcctcccacgtagctgggactacaggtgtgagccactacgcccggcaattttttttttttttgtagagactggatcttgctatgttgcccaggatggtcttgaactcctggcctcaaataatcttccctccttagccgccgtaagtgccgagattacaggagagagcctccgcgcctggcctacagtatttttattataatccatcatactagcgtatttttaacgttccccaccatggcgggtatttttattacccaccatg

SEQ ID NO: 1910 - DNA, 2760 bp, Homo sapiens
ggtcgggtgggggcggcggccgcggaaggccaggccggtgccctgcggggacgcccagcgcagcccagccccgcgcagcccagccctgccctgccctgccctgccctgccctgcgcccggggcgcgcccaccgcgccgcatccatgttcgaacgcagtctcgctctgtcgcccaggctggactgcagtggcacgatctcggctcactgcaacctctgcctcctgggttcaagcgattcttctgcctcagcctccctagtagctgggattacagcaccacaccccactctggccggagcacgccaagcagctccccatcgctccggaaacggctgcagctcctgcccccaagccggcccccacctgagccagaaccaggcaccatggtggagaagggatcagatagctcctcagagaagggtggggtgcctgggacccccagcacccagagcctaggcagccggaacttcatccgcaacagcaagaagatgcagagctggtacagtatgctgagccccacttataagcagcgtaatgaggacttccggaaactgttcagcaaactccccgaagcagaacgcctcattgtggattactcctgcgccctgcagcgtgagatcctgctccagggccgcctctacctctctgagaactggatctgcttctacagcaacatcttccgctgggagaccacgatctccatccagctgaaggaagtgacatgtctgaagaaggaaaagacggccaagctgatccccaacgccatccagatctgcacggagagcgagaagcatttcttcacttcctttggggcccgtgaccgctgcttcctcctcatcttccgcctctggcagaatgcactgcttgaaaagacgctgagtccccgcgagctctggcacctggtgcatcagtgctacggctcagagctgggcctcaccagtgaggatgaggactatgtctcccccttgcagctgaacggtctggggacccccaaggaagtgggagatgtgatcgccctgagcgacatcacctcctcgggggcagctgaccgcagccaggagccaagcccagtgggttcgcgccgtggccatgtcacgcccaacctttcccgagccagcagcgacgcagaccatggggcagaggaggacaaggaggagcaggtagacagccagccagacgcctcctccagccagacagtgaccccggtggctgaacccccgagcacagagcccacccagcctgacgggcccaccaccctgggccccttggatctgctgcccagtgaggagctattgacagacacaagtaactcctcttcatccactggggaggaagcggacttggctgccctgcttcccgacctctccggccgcctcctcatcaactctgtcttccatgtgggcgctgagcggctccagcagatgctcttctcggactcgcccttcctccagggcttcctacagcagtgcaagttcacagacgtgacgctgagcccctggagtggggacagcaagtgccaccagcgccgggtgctgacgtacaccatccccatcagcaacccactgggccccaagagcgcctccgtggtggagacacagacgctgttccggcgcggcccccaggccggcgggtgtgtggtggactccgaggtgctgacgcagggcatcccctaccaggactacttctacactgcccaccgctactgcatcctgggtctggcccggaacaaggcgcggctccgagtgtcttctgagatccgctaccgaaagcagccgtggagcctggtgaagtcgctcattgagaagaactcgtggagcggcattgaagactatttccaccatctggagcgagagctcgccaaggctgagaagctgtctctggaggaaggcgggaaggatgcccggggcttgctatccggcctgcggcggcggaagcggcccctgagctggcgggctcacggggacgggccccagcacccagatcctgacccctgtgcccgggccggcattcacacctcgggctccctcagctcccgcttctccgaaccatctgtggaccagggccccggggcaggcatccccagtgccctggttctcatcagcattgtccttatcatcctcatcgccctcaacgtcctgctcttctaccgcctctggtccctggaaaggacagcccacacctttgagtcctggcacagcctggccctggccaagggcaagttcccccagacggccacagagtgggccgagatcctggcgctgcagaagcaattccacagcgtggaggtgcacaagtggaggcagatcctgcgggcctccgtggagctcctggatgagatgaagttctcgctggagaagctgcaccaaggcatcacagtctcagaccctccctttgacacccagccccggcccgatgacagcttttcctgaggaccccggccacgcagctgttcccccacatggacagatggacacacagagcctcggcggccactgctggcacggtgtgagcgccaggcatctcccacccgcccctcccgacggcccaaccaggggctgtgcagacgtggggaccacggaaccgagatgcactttagaccagggagctggcccggcctctggcaggccccccactaacttattttgcccggctgaggttgtggggggcgcctcctggggtgcacgattccctcagctctgggtttaatgtattatatttatttggggccgacagtgccccaataaagggtcagaagtggctg

SEQ ID NO: 1911 - protein, 677 aa, Homo sapiens
MVEKGSDSSSEKGGVPGTPSTQSLGSRNFIRNSKKMQSWYSMLSPTYKQRNEDFRKLFSKLPEAERLIVDYSCALQREILLQGRLYLSENWICFYSNIFRWETTISIQLKEVTCLKKEKTAKLIPNAIQICTESEKHFFTSFGARDRCFLLIFRLWQNALLEKTLSPRELWHLVHQCYGSELGLTSEDEDYVSPLQLNGLGTPKEVGDVIALSDITSSGAADRSQEPSPVGSRRGHVTPNLSRASSDADHGAEEDKEEQVDSQPDASSSQTVTPVAEPPSTEPTQPDGPTTLGPLDLLPSEELLTDTSNSSSSTGEEADLAALLPDLSGRLLINSVFHVGAERLQQMLFSDSPFLQGFLQQCKFTDVTLSPWSGDSKCHQRRVLTYTIPISNPLGPKSASVVETQTLFRRGPQAGGCVVDSEVLTQGIPYQDYFYTAHRYCILGLARNKARLRVSSEIRYRKQPWSLVKSLIEKNSWSGIEDYFHHLERELAKAEKLSLEEGGKDRLLSGLRRRKRPLSWRAHGDGPQHPDPDPCARAGIHTSGSLSSRFSEPSVDQGPGAGIPSALVLISIVLIILIALNVLLFYRLWSLERTAHTFESWHSLAKGKFPQTATEWAEILALQKQFHSVEVHKWRQILRASVELLDEMKFSLEKLHQGITVSDPPFDTQPRPDDSFS

SEQ ID NO: 1912 - DNA, 2638 bp, Homo sapiens
ggtcgggtgggggcggcggccgcggaaggccaggccggtgccctgcggggacgcccagcgcagcccagccccgcgcagcccagccctgccctgccctgccctgccctgccctgcgcccggggcgcgcccaccgcgccgcatccatgttcgacaccacaccccactctggccggagcacgccaagcagctccccatcgctccggaaacggctgcagctcctgcccccaagccggcccccacctgagccagaaccaggcaccatggtggagaagggatcagatagctcctcagagaagggtggggtgcctgggacccccagcacccagagcctaggcagccggaacttcatccgcaacagcaagaagatgcagagctggtacagtatgctgagccccacttataagcagcgtaatgaggacttccggaaactgttcagcaaactccccgaagcagaacgcctcattgtggattactcctgcgccctgcagcgtgagatcctgctccagggccgcctctacctctctgagaactggatctgcttctacagcaacatcttccgctgggagaccacgatctccatccagctgaaggaagtgacatgtctgaagaaggaaaagacggccaagctgatccccaacgccatccagatctgcacggagagcgagaagcatttcttcacttcctttggggcccgtgaccgctgcttcctcctcatcttccgcctctggcagaatgcactgcttgaaaagacgctgagtccccgcgagctctggcacctggtgcatcagtgctacggctcagagctgggcctcaccagtgaggatgaggactatgtctcccccttgcagctgaacggtctggggacccccaaggaagtgggagatgtgatcgccctgagcgacatcacctcctcgggggcagctgaccgcagccaggagccaagcccagtgggttcgcgccgtggccatgtcacgcccaacctttcccgagccagcagcgacgcagaccatggggcagaggaggacaaggaggagcaggtagacagccagccagacgcctcctccagccagacagtgaccccggtggctgaacccccgagcacagagcccacccagcctgacgggcccaccaccctgggccccttggatctgctgcccagtgaggagctattgacagacacaagtaactcctcttcatccactggggaggaagcggacttggctgccctgcttcccgacctctccggccgcctcctcatcaactctgtcttccatgtgggcgctgagcggctccagcagatgctcttctcggactcgcccttcctccagggcttcctacagcagtgcaagttcacagacgtgacgctgagcccctggagtggggacagcaagtgccaccagcgccgggtgctgacgtacaccatccccatcagcaacccactgggccccaagagcgcctccgtggtggagacacagacgctgttccggcgcggcccccaggccggcgggtgtgtggtggactccgaggtgctgacgcagggcatcccctaccaggactacttctacactgcccaccgctactgcatcctgggtctggcccggaacaaggcgcggctccgagtgtcttctgagatccgctaccgaaagcagccgtggagcctggtgaagtcgctcattgagaagaactcgtggagcggcattgaagactatttccaccatctggagcgagagctcgccaaggctgagaagctgtctctggaggaaggcgggaaggatgcccggggcttgctatccggcctgcggcggcggaagcggcccctgagctggcgggctcacggggacgggccccagcacccagatcctgacccctgtgcccgggccggcattcacacctcgggctccctcagctcccgcttctccgaaccatctgtggaccagggccccggggcaggcatccccagtgccctggttctcatcagcattgtccttatcatcctcatcgccctcaacgtcctgctcttctaccgcctctggtccctggaaaggacagcccacacctttgagtcctggcacagcctggccctggccaagggcaagttcccccagacggccacagagtgggccgagatcctggcgctgcagaagcaattccacagcgtggaggtgcacaagtggaggcagatcctgcgggcctccgtggagctcctggatgagatgaagttctcgctggagaagctgcaccaaggcatcacagtctcagaccctccctttgacacccagccccggcccgatgacagcttttcctgaggaccccggccacgcagctgttcccccacatggacagatggacacacagagcctcggcggccactgctggcacggtgtgagcgccaggcatctcccacccgcccctcccgacggcccaaccaggggctgtgcagacgtggggaccacggaaccgagatgcactttagaccagggagctggcccggcctctggcaggccccccactaacttattttgcccggctgaggttgtggggggcgcctcctggggtgcacgattccctcagctctgggtttaatgtattatatttatttggggccgacagtgccccaataaagggtcagaagtggctg

SEQ ID NO: 1913 - protein, 716 aa, Homo sapiens
MFDTTPHSGRSTPSSSPSLRKRLQLLPPSRPPPEPEPGTMVEKGSDSSSEKGGVPGTPSTQSLGSRNFIRNSKKMQSWYSMLSPTYKQRNEDFRKLFSKLPEAERLIVDYSCALQREILLQGRLYLSENWICFYSNIFRWETTISIQLKEVTCLKKEKTAKLIPNAIQICTESEKHFFTSFGARDRCFLLIFRLWQNALLEKTLSPRELWHLVHQCYGSELGLTSEDEDYVSPLQLNGLGTPKEVGDVIALSDITSSGAADRSQEPSPVGSRRGHVTPNLSRASSDADHGAEEDKEEQVDSQPDASSSQTVTPVAEPPSTEPTQPDGPTTLGPLDLLPSEELLTDTSNSSSSTGEEADLAALLPDLSGRLLINSVFHVGAERLQQMLFSDSPFLQGFLQQCKFTDVTLSPWSGDSKCHQRRVLTYTIPISNPLGPKSASVVETQTLFRRGPQAGGCVVDSEVLTQGIPYQDYFYTAHRYCILGLARNKARLRVSSEIRYRKQPWSLVKSLIEKNSWSGIEDYFHHLERELAKAEKLSLEEGGKDRLLSGLRRRKRPLSWRAHGDGPQHPDPDPCARAGIHTSGSLSSRFSEPSVDQGPGAGIPSALVLISIVLIILIALNVLLFYRLWSLERTAHTFESWHSLAKGKFPQTATEWAEILALQKQFHSVEVHKWRQILRASVELLDEMKFSLEKLHQGITVSDPPFDTQPRPDDSFS

SEQ ID NO: 1914 - DNA, 2772 bp, Homo sapiens
ggtcgggtgggggcggcggccgcggaaggccaggccggtgccctgcggggacgcccagcgcagcccagccccgcgcagcccagccctgccctgccctgccctgccctgccctgcgcccggggcgcgcccaccgcgccgcatccatgttcgaacgcagtctcgctctgtcgcccaggctggactgcagtggcacgatctcggctcactgcaacctctgcctcctgggttcaagcgattcttctgcctcagcctccctagtagctgggattacagcaccacaccccactctggccggagcacgccaagcagctccccatcgctccggaaacggctgcagctcctgcccccaagccggcccccacctgagccagaaccaggcaccatggtggagaagggatcagatagctcctcagagaagggtggggtgcctgggacccccagcacccagagcctaggcagccggaacttcatccgcaacagcaagaagatgcagagctggtacagtatgctgagccccacttataagcagcgtaatgaggacttccggaaactgttcagcaaactccccgaagcagaacgcctcattgtggattactcctgcgccctgcagcgtgagatcctgctccagggccgcctctacctctctgagaactggatctgcttctacagcaacatcttccgctgggagaccacgatctccatccagctgaaggaagtgacatgtctgaagaaggaaaagacggccaagctgatccccaacgccatccagatctgcacggagagcgagaagcatttcttcacttcctttggggcccgtgaccgctgcttcctcctcatcttccgcctctggcagaatgcactgcttgaaaagacgctgagtccccgcgagctctggcacctggtgcatcagtgctacggctcagagctgggcctcaccagtgaggatgaggactatgtctcccccttgcagctgaacggtctggggacccccaaggaagtgggagatgtgatcgccctgagcgacatcacctcctcgggggcagctgaccgcagccaggagccaagcccagtgggttcgcgccgtggccatgtcacgcccaacctttcccgagccagcagcgacgcagaccatggggcagaggaggacaaggaggagcaggtagacagccagccagacgcctcctccagccagacagtgaccccggtggctgaacccccgagcacagagcccacccagcctgacgggcccaccaccctgggccccttggatctgctgcccagtgaggagctattgacagacacaagtaactcctcttcatccactggggaggaagcggacttggctgccctgcttcccgacctctccggccgcctcctcatcaactctgtcttccatgtgggcgctgagcggctccagcagatgctcttctcggactcgcccttcctccagggcttcctacagcagtgcaagttcacagacgtgacgctgagcccctggagtggggacagcaagtgccaccagcgccgggtgctgacgtacaccatccccatcagcaacccactgggccccaagagcgcctccgtggtggagacacagacgctgttccggcgcggcccccaggccggcgggtgtgtggtggactccgaggtgctgacgcagggcatcccctaccaggactacttctacactgcccaccgctactgcatcctgggtctggcccggaacaaggcgcggctccgagtgtcttctgagatccgctaccgaaagcagccgtggagcctggtgaagtcgctcattgagaagaactcgtggagcggcattgaagactatttccaccatctggagcgagagctcgccaaggctgagaagctgtctctggaggaaggcgggaaggatgcccggggcttgctatccggcctgcggcggcggaagcggcccctgagctggcgggctcacggggacgggccccagcacccagatcctgacccctgtgcccgggccggcattcacacctcgggctccctcagctcccgcttctccgaaccatctgtggaccagggccccggggcaggcatccccagtgccctggttctcatcagcattgtccctgtccccagccttatcatcctcatcgccctcaacgtcctgctcttctaccgcctctggtccctggaaaggacagcccacacctttgagtcctggcacagcctggccctggccaagggcaagttcccccagacggccacagagtgggccgagatcctggcgctgcagaagcaattccacagcgtggaggtgcacaagtggaggcagatcctgcgggcctccgtggagctcctggatgagatgaagttctcgctggagaagctgcaccaaggcatcacagtctcagaccctccctttgacacccagccccggcccgatgacagcttttcctgaggaccccggccacgcagctgttcccccacatggacagatggacacacagagcctcggcggccactgctggcacggtgtgagcgccaggcatctcccacccgcccctcccgacggcccaaccaggggctgtgcagacgtggggaccacggaaccgagatgcactttagaccagggagctggcccggcctctggcaggccccccactaacttattttgcccggctgaggttgtggggggcgcctcctggggtgcacgattccctcagctctgggtttaatgtattatatttatttggggccgacagtgccccaataaagggtcagaagtggctg

SEQ ID NO: 1915 - protein, 681 aa, Homo sapiens
MVEKGSDSSSEKGGVPGTPSTQSLGSRNFIRNSKKMQSWYSMLSPTYKQRNEDFRKLFSKLPEAERLIVDYSCALQREILLQGRLYLSENWICFYSNIFRWETTISIQLKEVTCLKKEKTAKLIPNAIQICTESEKHFFTSFGARDRCFLLIFRLWQNALLEKTLSPRELWHLVHQCYGSELGLTSEDEDYVSPLQLNGLGTPKEVGDVIALSDITSSGAADRSQEPSPVGSRRGHVTPNLSRASSDADHGAEEDKEEQVDSQPDASSSQTVTPVAEPPSTEPTQPDGPTTLGPLDLLPSEELLTDTSNSSSSTGEEADLAALLPDLSGRLLINSVFHVGAERLQQMLFSDSPFLQGFLQQCKFTDVTLSPWSGDSKCHQRRVLTYTIPISNPLGPKSASVVETQTLFRRGPQAGGCVVDSEVLTQGIPYQDYFYTAHRYCILGLARNKARLRVSSEIRYRKQPWSLVKSLIEKNSWSGIEDYFHHLERELAKAEKLSLEEGGKDRLLSGLRRRKRPLSWRAHGDGPQHPDPDPCARAGIHTSGSLSSRFSEPSVDQGPGAGIPSALVLISIVPVPSLIILIALNVLLFYRLWSLERTAHTFESWHSLAKGKFPQTATEWAEILALQKQFHSVEVHKWRQILRASVELLDEMKFSLEKLHQGITVSDPPFDTQPRPDDSFS

SEQ ID NO: 1916 - DNA, 2650 bp, Homo sapiens
ggtcgggtgggggcggcggccgcggaaggccaggccggtgccctgcggggacgcccagcgcagcccagccccgcgcagcccagccctgccctgccctgccctgccctgccctgcgcccggggcgcgcccaccgcgccgcatccatgttcgacaccacaccccactctggccggagcacgccaagcagctccccatcgctccggaaacggctgcagctcctgcccccaagccggcccccacctgagccagaaccaggcaccatggtggagaagggatcagatagctcctcagagaagggtggggtgcctgggacccccagcacccagagcctaggcagccggaacttcatccgcaacagcaagaagatgcagagctggtacagtatgctgagccccacttataagcagcgtaatgaggacttccggaaactgttcagcaaactccccgaagcagaacgcctcattgtggattactcctgcgccctgcagcgtgagatcctgctccagggccgcctctacctctctgagaactggatctgcttctacagcaacatcttccgctgggagaccacgatctccatccagctgaaggaagtgacatgtctgaagaaggaaaagacggccaagctgatccccaacgccatccagatctgcacggagagcgagaagcatttcttcacttcctttggggcccgtgaccgctgcttcctcctcatcttccgcctctggcagaatgcactgcttgaaaagacgctgagtccccgcgagctctggcacctggtgcatcagtgctacggctcagagctgggcctcaccagtgaggatgaggactatgtctcccccttgcagctgaacggtctggggacccccaaggaagtgggagatgtgatcgccctgagcgacatcacctcctcgggggcagctgaccgcagccaggagccaagcccagtgggttcgcgccgtggccatgtcacgcccaacctttcccgagccagcagcgacgcagaccatggggcagaggaggacaaggaggagcaggtagacagccagccagacgcctcctccagccagacagtgaccccggtggctgaacccccgagcacagagcccacccagcctgacgggcccaccaccctgggccccttggatctgctgcccagtgaggagctattgacagacacaagtaactcctcttcatccactggggaggaagcggacttggctgccctgcttcccgacctctccggccgcctcctcatcaactctgtcttccatgtgggcgctgagcggctccagcagatgctcttctcggactcgcccttcctccagggcttcctacagcagtgcaagttcacagacgtgacgctgagcccctggagtggggacagcaagtgccaccagcgccgggtgctgacgtacaccatccccatcagcaacccactgggccccaagagcgcctccgtggtggagacacagacgctgttccggcgcggcccccaggccggcgggtgtgtggtggactccgaggtgctgacgcagggcatcccctaccaggactacttctacactgcccaccgctactgcatcctgggtctggcccggaacaaggcgcggctccgagtgtcttctgagatccgctaccgaaagcagccgtggagcctggtgaagtcgctcattgagaagaactcgtggagcggcattgaagactatttccaccatctggagcgagagctcgccaaggctgagaagctgtctctggaggaaggcgggaaggatgcccggggcttgctatccggcctgcggcggcggaagcggcccctgagctggcgggctcacggggacgggccccagcacccagatcctgacccctgtgcccgggccggcattcacacctcgggctccctcagctcccgcttctccgaaccatctgtggaccagggccccggggcaggcatccccagtgccctggttctcatcagcattgtgatctgtgtgagccttatcatcctcatcgccctcaacgtcctgctcttctaccgcctctggtccctggaaaggacagcccacacctttgagtcctggcacagcctggccctggccaagggcaagttcccccagacggccacagagtgggccgagatcctggcgctgcagaagcaattccacagcgtggaggtgcacaagtggaggcagatcctgcgggcctccgtggagctcctggatgagatgaagttctcgctggagaagctgcaccaaggcatcacagtctcagaccctccctttgacacccagccccggcccgatgacagcttttcctgaggaccccggccacgcagctgttcccccacatggacagatggacacacagagcctcggcggccactgctggcacggtgtgagcgccaggcatctcccacccgcccctcccgacggcccaaccaggggctgtgcagacgtggggaccacggaaccgagatgcactttagaccagggagctggcccggcctctggcaggccccccactaacttattttgcccggctgaggttgtggggggcgcctcctggggtgcacgattccctcagctctgggtttaatgtattatatttatttggggccgacagtgccccaataaagggtcagaagtggctg

SEQ ID NO: 1917 - protein, 720 aa, Homo sapiens
MFDTTPHSGRSTPSSSPSLRKRLQLLPPSRPPPEPEPGTMVEKGSDSSSEKGGVPGTPSTQSLGSRNFIRNSKKMQSWYSMLSPTYKQRNEDFRKLFSKLPEAERLIVDYSCALQREILLQGRLYLSENWICFYSNIFRWETTISIQLKEVTCLKKEKTAKLIPNAIQICTESEKHFFTSFGARDRCFLLIFRLWQNALLEKTLSPRELWHLVHQCYGSELGLTSEDEDYVSPLQLNGLGTPKEVGDVIALSDITSSGAADRSQEPSPVGSRRGHVTPNLSRASSDADHGAEEDKEEQVDSQPDASSSQTVTPVAEPPSTEPTQPDGPTTLGPLDLLPSEELLTDTSNSSSSTGEEADLAALLPDLSGRLLINSVFHVGAERLQQMLFSDSPFLQGFLQQCKFTDVTLSPWSGDSKCHQRRVLTYTIPISNPLGPKSASVVETQTLFRRGPQAGGCVVDSEVLTQGIPYQDYFYTAHRYCILGLARNKARLRVSSEIRYRKQPWSLVKSLIEKNSWSGIEDYFHHLERELAKAEKLSLEEGGKDRLLSGLRRRKRPLSWRAHGDGPQHPDPDPCARAGIHTSGSLSSRFSEPSVDQGPGAGIPSALVLISIVICVSLIILIALNVLLFYRLWSLERTAHTFESWHSLAKGKFPQTATEWAEILALQKQFHSVEVHKWRQILRASVELLDEMKFSLEKLHQGITVSDPPFDTQPRPDDSFS

SEQ ID NO: 1918 - DNA, 1838 bp, Homo sapiens
tcagaaggctcatctttaggggtctcattgccccccgaaatcaagcttgggagaggctcacactggaaagggcggggcaggatggggtggggaggagatgaaggctgaggccccatcactcatagagagggtaggcagggccccccatcctgcgttattttattttattcttttgagacaggatctcattctgttgcccaggctggagtgcagtggcacgatcatggctcatcgctgcctcgaactcctgactcaagtgatcctcctgcctcagcatcctgagtagctgggactataggcaggcaccaccacacctggccaattttaaaattttttgtagagaccagagtctcaccatgttgcccaggctggtctcaaactcctggcctcaggcaatcctcccgcctcggcctcccaaagtcctgggattgcaggtgtgatccaccacgcctggccctgagttaaatttttatcattttcctctctgtcaaactgctaagggtgcagagttgacgtcacagattggtgctcacagtagatgtagactgagcacttacctgcagctgggctgttctaggttttaagcatgactgctttatccccacagccagcctttgagaagatgctcttgttatcccagtttttttgagacagtctcgatctgtcacccaggctggcgtgcagtggtgcgacctctgccttccaggttaaagcgattctcgtgcctcagcttcccaggtagctgggattacaggcacccgccaccacgcctggctaatttttgtatttttagtagagacgggctttcaccatgttggccaggctggtcttgaactcctgaccttaagtgatccaccggtctcagcctcccaaagtgctgagattacacgcatgaggcactgtgcccggccgttatcccggttttatacataggtaggcgatatgaggcatccagaggttcgaggagctcaggagcttgcccgaggtcacagagtgggtaatggtgacagctaacatgtgctgagcacttagtgtacaccaggttctcagtgctcttcagaaccctgaaataatcctgtggagcagatgtgttatagacccgtatttcaaatgaggggattttggctcagggtggttacgggacttgcctgaggttaactgaggtaacaagcagcagagccaggatttgaacctaggccatcggggtcacaggcacacactaagccccttcctctgctgcctctgagaagttaaactgggtgcagcatggctgtgctcttttcaccaagggaccctggggtggggcagtatggcctctagaccgtcctcagtttctcaatggcaaggtgggggtgggcgacatcaccccccagcctccagcgttcacccccgaccctgctcacctcctccccgcagatgaagttctcgctggagaagctgcaccaaggcatcacagtctcagaccctccctttgacacccagccccggcccgatgacagcttttcctgaggaccccggccacgcagctgttcccccacatggacagatggacacacagagcctcggcggccactgctggcacggtgtgagcgccaggcatctcccacccgcccctcccgacggcccaaccaggggctgtgcagacgtggggaccacggaaccgagatgcactttagaccagggagctggcccggcctctggcaggccccccactaacttattttgcccggctgaggttgtggggggcgcctcctggggtgcacgattccctcagctctgggtttaatgtattatatttatttggggccgacagtgccccaataaagggtcagaagtgg

SEQ ID NO: 1919 - protein, 97 aa, Homo sapiens
MTAFPEDPGHAAVPPHGQMDTQSLGGHCWHGVSARHLPPAPPDGPTRGCADVGTTEPRCTLDQGAGPASGRPPTNLFCPAEVVGGASWGARFPQLWV

SEQ ID NO: 1920 - DNA, 24725 bp, Mus musculus
gatttaaggcctatgaaaatcttgcccagccaatatggtccccctttttttcccgtttttcctcgatagtgtttctctgtgtatccttggctgtcctcttactcatagatccgcctgcttctgccttcccaaaaggcatgcttcccacgcccagttcagtatgatttttttttcctctaagatttattttatgtgagtacaacagctgtcttcagacacagcagtagtgagcattggatccctttattatagatggttgtgagccaccatatcgttcctgggatttgaactaaggacctctggaagcgcagtcagtgctctaaatggctaagccatctctccagcctttttgttttgagacaaagtttctttttctttgtgtagcctaggctgtcctagaactcactctgtagacagggctggcccagaagtcgaagatctagcctgcctgtgcctctctcagatgatctgattgactccagcctgtcctactttgtccccctatctcaatagccccagggccttttctgctctgtgtcaatctcccccacccctaccccctcgacaccttctgtgtcaccttctgccctggtgcttctgtcattctctacaacttaccagcccctcagcccacggccttatgaggccttctgccacctccaggacgatgtcttaatccttcaaccaccttcactcacttcagcctcactgactgcatcccagtttcctggggctgctgccatcttacatggtgctcctcgtctttggggaaccaaacttgcttctcatttaggacaagagattttatctatagcagtgaatgagatgcattctgactttgagccagccatccttgacagatttaaataaacttagcacagggaatctctgcagtccattcggtttcctacaaatacagattcctaggaggaaactgaggctcagacagggaaaggggattggtcagggctaaacacttacgacgctgagctttatctcactgtagaaaggcaaacaaaacaactttattttttaaaatgtatttaatttggattttgtctgtgtgcacagtatgtgtagaggccagaggctgaagtccaaatgccttcctaaatttccttgagactgtctgcatagaccagacaggactggaactcagaagtccacatacttctgcttctcaagtgctaggattaaaggtatgcactgccttgccaggaaccactttttttttacttttttttttttttttaaagaaaaggtctgagccaggcgtggtggcccacgcctttaatcccagcactcgggaggcagaggcaggcggatttctgagttcgaggccagcctggtctacagaatgagttccaggacagccagggctataaagagaaaccctgtctcgaaaaaccaaaaaaaaaaaaaaaaaagaaaaaaaagaaaaggtctctcggtgacactggagcctgaacagcaagccgcagagatcctgcttctgcctcccgagtgctgagtgctggcatgcgctctgtgccccgcttttaagtgagggctggggatggaactcaggtctttatgcttaggcagcatccactttatactgactgccctagccccattttggagcttttgaagcaaggtctcatgtagctcacactggccttgtactcactatgcagttaaggatgaccttgaacctgatcctccaaatgctgggattacaggtctcctgcatcaagcactgcacagtttaaagtgtagctaacacacacctgtgagacctgccctggagatttaagacctggcactctgctccactcacagctacataccccagcaacctcagagaggtctaccataagtcagggttaaaggtggagcttaatggtagtggttgcctagctcagtggttctttttttttcttttggtttttcgaaatagggtttctctgtatagtcctggctgtcctggaactcactctgtagaccaggctggcctcgaacccagaaatctgcctgcctctgcctcccaagtgctgggagtaaaggcatgtgccaccactgcctggctcagtggttcttaacttgtggctcttaacccaactttggtggtcagaagaccctcccacaggggtcatttaaggccatcagaaaacagattatttacattatcattcattgtagtagcaaagttacagttaggaagtagtaacaaaattcttttatggttgggagggggcagcacaacatgaggaactgtgttaaagggtcgtagcattaggaaggttgagaaccactgccctagctgggagaagtgccactcataacaacagtttaaaaagaaaaaataaacagtccagctggatcctgccacaagccaattgtgtacctgtttattccatgctggaacacggggcgaggggaaggcttgagattcgggagacttacaaggctagcaatctcagagccacagaagattcccaacttgctccccagggaacaaaaacagttatgcatgggcggagagggctcaatgtaagcaccagttcccagccccaggggactgagtgtctctggcctcttgggcatctgcactcatacctgccccaccccacacatgtaactttaacttgaaatctttttgaagaaatcagtaacctaggcggaaaaaatgctcggcagttaaaagcactgactggtctgctagaggtcctgagttcaaatcccagcaaccacatggtggctcacaaccatctgtgatgagaccagacaccctcttctggtgtgtctgaagaaagcaacattgtactcatatacataaaataaataaataaatcagtaagccaaaactggagaggcgactcagcagttaacagtgctttttcttgttgagaaccaaattctcttctcagagcagatacctggccactaactgcctataatcccagtgctacaggatataatgccttcttctggcaccttccttacatgtgtgcacacacataaagacacacacacacatacataaacaaaaaataaagttttaaaataaaagggcttaggtttggagagatggctcctctggtgtgtctaactaaagacaggctcagtgtactcatatctaaataaatcttttaaaaaggtaaaaataaaagtgcttgaacacacgaagtgcacacatgtagcacacacacatacatgcaggcacaaacttacatgtaaagtttaatatttttgcttttgttttttgagatgttctcactgtcctgcccttgcagtcctggaactatgtagaccaggctggctctagattcagagttccacttggttttgcctcctgagtgctgagaaaggactaaaggagtggcctccacacccggtacaaatcccaacactcaagaatcaagagttgctggatagccaggctacatagagatgttctgttttaaaaacaacaaaagaggtgggttgtgataaagaagaccccaaccgtggcgtctcaccttcgtgcattcactccagtgcaaatgtacacacacacactttcgggctctagttaaagaacaaagtttttaatacagacacattttaaacagtctttttggcaaaaaaaaaacaaaaaacaaacaaaaaaaaaaataaaaacataaaaaaggtagggcaaccaccaccctacagccctgatgtgtgtgtcgtcatatttcagtcatctatgctgggtcagaggaaacgttcagtccaagggcaagttcaagtccacaggtgaggaggccaggatgcctgcctgcagaggacagagagccccaggctggtaagagggaaagaccccttgagtgggacacttaagtgattccatggctgttctgtgctggccccagtccctgctctaaggacggaggttaagcaacactgatgccctgcaggctgtctcccaggctcttctgtcatctatgtcaatagaagcagggccgctgagctctacctgtccctcctgtcttgccatctgaactccgtcactcctcgcctccccattccacggaatgcagaaggaacccagctgatgctcacaacagtacctctgacctggtacccacactcagtctcggagaacctgctctctcgtcagagtcctttctgctgggactgacacccatctccaggcctttcctggtctatctaagaggatgggtctgttcacagactaccaatatctcagaacccccatctcagggtggtcaaggacccttctgagcccggctgtgtctctagaacacaggttttttggtttttttcctctccttctgaagtgctggactatctcctaacctccttttgtttgtgttttgcctaagctgaccgtgaaacctctggagccaaggatgtctttaaatctagatggtcttgcctcagcctctctggtacttgagatgacagacttgcaccaccagagacaatcatcccgtcccgtcccgtgtcgtgtcgtccccccccccccctccccgttacaccaccaccccacctgctgtgcctcagccatctccaggatcttactatgtaaccctgactggtcttagaacccctaggctggccttgaccttatagagatccgcctgcctctgcctcccaagggttgggaattaaaggcgtgcgccaccactgcccggctacagactgatttctattgcatgtgtataagataacagtcagcggccagggaagcccacagagagttgatgtgtgggtacgtgggaagagccatggggcacaaactactggagactcgagtcaccagataagcaccctgcatccttgaatcccattctccactccacaaccaccctaaacgacgaggaggatgagactggggagctgtgtgagctattctcacaattgctggttcaagccagagggcaacagaaccgacctccttagcacagtgtctggcatacagcaggtgctcaataaacacaagatggattgaatgtaagagctgggcgttctggaagaaaacctgtcaactgtcaagatgtcagtagggttaaacagagacctggcagggtgtgtgtaacttacccatcccccatgggcctggacccaaggcaggaagctgtgtacatgctcaacactgaggttggccaggggacccccaagcccagccacacgccggctcaattccatggctagtgccaggcgtgccagaggatccggggatggcggtgggggccccgggcacggcagagacgggctggagcaatttggggaggagctgctttcccggctagagaagagttccacaaggcgggcgaaagagcctgcggacaggcgggccagtttacgatgcagagccgggtcagatgccagctgaggggcagaggaacagtgtaagctaccaccaagcctgtgtgaccagcctgggggccaggcctttccagcaccaagtccctcccacccaagctgcctctatggccttcaccagtagactcccaagaaggggtcctagaatcagagccaagaacagttctgagttctaagcagtggattctccgttagtccttaaacccaagctgggcatggtagcacatgcttttaatctcagcacttgggaggcagaagcagacatatctcagtgctcaataagttcaagcctgatctacagagtgagttccagcacagccagggctacacagaggggcacagggggacgagtacctgataactgctgttacagtactgttcagttttcaaagcccaattccaggaaactctgaggctatgccctctcaggccggaatttcctccctattctgagctgtgtccttagggtagtcagtcagtcagtcagtcagggttctttggttttagagacagggtttaactctgtagccctggatggccctgacttcgtagagctctgcctgcttctgcctccctgttgctgggactaaaggtgtgtgctctcacattccaccttgttttgttgaaacaaggtctcccagtgtggccttggcggccctggaactcttctgtggccaggatgactttgaactggtctccggcctcatacccgagagtgcagggaggagggctgagcctgctctactccagtccagttttacactcctgccaggcccttctctcacctggctcttggttctggcctcttcttttgtttgctgtcctttgtttttcagtgtttaacttgggggagagggtgatggagacaacgttaaggtaaggaccccagcctgctgggcaagggctctgtcaccaagccaattcctaatgaagcctctggtggcttctgttgcctaggtcccactgcttgttgatggcccatgaaggacactggtgttaagtcctgctgcggtgaggcatcaaggctcttgtgaagatgctctgatgtttactggagccctggaaccacacccagcatcaaaacaaagcagcgccagcgtctgccccctattccacaactgtcctctccatagcgtggagtagaggctggtcaccttttggttgatgacttctgcctcttcctccagcaaggctaccagccgccttagcagggcttccttctccgtgggtgggggtccctggaactctgggggtggggggcagaagagaattggactgggaagggccctggctttgctcctaccatcacccctcaccagggctcctctgctgcttacctgaactgggcggggacttcagttgctcctgcaccaattgttccagccgctgggcaaccagggcatagaactcggaagaggctgggcctgagcagaaagaagcagcgacgctttctgtttacagaacacggtatttatggcgtctctcctaaccatcttgccacacagcaacaatttccacttcacaaaaggatacacctcggccatgagacgttggtaaataaaagatattaaatgaacatcctcagcctttctactttgttgcaccctcaaatccaactgagaatattcacgctgagctctggagaccattgcatccagtcaggacagacatgcagcgttcctaccatcaccccctagcccttgtgcagttcacatgcagcaacagaccacagggctcgttttaagtaagccatctaaccaggcacgcctctttagagttattttcaagttttatgtgtgtgttctgcctgcatatgtgtctgtgaaccacttgggtgcccagtgcctgtgaaggccagaaaaacagcatcagaagttggaggacataacagttaagagaaccggctgttcttccagcaggctagggttcaattgggtggttttcctgcacaaatgtcatgtgccaagtgcatgcctgatgatgccctcagaggccataaggaggcccctttccctaatccctaatgtgtgcttttcatgctccatttatgtgctgttgggaactgaatacaaggcttcatgcatgctaggcaggcactcgactgactcaactttttgtagtccaggtcggccttaaactcacagcagtcctcctgcctcagcctctctcaggtgttgactgcaacaatgtgctaccacacttgggtttgttgatcaccaatcaagtccaaagatcccttcctccagcctctttctgttacttaaaaaggaggaaggatgcgcccagtcagattaccaactggccagggagttacgactgacaactacacttccagtctcttgtgctggggtactggagctacaagaagagccagagaagcacccaaaaaggaaaaaagataaatcacccgaggacggtgccaaagcacctctcccgggtcaaccacggaattgctctgtagaagtctaagctggggctccactttattgtgcatgcctgtgatttcagtatgaagtaggctgaggcaggagggctccagcaaatgtgattatgtctcaacgatccttttactgtagcccttaagcagtgcaccccaaaatccatcaaagggctagccagcccttccttccagccctagcctaggaaccaagcaggagctgtcaaaatggtggtaccacgacatcccctcagcatacagccttggtgaaacacgactgcagggggcgtccacagtggtagcagcatctccatcctccctgagcagcaccgcagagatggcacctcagccaaaacggcctgcaaccaaggaggactgacttctcatcctaacccatgggccggcccactgcaggggaaaggcaatggcaaaagctgccaggccccgagcttcccaagctggacatctctgccctgagaagccaccctctaagaagtcccagataagccccatcctttgtccaattccctgctgtctgatcccaggagcagagggcggccagccatggtgtcctcactccactctggactctccaacaaatctctttcatgagattttctgcctggtgtgactctctcatcggaagaagccaggaagcaaagaagtggagcggtgctgaggctctactcccttgggagccacaatgcctctgctgaggagacttcctctcaaagctgtaagggtcctggcccccatgtctcaggatacccctccatcgggacacgtcccacctcagcgctgtgtggctcttgggcccccggtctcaggcatcccttgcactgggaccccttctcccttcagagctgcatgcttcccgggctttggagccccagggtacctcctatccaagcacaaacacttacacttacccgctagaaagaggtgtgacaaagacttgaaatggttatggcttgtgctgaagctgaaccgtgttgactttataatgggtcctgtctggattttttggaaccaaaactcctagccctgaaagtttcacaagtgacctgaataaatctcttaccaggctcggaaccatagcaggggcggaggggaaggaagtggggcctagaggactccgtggggggagctcctctccccaggggacaagggaggcatcttcggaggcggctcaggaaatctgttgtctcctcttgggcaggactcctagggacaagaacctcggagttatcccgaaggggtctgggcaagtgatcccttcatcctttcatggaagatcactcttgaaactcagcccaggcacatggagttaggtctgatgggagtagataggtttggaccacaagactcaggaagatcttcccatcaaaggctgacgctgggggagtggaactcacctgggtggagttgggacaggggacccagcgacttcaccgcgcttaaggaaggccgtcagaaccttcagtgtgtcctctcggagacccaactcttcagagccggccatgggggtacctgaggcagaagacagaggatgcacccaagtgcagggataactcaaacttctgaatcactgaatgaagagggcgcctaactccaaggaaaaggtggtttttaagggccagtggggcagttgattcagttgaggagaaacggtctgaattactgagtctaagaaaggaggtaaatgagtgcttgaactcttgcaggaaggagcgggaagggggtttggagttccctctcagctagcagcgccaaagaaggctcgaagaccgtagagaatagggaactactaatcctagtatgctttgcggcaaacgctggtccgatttccccacttttcaccgagcagtctgctgggagatgtagttccaattttacctctggcgtgcaccgggagaccccgggtgcttggaagtcacagcttggcaggactggctgtggcctttcctgcaaccctgtcccctccctggcacccagctcacctggctcgcggttgtgtccccgtcgcactggcgtacacgctttctcacaatttctacaaacttttacttcggaagttcaactttcccacgcctgcgcactgggccgacacggcaaccgccccaacgtcgaaggggtggagccttcttttgcggtcatttgcatatggcgttcccagcatgcctgtaggcggaaggccaaaaaagggcatttgagggagttaggcctgctaagccgaagtgcgctccgggatttcttgactttatttcgtcaatgttgagaaaaactttttatatctcaaaatatcgttagaaaaggaagtcccagcgctcggaggcttagctgacaaagaagggggttgcgtggctgcgagtctcagaactactgtttgggagccccaaaaccactgctggcacccgcgccgcacgggcgcccaattcctcccctggtaggtaacgcggaagagccgggagggtggcggcctcagggcgcaggatcgggcaaacctgtcgctcagaagctcggctaccgaaaagcagaatggccacgcgttgtagacggaagcctgcagtctcagcatccaggctggaggcagtaaagattgctgtaagttcaaggccagtgagctccaggccaggctggacgacagaatgagcgccagaccaacatgggttaagcgatttgaagaccagcctgagctactgaataagtttgagggtagcctgggttacagagtgcattcgaggccagccagggccacagagtgagttgaagaccagccttggctacatagcaagttcaaggacagcctatgctacatactaagaccctgtctcaaacatccgtaaaaacaatataggaacaaaaaacaaaaaaacagaagaagcgacagcacctgggagaagactctggaaatgagtaagggttttctgcaagggtgaggcggttgtgagagcagttaggatcctttaaagacgagggaaagaggactccactcttgaaatagggtgccagctttggataataggagtttacatttagaaaagggaaggaacctatgggtagagttcatatagaagactctggggggtaggagaggcggtcccgttggatttggaaaggtgggaaggagtttcccgtttgtacacaatggtgaaggaagacctgtgttgtggcgggtcggagaggtttgagtgcatttgccccgtgacagacaggctcaggaactgtcctgtggttcgcaggctagagcatggaaaccccgaaaccgcggattttgccctggctggtgtcacagctggacctggggcagctggaaggcgtggcctggctggacgagagccgaacgaggttcaggatcccgtggaagcatggcctacggcaggacgcacagatggctgactttggcatcttccaggtgctgggggaaagatttcagacgcatttctgggtgtggctggaccagggcagggggtgggataggactggagggacagacgggaattgattggcagattctaggaacagaatcctgaaagccaggttgcgtttcttaagaaacgttctggagcaatggttctcagtccctgggacgcgacccctttgggggttgaatgaccgtttcattgaaaaataagtattttgacttctaacaaaactacagttatgtaatagcaatacaaataattttggggctgggggatcactgcaacacgaggaaccgcattaggatagttgagaacagctgttttagagggcgggaaatctttaggagtgggctcttgattttagaacccttaagccttaagagttgagactgccctcaagaggtgttatttgcttcctgagcagcatggtagtaagaatgtgaggtggcctggggtgaggtaccaagtagataactagaatgatggcttaaaaaaaaaaaagccggggctggtgtgatggctcagtgggtaagagcacccgactgctcttccgaaggtccgaagttcaaatcccagcaaccacatggtggctcacaaccacccgtaatgagatctgatgccctcttctggtgtgtctgaggacagctacagtgtacttacatataatgaagacagctacagtgtacttacatataataataaataaatctttaaaaaaaaaaaaaaaaagccttgaaggtggacatggtgacatgagtttgtcagcaccgtgggcagggcagagcagggtggagggtgaggtctcagcttggagcccacctttggttataatgtgtgaaaccctgcctcaaaatcaaaacgatttttctttagtgtggaaatagtgggaaagtatgagaacggaggtcctgggggctctgtcatgaaccagaagtggatggtgtgtggtgggaggtgtcagggcctcgggccagagtctaagtcgtcttgttgtggaatccctgatatttcaggcctgggcagaagccagtggtgcctacaccccggggaaggataagccggacgtgtcaacctggaagaggaatttccggtcagccctgaaccggaaagaagtgttgcggttagctgctgacaatagcaaggacccttatgaccctcataaagtgtatgagtttgtgactccaggtgcgtgtgacaaggctggcctgggggtcacagaaagcttgggatcaggagggtctctgccacctacacgctcacttccactctggacaggggcgcgggacttcgtacatctgggtgcctctcctgacaccaatggcaaaagcagcctgcctcactcccaggtgagaggcagtcgtcccgtgcctcagccttcccccccgccccccaccccccagcccttctcccgggacctccattcctccaccggttggctgccctcctgactcagctgaagctgttgaccagctaacaccctcctcctcccccaggaaaacctaccgaagttatttgatggcctgatcttggggcccctcaaagatgaggggtcctcagatctggctattgtttctgatccttctcaacaactgccaagccccaatgtgaacaacttcctaaaccctgcaccccaagaaaatccactgaagcagctgctagctgaggaacgtgagtgccagctgtggcgtgggaagggctgcggcagggacagcgctccttaccctgctcctctccatttctcccctctcactccaccggtggctcagaatgggagttcgaggtgaccgccttctaccgaggccgccaggtcttccagcagacactcttttgcccggggggcctgcggctggtgggcagcacagctgacatgacactgccctggcagccagtcaccctgcccgatcctgaggggtttctgacggacaagcttgtgaaggagtacgtggggcaggtgctcaaagggctgggcaatgggctggcactgtggcaggctgggcagtgcctctgggcccagcgcctaggccactcccacgccttctgggctctgggggaggagctgcttccagacagtgggcgagggcctgatggagaggtccacaaggacaaggacggagccgtgttcgacctcaggcccttcgtggcaggtgagtgagcaccctatggaactgacaggccatggtggctgattgaattcagagtctgctactaagttttgtggcaaaaagctaggcctgtgcctccaagtccaggggctggctgcttagactgttgaagctaatgtagtacaggccatataagacactctggtgtgtccacatctcatggtgtatacagaaacactgctgaggctgggagcttgcctcagtggatagtgccccaagattacgtcccctatggttgggatgccatgtgtcagcaaggtagccagtttgaagttgcatttatatttgaaactttagttttctgaggcagggtcttgctcttactgcttctgctagccttgaactctcatgcctcctgccacaccctcaagggctggcatcgagtgtcagtcagagagcggcattgggccccaagcagctgaggaaacatcccaacagcctcctgagctgcgagcccaccgtcctcctcactgccgctgctgcaggaaggaaggagtggggagcacttgtttgtgtctgtagggacttttccagataggcagtgtatagcagtgtcagggaagatacaagttgagctggtagacagggtagaagccatcctttcttttctgacctaactcttgggttcccagatctgattgccttcatggaaggaagtggacactccccacgctacactctgtggttctgcatgggggaaatgtggccccaggaccagccgtgggtcaagaggcttgtgatggtcaaggtgccagctgtctcatgctactggggatgggagggtccacttgtggaggaacctgcagcaccccgggactaggaccctcagaagcccctctgagaaatagcttacccaacaggcctctgcagccactgttacccttcccagaagcctctgcgtgtcctccacaggacttattcagtatcctgagcttattgtgactctagaccctgtagctggtagctgcaggtctttgcagcctttgaagaatgtggctcccaggggcttccattaattaggtggggcggtcagagttcctaacagccctaggctgagtgagggtccaccctgggttatgctggcagcccctagctgactagagatctgtcctgcctccttcaggttgttcctacatgtcttaaggagctgttagagatggcccgggaagggggagcctcttcactgaaaaccgtggacttgcacatctccaacagccagcctatctcccttacctctgaccagtacaaggcctacctccaggacttggtggaggacatggacttccaggccactggaaatatctgagccccactcagctgctaccaataaagcagtttatgccgccatcacatctgctgtcgactgcgtctaggctggtggttattctacaaggctcagtcttcccatctgcagctgaggtctaggtgctccaggagggaggcacagggacaaaacacagcatggctgccaaggtcgtggagaaagtatcacaaagaaagcaaggacaagacaggtccagagctgcacacacattgtccctacgtggagcaagggacactgtcacaggtggtgatggttggcaaccggcaagcttgctgtggggcgggcgggctgactcaccaccacggactgagtcactgcagccccacagtgctactgataccagaggccactcgggtgatgctcaaggctggaccctgcctcctgttacccccatatccccacattcctaagtctggtgtgacaccatcatggttccccactcacacaccccaactctttcctcctgaaaaaaagcatttcatgattttttttttttttttttggagacaggatctctgtagagctagcggtctttgaactgacagagatccatttacttcaagggtacaccactacgcctgtctgtacttcatgaaatctttaatgaaattggagggggcatgacagaagggctggggctgtcgggggcaggctgaagggctaggtcaacgggcaggaacacggctgggtggggggctctcctcttcctcacagcaaccttccccatcatcccactggggggggggggggcgtagtggggaagtggagccataaatatgtccagaatctcagaggcacagggacagggtaaggatctcagagagggggcaggggcaggcctgggccacccttgtctgggggccctggttccttgggtggccgaggaggtcctggggggtcccccggcttgcgaccgtgcttgcggaagtagcggtagcgctggacgtaggccctcaccagattgctcaccttgacagggttgatctccccgctcttgctgtggcagatctgcagaaccaggaacaactgagtccctgcagccccagggcacctcaaccctgactcaatcttggccagcctacactatccccctctcctggacccaggtccccagtcagtccccttggccccaccttgtggacagccttcctcaggatgtccttgtactcctccttggtgatgtctttcttctggtagtatggcttgatggccaacttcacctcctctactgcccgctcctgtgtgtggagcttcttcaggtactggtgggtgagacaaggacagtcaagaccaaacaagtgcagccccccttaccctggcctgcagttaccccaggctagtagacacttataggctagaccctgtggcaccctggcctacccaggcccagcattctgctgggagacaaaccagtcaaacactatactgttcttttatgcaatgctgggattgaagctgagggcttgtcttttttgtacagtatctctaatttcaagttgtccattcttgccctcaacttttttttaaagattaattaattaattatatgtaagtacactgtagctgtcttcagatactccagaagagggcatcagatttcattacagatggttgtgagccaccatgtggttgctgggatttgaactcgggacctttggaagagcagttggggctcttaaccactgggccatcttgccagcccccttgccctcaacttttaaatctcctgcctcagcctcaagtagtaggatcagaggcgtgtgccccacccccactctaccagctggctcacacctactcctaagcagaacatacagggttattctgaccgcagaccttcttaagtgacagggataccagcttagctgctcatagcctgttctggttcaggtcacatcacctgagctctggaagaagcacaggaggggctgagtggttgagcctaggcagctcaggctgctaaggtggacatcaaaaggggacccagccttccacccttggggaactagatcccgtgattcatgaaaaatgggacaccaccatcaaaggagctgtgctgggagactgaggttcctgggatagcctggtgtccatgaccacaaggaaagctagagctgctttcccaaagcaagtgcacgaaggcaggccagagacaagtacaacagagcccaatacacatgctttggttcatagggcacacatgtcccagctatagggagagacagtcttagctctatgggccatgagattctcaagtaacacagaagaggggctgcctgccatcccataaaacacttgctaagaaaagacaaatagcccgagaggcctggctagcagcacaggaatgtgaaccgctctctgagctgaggccatctgtttcctgttcaggcctactctgaggcagagcagtgggtagcgccctcagacagtgctgttggagccatgaccaggccaatccagccagataggatttaaaggaagcagctctaaactgttctttcttttgactgtagggtcctcactccagctgagggtgtccttgtcaccacctccatgctagagttacaggcctgagtctgtacagccagcctggccctaactttttgacaaacctatgtctcctagttacataaaggtggggagcaactgaggtaattaaaagaggcatttatacatacatgtatacatatacaaactagaagtgttttaaattcttctacacactaattcttcatttttgtttgttttgttttgtttttttcgagacagcatttctctgtatagccctggctgtcctggaactcattttgtagaccaggctggcctcgaactcaaaaatccgcctgcctctacctctcaagtgctgggattaaaggcgtgcaccaccactgcccggcttacactaattcttttttatctagaattgagggtggaatccggggcttcatgcatgctgggcaagcactcagtaactgagctgcacctccacccagcactcagccccattcatctagtcctttgactctcccagtcaatctcaccttgtcagtgtccccacgtccctctgagctgctgctgccctctctcttgtcagatgcaggggctagcccagtgggggtaggaggggtagagccacagcctcctatggggaggctgccaggaagtaggtagctggaggggcctgggggcagacccaaggaagtgggcacgggagctggggtcaccccaagagtggatgatggcttccggtggctgagaatctgtgagaagagagtatgatgagccaagggaggtggaagggaagagggggctttgttccccctctgttccctcaaatttcccaatggtgtagaccaacaggctcctcttctggccaataccttgccctaaggcctgctgggagttgtagttcctctcctaccccgaagcaatggacaaaggaaggggctgtggggactcttccccatgggagcccacctggttggtggcctggatcagctcctgggcctttgcgcggctggccaggttggcttcttccatcttgaacagcagtgcagtcactgcagtggacagagggaggacaatcaaggcaggtaccaggatggagagcagccaggttcctcacctgatctcaggacatgctatgcaacctcagctcagaacagagaaagggacctcaccactgagaaccactcaaggggctggctgtgtgacacggagtacatctgcttactgacccacccaagtcccagccgtcccccacctacaggaaaccagcaccctacttaagctcctcactctcatcctgttctatctagttctgcacggaccaatctcctctgttccaatagctccctgcttgccagagcttggagtagacgctgcctgttctgtccatccaaccctacctacccatccctctccccacttccgaagactcacaggccaggacaccactggtagtacagtccacaccagcaggcaggttccagggcatgggtgggggtagcgttggcagctgggagatcctagcagctggcccatcctctgcgccagagtctccggctgtagaccctgcactgggggcagtgcttggggcagctgcagcggtgctggtggctgtggtagtggcaggttgctgctcctcctcctcttcctcttcttcctcctcttcctcctcctcctctgcccctactcggaccccagtgtcctcactggcttcctctggtaggaaggagacttcaggggtcttgcagctgctatccacagtctgggagtccggggtgagtgcgggtggaggtggggccaccttaggtggtggggtactgggggccttggtggtccgctcctcccctgaccatgatgtttcctctgtccccttggcacttgctgcctgactgcagctgtcggccttggacttcttcagtgagccaggcccaccgctggccgtgctactgcctccgctgcgaaccttcttcctcgtcttcgaaggcttcgtctttcccttggtccccttggctttcttggccccagccttggccttggccttggtctttttgggcttgttgctacccggggccaccttggccacctctgcaggagcccgctcatccggcttgaggaatggtgagcggctctcacggtcacggctgaacttgaccccaatggagcccaggcctgaagacgaggaatccttggcaggggtggtgctgctgacgccctctcggatgagcacagccaccttggactgcagttttaccttgcgagaggagcaggaggacgaggaggacgaggagccactgcttgggggggctttgggcagtggcccggagccaggcgtcgagtccttaggtggccgcgtcttcttggatgacctatccctgtctcggccccggtccccatcgagggccttccgtcgagaccctttctcccttgaggatgaagatgaggatgcagcccctgaacgcctccggtccttgtcactcttgccaccccgctcgtcagcactcagaccctcagagtcatacaggacctcccgcttcggggacacagcaggtgctggtgaaggtgcgcgtggctccgctttgtcggggcgacctactgtgatggtccgtttgatggcgaacaggtcgtgatctgtgaggtcctggatagagggtggcacggcccctcggcgtcggctgtcacggtcagagcctgagggaggcactgatgcgggcagcttctccaagtccccagaacgcttctctgcccgggagcgcgagcgcttcttcttcttcttgccaccttcgcgccgcttgccccggtgccgttcacgtcgtgaggaggatgaggaagatgctgctggaggtggagaggctgagcgccgtcggcgcctgcgcttctcccgggaacgtgagcggtgacccccacgtctgcggtcagcgctgcgggagcgtgatctgcggcgagaacgggagcgtgatcgacgccgggccgtggagtgtgaaccaagcttgcgctcacgtgaacggtgcttcttagcttcccaggagggtgaatccggtggtgcagggtccccgctgcgctgccgctcccgtctagccttcttccgagcaggaggtgggcctggcgaggcagagcgctggcggtagcgctcacgtcgctgcgttaggatcttgcggcgcaggtccaggccgccccagcgggcatcagcggccggtggtgcaggtggctcacctaggtccacttgcagtgcgccctcgccatcagagtcagcatgtagtgacaggaagtcatcaccctcaggggcacgtggtgcagaggctgggggcgcagcaggggcggccaccgaagccaaggtggctacagaggcaggaggctgacgaggtcgtgcagcacggaacagtgaaactgccaccctgggctcctcctcaggctgcacaatctcgccctcctctatctccgggtcagtcgggggtagtggtggcagcgaaagcgctggtgcaccagccgttacgacttccaccgaaaccttgccctcatggcaggcctcagcctcaggtcccaacacaaagaccctgcggcgcggggccccttcggcccgagtagagtcagcctggggtggcgtccctggggctcccagcgtctgcgggggtgggggttcccggcgggggctatcgtcatctgggaagtcctggctcaagctgttgtcatcgtagatgccagccagggtttctgagatgcggctgatgctctgtgacagaccctcttcttcttcctcctcctcctcttcctcttcttcctctggtgagggtgtcccagctgatgagctgggattggagcccgtgggctcaaaggggtcatatttttgctctggggctggcggcggggagtaggcctcatcggtggggtggaagggatcatagatgtcgaatctcggggcaggcagagctgggggaggtgggggtggaggaggaggaggaggagaaggtgaagatgaagatggggaaggggaaggggaggaggaggcagaggagggggcaggtggtggagcaggccctccatcccctgtgcccaaggtgaggtgacgggaacaggcaggtcgagatgcatgggactgtggagaaactgcagagaacagagtagatggagtaatagtcagtgacggatcactcctctcccagggcagaggcctgcacacagaccagcgctgcctcaagggcaggagagcacactggggtggtgaagttggggactgggggtgtggctcagctgcagaacactggccaagtgtatgaggacacctacaacagcagaaaatggcccggatgtccacccctgagcccaggcggagcactgacttaatctcacagaccactggctcatctacggccaacaaagtgccttaactaatacagtgctgtccccacaggacacaagagccagctgcctcctgctctgtggagaggaatcagcttagatcgtgaaatgacagagctggaggcttggcagaacaagacaatccttagaatttcttttgccatcaacctgcacctgaggtcttagaagcaagagccactaacccatagggacatcacgacgaagtaccttccccttctcacaggccaggctctgcatgtctccttagtttaccacccaacatccactgcacctgtgctcataacaccacagtgatgactgggcctagactcaaatgactatctgagcacagaaactaagccccccacccaaaatggcccattgaggacagtgccagtgcctcatagaccgacccagggcatagcactctactcatgtgagcataggttcctggctcaacctgctgacttcagattccttctataaaatcactgtctgctcatttcctaaattcatgtttacctgttttatgtcaggctcagctgcagtggtatcagaacagcaagccctgccttcagggagctcactcgtcctgaggacagggttcacacccagggttcacacccttcagggagctcactcgtcctgaggacagggttcacacccagggttcacacccttcagggagctcactcatcctgaagacagggttcacacccagggttcacacccttcagggagctcactcatcctgaggacagggttcacacccagggttcacacccttcagggagctcactggtcctgaggacagggttcacacccagagcccagagggcacccatgaccaactccccactcctgctcctttcttatttcaacccaggacacactagagtctggaagcacagggtgacatgtgactctggtacagaggaaggtcatgagcgatcaccgtgttccttttcctgtgctcttaatatcttccaaaacaaaacaaacaaaaactaaaaaacaaacaagcaagccgagtgtggtggcgcacgcctttaatctcgaaccaaagaggcagaggcaggcagatctctgtaagtacaaggccagtcttgtctacaatgagttccatgacagccagggctacaaagagaaacactgtcttgaaaaagacaaacaaacagaaatgctgaggtgggcattccagcatacatgggaggaagaccaggagttttaaggctagagtgagctacaaagcaagatccatctctcaaaaacaaaacggactaaggatgtagctcagtggctctaggtgtgaggccccacgttcaatgccagacacacacacacatagagagataggaggaaagggccagcaacaagatgtcacagtgaataaaggcagctgtcaccaaatctaaagacccgacttagatccctgggacccacttggcagaggaaaacaaactcctgaaagctgacctatttgtccagccacaaatgtaatttaaaaacaaacaataacaacaaaaaaccccaatcacacaacggccttgtcagttcagtttagaaactaagaaaaaccctgagcaagacaaaaccacagtgctaagtgtcagggaggcacagcgacagcctaagcaatgccactctctgttcccaagcttgtctttaaaatatcaccacaaagggtggtggtcaagtctgtaatctcagcacaaggaagggcaacgcaggactgtcccaagttccaggccagtctaggcaacaggacaagaccctgcctcaaaaaaaaaaaaaaaaaaaaaaagtcaccaacaaaaccacaccgtaatttcagagtcccatgagaatgactggccatttgtctgtgtgcacaggttctattggaacatttatcctctgctaccttgtgggttggtttttggagtcaggctctcctggtgttgcccacattagtcttttttttttttttttttttttgagacagggtttctctgtgtagccctggctgtcctggaactcactttgtagaccaggctggcctcgaactcagaaatccgcctgcctctgcctcccaagtgctgggattaaaggcgtgcgccaccaccgcccggcccacattagtcttgaacttagggaggatccacagttcctcttcagcctaccaggtatctgagatgcacagtcaaggatacactcatagttcctccagtcagcctcaaggtaggtcatggaagttgggtaccatgtcctctgagcccaactcacaactgagaagggacaatgtgactgtggcctgcctcagtggagtcacaagccatgttcttccaggcactgggactgatggctgccaaagactaactgtacacaagcccttccctccactccacttctaaagacatgcagagagggaggttaacgtgttggggcgccgagtcagagctgacgctgggtgtcctgggagcttcagctagatggccagctcatgtgcccagaaccaaacgcctgcctttccactcagactcaagctgggcaccaggctcaccaatggagctagcgaggagccgcctcctaagagatgactccccaactcaaagacacgcaagtccactctgacagctgctggccagcatgctcgatgctcctatgtgccccctcccttttgctctacgagtgtatgaactaatttgtaactaatataagcatccttcctaccttcactacaaacagcgtaagtgatgctagcagcttagcttggtggcagaatgcctgctgaacatatgtgaggtccccaaagtccagtacccagcatcatacattaatacctaaatacagttgactttcacacaatttcaagaccacccacccaacacagtgcaggccaacatacctgtctttcctgtcctccaggccctgaggcggggaaacaggctgggcacaggtagaggcatggggtccctgtcaccgatgcggacctcagccaccagctctagcatgtcctcacttctgcaaggcagaggaaatggtgagccctagcagtgccatagctctcaggatagggtcaccccaccttcagctgtccaggttcttactcgccaggctgaaggtccaggcggctgggaacccaggtgtccgggggatccaggatgctcaccagctccacaagg

SEQ ID NO: 1921 - DNA, 1546 bp, Mus musculus
gagggagttaggcctgctaagccgaagtgcgctccgggatttcttgactttatttcgtcaatgttgagaaaaactttttatatctcaaaatatcgttagaaaaggaagtcccagcgctcggaggcttagctgacaaagaagggggttgcgtggctgcgagtctcagaactactgtttgggagccccaaaaccactgctggcacccgcgccgcacgggcgcccaattcctcccctggctagagcatggaaaccccgaaaccgcggattttgccctggctggtgtcacagctggacctggggcagctggaaggcgtggcctggctggacgagagccgaacgaggttcaggatcccgtggaagcatggcctacggcaggacgcacagatggctgactttggcatcttccaggcctgggcagaagccagtggtgcctacaccccggggaaggataagccggacgtgtcaacctggaagaggaatttccggtcagccctgaaccggaaagaagtgttgcggttagctgctgacaatagcaaggacccttatgaccctcataaagtgtatgagtttgtgactccaggggcgcgggacttcgtacatctgggtgcctctcctgacaccaatggcaaaagcagcctgcctcactcccaggaaaacctaccgaagttatttgatggcctgatcttggggcccctcaaagatgaggggtcctcagatctggctattgtttctgatccttctcaacaactgccaagccccaatgtgaacaacttcctaaaccctgcaccccaagaaaatccactgaagcagctgctagctgaggaacaatgggagttcgaggtgaccgccttctaccgaggccgccaggtcttccagcagacactcttttgcccggggggcctgcggctggtgggcagcacagctgacatgacactgccctggcagccagtcaccctgcccgatcctgaggggtttctgacggacaagcttgtgaaggagtacgtggggcaggtgctcaaagggctgggcaatgggctggcactgtggcaggctgggcagtgcctctgggcccagcgcctaggccactcccacgccttctgggctctgggggaggagctgcttccagacagtgggcgagggcctgatggagaggtccacaaggacaaggacggagccgtgttcgacctcaggcccttcgtggcagatctgattgccttcatggaaggaagtggacactccccacgctacactctgtggttctgcatgggggaaatgtggccccaggaccagccgtgggtcaagaggcttgtgatggtcaaggttgttcctacatgtcttaaggagctgttagagatggcccgggaagggggagcctcttcactgaaaaccgtggacttgcacatctccaacagccagcctatctcccttacctctgaccagtacaaggcctacctccaggacttggtggaggacatggacttccaggccactggaaatatctgagccccactcagctgctaccaataaagcagtttatgccgccatc

SEQ ID NO: 1922 - protein, 414 aa, Mus musculus
SMPKPRILPWLVSQLDLGQLEGVAWLDESRTRFRIPWKHGLRQDAQMADFGIFQAWAEASGAYTPGKDKPDVSTWKRNFRSALNRKEVLRLAADNSKDPYDPHKVYEFVTPGARDFVHLGDDTNGKSSLPHSQENLPKLFDGLILGPLKDEGSSDLAIVSDPSQQLPSPNVNNFLNPAPQENPLKQLLAEEQWEFEVTAFYRGRQVFQQTLFCPGGLRLVGSTADMTLPWQPVTLPDPEGFLTDKLVKEYVGQVLKGLGNGLALWQAGQCLWAQRLGHSHAFWALGEELLPDSGRGPDGEVHKDKDGAVFDLRPFVADLIAFMEGSGHSPRYTLWFCMGEMWPQDQPWVKRLVMVKVVPTCLKELLEMAREGGASSLKTVDLHNSQPISLTSDQYKAYLQDLVEDMDFQATGNI

SEQ ID NO: 1923 - DNA, 26310 bp, Homo sapiens
acaaaaaattagccgggcgtggaggcttaggcaggaggatggcgtgaacccgggaggcggagcttgcagtgagctgagatcgcgccactgcactccagcctgggtgacagagcgagactcttgtctcaaaaaaaaaaaaaaaaaaaatttggccgggcgcggtgactcacgcctgtaatcccagcattttggaaggctgaggtgggcggatcacaagctcaggagttcgagaccagcctagccaatatggtgaaacccccgtctctactaaaaaaacaaaaattagccgggtgtggtggtgggcgcctgtagtcccagctgctccagaggctgaggcaggagaatcacgtgaacccgggaggcagaggttgcagtgagctgagatggtgccactgcactccagcctaggcgacacagcgagactccatctcaaaaaataataaaataaataaaaataaaaataaaaaaattagccaggactggtggcacacgcctgtaatcccagctacttgggaggctgaggcaggagaatcgcttgagctcaggaggtggaggttgcagtgagccaggatgaagccattgcactccagctcgagcgacagaccgagactctaactttaaaaaaaaaaaaaaaaattgaaaagcatggcactaaacaaaccaagaaaaggacatttgtttccagtgtttgagctgaagcaagaggagcccagctgcaaatatgcacatcaggtctttagcttgttgcagctctgtgcataagcattgccctccaaaacaccacaaaagcactgccttaatttttggggtatgaatacattgtagcaaggatgcaaatttgcaaataatctacaaatactgaggatcaactgtaattggttcggtttgtaatcctgtacatttcacttattaatttacaaacattactctgtgaagggggatatggccctataaaggagacaaaccgcccaggcacagtgactcatgcctgtgatcccaggactttgggatgccaaggtaggaggatcacttgagcccaggaggtggagaccagcctgggcaacataagggagaccccatttctacaatttttttttttttgagacggagtctcgctctgttgcccaggctggagtgcagtggcgtgatctcaactcactgcaacctcttgcctcccgggttcaagcgagtctcgtgcctcagccacccaagtagctgggattacaggcacccaccaccatgcccggctaatttttgtatttttagtagagatggggtttcaccatgttggcctggctggtcttgaactcctgacctcaagtgatccacctgccttggcctcccataaaaattcttttttaaaaattagctaggcgtcgtgtcgcatgcctttagttccagctactagagaggctgaagtgggaggatcacttgagcccaggaggttgaggctgcagtgagccatgatagtgccactgtatctatataacagtgcaagtataggcaacagagcaagaccctatctccaaaaaaaaagggagagtggggggtgtgtgtgagacaaaccactggtctgtaggtagatgagaaaccagcaagagagacttgaaaggagcaatgggaggagaaaaacaagaagagggtggtgtcctagacacaggtgaagttagactgtacctttctgtggaattcactggaaagactccatgaccatcatacagcattagctagaataaccagatcgtgcaataggaaaaaaaaatgcaagttgctggaatatttacaggtattctctcaaatatgttacatgtccaggagacaggctcttgtaggtgctgcaaataaatatttctagaatgaatgaactggttctttcctcaatttgcgtaagccacagaaatctctgaaccaaatctcctctccttaaaactttagttcccaagtgtaagaacagacaattgaatactttgtaacgtttttaataagaaaagttttaaacaatttatttttggcaaaaacaggtagggcaaccaccaccccacagccctgagtggaataggaagacttggaaaagcacacgaagagggcagggacatgaggtgtcatcttgtagcagcttctgagaaagagctcagtccaatggcaagttcaagtccacgggtgaaacagccaggatgccctcctggaagggaaaagtggcagagccctgtgagcagggcaggtgttccccccatacagcagcgtccacatcagccctgtgagattagagacgggaaggcgaggaaccagagagcggagggtgacagacacccagacaaggggacagagacccagacagaagggcacagggatgagggggcagggtcctagcaggaggaggaaaggttgagctcgaggagggtcaggacactggagtgggattagacagagatccagagagagtgaagagttgggggacagagtcagagatggggaagagagtcttgggatttgaacaattcagagtcgtggctttgtgtacaaatccagattccaacactctgcatgctggggacttttcctctctgcccccacaagacgaggacaataagagccccatgaggttgtagtgggtttaaatgggatcattccattgaaatccctagcagaggacctggcccaccgagaaaactcatctgctatcaatcctactttaaaaaaattttttaagaaattgtccaggcgtggtagctcagcctgtaattccagcactttgggaggccgaggtgggtggatcacttgaggccaagagttcgagaccagcctggccaacagggcaaaaccccgtctctgctaaaactacaaaattagccggacatggtggtgtgcgcctgtaaccccagctactcaggaggctgaggcagggaatcgcttgaacccaggaggtggaggttgcagtgagccaaggtcgtgccactgcactccagtctgggcaatagagtgagactccatctgaaaaattaaaataaaataaaataaacgagcttctttgctgagcccaacacttatatccattcccctcaacatgtgctatgagttctgatcttactgtagaccggaccacctccagtcctgctccccacccccatcgcccccatccccacaccttccccatctcggggaacttaagatgtcgccctgcagctgctcgggccagcatcctttagtctgtccccacatctggcccattagccaaatctgtcagcttcaccgctaagttaaatccagcattctccaccgcccccgacttgggtgagatccactcacctcctccctgtgcccctacttctgccctcgcccccagcagtctgtccccaggcagccgccagagggcgcccattagcgcctaaatcagcgcctgtccctccgctgctcagagaccttggcttacccagagtcaaagtccgagttgtcactcaccgtgaccacagggtcctggctggcccggcgcctctcctcctctcatctgtcgcccgctcaccctactgtagccctactggcctcctcctccctgctcctcaaacacacttgaccagctcctgccagggaaaccggttccatccagagcctggcttgtgtccctctctcagtgaatacccacagcgaccccccaaggcaggtaaatgagacggtgctcactggaccagtggggagagtgccgctcagggagactgcgacagtcgccaagccacagggccagcacgctggagcccaatccaactctgaaaccggcactggagataaagtaagaaaaggagaggggaagacttctgggtctcctgaagctgatgtgttagaggtgggagacaccaacaaagaaaaataaaccagaagacaagtaaaacaagtcaattccaccatctgttggaaggcccaaagtgctatggaaggaaaagtaaagcaggaagggggaaggagggcggtgggagggtgtgcaggtggctgtgattgtcaatggggacctgggaaggcctcgttgggggtgaaaccagagcccaccagaaggagcaggacggaggcagggggttccccgggagggcatcctggcaggcactgttggaaaggcagcaggtagccatataacctcaccaacaaaatgcctgcatgccaggcagtgcacagagggcttaccacattgaccccattttaaccctcagagcgaccctttgaggtagcactactactctcactattttattttttgagacagggtcccactctgtcacccacactggagtacagtggcgcaatcatagctcaccacagccttgaactcctgggctcaagtgatcctcccggctcctctgcctcctgagtagctgggagtaaacgtgtgagctaccatgctttgctaattattattaattttaaaaatttttatttatttattttttgagacagagccccgctcttgttgcccaggctggagtgcagtggtgcaatctcggctcactacaacctctgcctcccaggttcaagcaattctcttgcctcagcctccctagctgggattacaggcatgccgggctaattttgtatttttagtagagactgaatgtcaccatggtcaggctggtctcaaactcctgacctcaagtgatccacccacctcagtctcccaaagtgctgggattacaggtgtgagccaccgcaccaggtttttattatattattttgttgagacacagtctcactctgtcgcccaggctggagtgcagtggcatgatctcagctcactgcaatctctgcctcccaggttcaagcgattctcatgcctcagtctcctcggtagctgggattacaggcacctgccaccgcgcccggctaatttatgtattttttttagtagacacagggtttcaccacgttggccagctggtctcaaactcctgacctcaggtgatccacctgcctcggcctcccaaagtgctgggattacaggtgtgagccaccgcacccgaccctggctagttattttcaatttttgtagagatggggtcttactatgttgtccaggctggtcttgaactcctggcctcaaataattctcctgccttggcctccaaaagtgctgggattacaggcatgagctaccccgtccggcctctccctgagtaacctcagtcactggtttcacgctcacagtattagcgtacccagtcgttgacgccaggcatagtgtctgcactcatcgctgcagtcctggcatacagcaagggctcaacagaacgaacgcagtggagctgggagaatacctgaggtctgagaggaacctaagaagtccccgcccctcctctatcacatgacagttaggtaaagtgaggcccggagagagaggcttcagcggctcacccagcccccgtgggcctggatccagggcgtgaagctgtgcacgtgctccacgctgagtccggccagggtgccccccagcccggccacgcgccggctcagctccatggctagggccaggcgggccaggggctccggggaaggaggcgggggcccggggcatgctcggcttgggcgagagctgtcatcccggctacagaacagctccaccaggcgggcgaaagagtcggaggacaggcggaccagcttgctgcgcagggcggggtccgaggccagctgtagggtggaagaggcagggtccgcgtcagcagcgcccccggggccagccaatagagggccgggaggcgtggcttcccggttcaggatcgttctagatgctaaggttctaggccacccctcatccatattagccaatcaagccagactccagggtctctgccaaactacccccgggatagtggcctggaacgtgagtccctaagccatgccaggcccttgcctcaacagccaatcagggccaatctctactgtaactgagttaatctagccatgcccctggtgacctttcccaggggccaacctagtgtctacaacaatcttgccctctaccattcaattaatattaaaggacgatgtaccttgtccaagctccgaagccaatcagattccaggacacagccacaagccacacctcctctggtagtacattttcccctacattctaagccaggtcccttctatgctcagtaagattttagccactccccccacccccacattcattcacttacttccccagcttggccagtctcttgtggataatgtttctgatggccacaccctctgcatttaggccatgcccctctaaacaatcaattaaaacaactaatttacggtacagtactaccctaaccatacccctgtcattcaactattcttttttttttttttttttaaagacagagtctcactctgtcacccaggctggagtgcagtggcgcaatcttggctcactgcaacctccacctcctgggctcaagcgattctcctgcctcagccttctgagtagctgggattacagaagcgcaccaccacacctgtccgatttttgtatttttagtagagatggggtttcaccatgttggccaggctggtctcgaactcctgacctcaagtcatccacccaactcggcctcccaaagtgctgggattacaggcgtgagccaccacacccggcctcaacccttcattgaaaccttgtcccagcctctttccacctgaccatccaaagaaaatacagatccagcttctgatcccagtgccccaccattccgcaactcctgtccttgccaaggagtgggacagatgcccatcaccttctggttaatgacttctgcctcctcctccagcagggccaccagcctccgcagtatggcttccttctctgtcgatgggggaccctgtaattctggaggcagaagagaatttggctgggggcagaaccctgactatcctcccaccgccatccttctctggggctcctctgtgcctcacctgggctgggcggagatttcagctgctcttggaccagctgttccagccgctgggccaccaaagcatagaagtctggagtagctgggcctggggtgaaaagagttaatgacaggtttccaggacattggaaacttacggattctctccttcccccaactaccttggcaggtggcaatgattcccattttatttattatttatttatgtattgattttgggaaacggagtctcgcaattctcctgcctcagcctcatgagtagctgggactacaggcgcacgccgccatacctggctaattttttgtattttagtagaaatggggtttcaccgtgttgcccaggctgacctcaggcaatccacccacctcagcctcccaaagtgctaggattacaggcgtgagcaaccaagcctggccatgattcccattttataatggggtaaactgaggcccagtgagaaaacttggttaaaaatgccaaaacccttgtacttttcactttatgagatcctcagactggacttagaatgtcagagctggggccaggcgcagtggctcacgcctgtaatcccatcactttgggaggctgaggcaggcagatcacctgaggttgggagttcgagagcagcctgaccaacatggagaaaccccatctctactaaaaatacaaaaaaaattagccgggcatggtggcgcatgcctataatcccagctacttgggaggctgaggcaggagaattacttgaacccgggaggtagaggttgtggtgagccgagatcgggccattgcactccagcctgggcaacaagggcgaaactccgtctcaaaaaaaaaaaaaaaaaaaagaatgtcagagctgacagggtgcggtggctcacgtctgcaatctcaacattttgggaggccgacgtgggagggtcacttgaggccaggagtttgaggccagcctggccaacgtggcgaaaccccgtgtctactaaaagtataaaaatcagctagtatgctggcgtgcacctgtaatcccagtcactcgggaggctgaggcacgagaatcgcttgaacccaggaggtggggattgcagtgagtcgagattgcacccctgcactccagcctgggtgacagagcaacaatctgtctccaaaagactgtcagagctcaactagaccttgaagatgatctcatccaaggaaggcaaacacaagacattactgttagtatccccttccctcactcactacagacatcaccaattgatcacagcacttcctctcccaagctgtgaaccccttttcaagctagcactcccagcagccattactagtctgtccaggttcacacctatgaggaaacttgtgggtcaccttgatcaagtccagtgacctcctccccaattcctactctgctattggaaaaacaggggagcagggaagagaaagcattttccccagagtcacgcaactaaaacagccagggagatgtgattgaaaaccagcccttctgcccctctatcaggggtattcctggctacaaaagtcctaggggcagggaagtagttatggaaggaaagagacaacaaccagattgaccaaatgctctctgaaagccaacccacagaattgacagaaatctaactggggaggggagaggacaggacggttctgtcctgaaggctggtgctagagactccacacagccaccccctagctgagtgatcttaaactagcaccttatcccgtgttctgccggcttcatagatgatcatggaaatctcttaccaggctctaaaccatagcaggggcggatgggcagagagcaaggccgaggggactcagagggggctgctcctcgccccagggagcagggaagacatcttcgaaggcggctcaggaagtctgttggctcttcttgggcagggcttctggagaggaggacttcagagactgaccccaccagagatcccctgcaagcagtctctttccccaactccctccctcccccgctgaggacctctctccaaaaccccaaagacagagaatagagccagatataaagagaggagacagactgagaccaggagcaagagttaggagggagcctcaaatgctggcccctgggggagaagggccactcctcttacctaggtggagttggaacaggagacccggcagcctcaccacgcctaaggaaggcagctaggaccctcagcgtgtcttcccggagccccagctcttcagagcctgccatggaggcacctgtgagagagagggttagggactggactccaagggtttagcaagaagtggaggcttggggaccaggacttgtgagtcccaaggaaggtgctgagggcctggactcctgggtcctttggagagtgtgggtctgggggcctagactcttgagtcctcagacgaaaaagcgatcaggaaaaagactcttcgatccaaggaaaggtggtggggctgggtgcccagattcgtgggtctaaaggaggagggagctggggtcctggacttctgagtcttagagaaaaaggaactggagccccagacccttaggtctcccaggaagaagaggcttagcgccccaactcctggattctataagaggcatatgccaaactcctgaaacccttaaagcatcgggaactaccaatcccaagaggtttcagggcaaatcttcccctaggtccgcgcttcttcgccgcgcagcctgctgtgaggtgtagttccaaatctccgacccctgctggaatctagaggaccctggacccttggatatcagagaagcgggactggggtgcccaccactggatcccggccccctcctcttccctcctcaccccacccctcgtcaacaccccgctgacctggtccggggccccaccgccgcctcctccactcaacttgcggtctcctccactgaactcgtacaaactttattagttcaactttcccgcgcctgcgcactgggccgggtcgataaccggcccagcgtagaaagggcggaacgctgggtgcacgctcaatttgcatgtgacgctcccagcatgcctctggccggaaacccaaaaaagggcataggggcgggaacagcccagcgggccgtcccatcggcttttgggtctgttacccaaagaatgataaagttggttttatttcaagaagtcgatcaaaaagaaagccccagcgctctagagctcagctgacgggaaagggggtgcgcagcctcgagtttgagagctacccggagctccaagacaggggtgggttccagctgcccgcacgccccgaccttccatcgtaggtaacgcggaagagcccgggagagcgttggtggcgtccgagagcgaggagcgggaaagaggatgggtctgcacggagagtggaaaggcaggctgtgtactctggggaaagtggagcaaggaaggagctacagtggccgacgctggaggtcggctgcagaaaaactagaaaaagtagggaggaaagaggaaaagaggaggcgtctacactgagggggttctagagagggaggggtggactccgtagatgggggtagttcagtctcgaaacctggggcgtgctctgtcctggaggagggaggcgggcagtcggaggggaattgaatggaagttctgtgttggaaatgttttgggagatcttctgtagggggactgtggaagggggtctacattggggtaagtgcaggaggtagaggcttacacgtgaatcgattctgcactgaaataactagggaaagaggatgctaccctgaaagtggggatacttactttcgatgatgtgggggagggaggaggtctatactggcggaattgagggagtggagggtctgcactgaagacgctggggaaggatgtgccatggatatgggaaggaaccctagctgattagagagcctctcgggaggatgggaggatgggaagaggaggtttcctgtttgtacccccgaaaatatgggtgaaggacctgtgccgtggcccgtgagaaggaggtctgggtgcggaaactccaggccaggtgggtccgggggaggccggtcgcgcccaggaaatgccctatacgcgcaggccggaccatgggaaccccaaagccacggatcctgccctggctggtgtcgcagctggacctggggcaactggagggcgtggcctgggtgaacaagagccgcacgcgcttccgcatcccttggaagcacggcctacggcaggatgcacagcaggaggatttcggaatcttccaggtgcgtgcgacgacctgggacgctggaaacccggagctgcgcgctgggcggaaaggactcctagtgggcccggctgagaaggcggaggtggcgcgcgaggggcgggctcgtgccaacgctggtgggtggggctagaacgggaggggcggggctagccggatccgctgactgatggtggggcgcaagcagggttggagctgcagggttacgggaataaaaccgggaaagccggttagtacgcaaaggaaatgcatcctgggggtttggggctttctagaggccggggctcttggttgtaggatagatactgggggatggttcttgaaacatcagaggtgaggcctggagccccaaatctgaggttcctaactaccgaattagtatatgccagaggtggtaaacagtgtgaggggcggggttatcacagagggtgtcgcggggcaggtggtgcacgggattagacaccaagttggacttggaagcctggcttagaaagaaaaggtttttgggccgggggcggtggttcacacctgtaatcctagcactttgcaaggccaaggcgggaggatcgcttgagcccaggagtttgaggccagcttgggcaacataggctccatctctttaaaaacaaaagcgaaacaaaacaaaaaccaaagaggtttcaaaggcttttgaagaggccgagcacagtagctcatgcctgtaatcccagcactttgggaggccgaggaggacggatcacctgaggtcaggagttcaagaccagcctggccaacatggtgaaaccccatctctactaaaaatacaaaaattagccaggtgtagtggtgcccacctgtaatcccagctactcaggaggctgagacaggagaatcgcttgaaccggggaggcggaagttgcagtgagctgagattgcaccattgcattccagcctgggtgacaggagtgaaactccatctcaaaaagaaaaaaagccttttgaaaactagaggtgggggatggaggtaggtgggacggggggatttggggatggaccttgcagagttagaacttgccagggaaagagggtggtgttaggactcgggagacagggttagggccccaggagcaggatctaagtcgtcctcccccaccatcctgacaccactgttgccccaggcctgggccgaggccactggtgcatatgttcccgggagggataagccagacctgccaacctggaagaggaatttccgctctgccctcaaccgcaaagaagggttgcgtttagcagaggaccggagcaaggaccctcacgacccacataaaatctacgagtttgtgaactcaggtctgccagcttggggttcgtgtgggaggctggggccccaagggttcctggcactcctactcccctcaccacttttctcaacaggagttggggacttttcccagccagacacctctccggacaccaatggtggaggcagtacttctgatacccaggtgagaatgtgcccaactttcatgcccctcagtctccgacctgtctccatgggccttgtcctctccctctagacgatccccccactcccctgcctccagcctgcccctcacctgagccagtgctgaccctgtctgtccctgccccggtctcctcaggagaaaattccaagtcttcacccagcattcaaggcccgagcacaccttcccgggatttcatggatttcgattcgcagggggctgtcagcctcttgggaactgaaaaactccctcaccttgatcctgctgaggcccaagctgggggagcatcccctctgaaattctacccagcctgctttgcccaggtcttacctgcatagagccagatccttgggttggaatggtagcacctggcgttcattagtgtttgtttggctgttgatgccatggctggctctgtccccaggctggaagccccttgaaggcagagctcaagcctgacctccctgcgttgctgagaacagacctggtccatatgaagtctccagaaaaggatatggaaatgcctgattctctttttttgtttccctccaggaagacattctggatgagttactgggtaacatggtgttggccccactcccagatccgggacccccaagcctggctgtagcccctgagccctgccctcagcccctgcggagccccagcttggacaatcccactcccttcccaaacctggggccctctgagaacccactgaagcggctgttggtgccgggggaaggtgagtgtcagctgcaggctgggagggctgaggtctgggcggcagcccctgattctcaacccctctccccttcatgccgctgctgccgctgctcagagtgggagttcgaggtgacagccttctaccggggccgccaagtcttccagcagaccatctcctgcccggagggcctgcggctggtggggtccgaagtgggagacaggacgctgcctggatggccagtcacactgccagaccctggcatgtccctgacagacaggggagtgatgagctacgtgaggcatgtgctgagctgcctgggtgggggactggctctctggcgggccgggcagtggctctgggcccagcggctggggcactgccacacatactgggcagtgagcgaggagctgctccccaacagcgggcatgggcctgatggcgaggtccccaaggacaaggaaggaggcgtgtttgacctggggcccttcattgtaggtgagtgagacaggggcttcgacctggccagtacaaagcagcctgcacagtggttaacaactcaggattggccgggcacggtggctcacgcctgtagtcccagcactttgggaggctgaggtgggcagatgacaagttcaggagttcgagaccagcctggtcaacatagtgaaaccccatctctactaaagatacaaaaaaatagtcgggcgtggtggcacgtgcctgtaatcccagctactcgggaggctgaggcaggagaattgcttgaacccaggaggcggagattgcagtgagctgagatcgcaccactgcactctagcctggtgacagagtaagactccatctcgaacaacaaaaaaaaaagaactcatgattaggactgaattcagacgctggctgcccttggcccgctgtataaccgaggcaaaggactttgccctgagcccgtggaatccaaggatggtctcctctctctacctgcctgccagcgctggggtgagacacaggcccagtacacagagcctgctcagggaattagctgccactgtcatcatcatcgtaactaatgatggtgaacagaccaatagcaggaaagctacatcccttagggtttcgctgtgcagtggcactttctgccatgatggaaatgacagtcacctgcactgtccggtgcagcagccactagccacaggggccaagcactcaggtgaggcgagtgcaaccaggacgtgattcgttttaattggttacaatttaaactgaaataaccttacatgactaatggctgcaattggacaatgcagcctcagacaggactgaatgccaaccagcttctccagattcactgagcatccttgggagcatgggccccctactctgggcctgttatgaatgctgaggcttgggggcttgggggtgtggccttccaacaaccccaccctgatgggagggagggagggagggaaggaggggactttccccaaacaagcagtcccctggtcgaggcagcagagggccttaggtcaggggaggtggtgggggttatcattcaagtttacggggaagggtgggtagagggtcctcttctcatccctgactaggctcctgggcccccagatctgattaccttcacggaaggaagcggacgctcaccacgctatgccctctggttctgtgtgggggagtcatggccccaggaccagccgtggaccaagaggctcgtgatggtcaaggtgcctgcagacctgagtccctggggctgaaaggggtggccttacagagggaagaggttgctcccaggaactccaactcccagagggccctctaaaaaactgcaacttccaagatctctgcaataaccagtttttcatccccgggagctccttcccatggcctcacctgcagaacctgttttgaactctctaaaccagtggcccccaaactatttggcaccagggaccagtctcatggaagataatatttccacggacagggaggtgtggtttcgggatgaaactgctccactgcagatcatcaggcattagattctcttaaggagcagccgatccctcacgtgcgcagttcgatagagtttgtgctcctctgagaatctaatgctgccgctgatctcacagaaggcagagctcaggcagtaatattcccccacccgctgctcacatcctgctgtgcaacctggtccctaacaagccgtaggggggttggggacccctgctctaaaccatgtagaagctggtggactcaagttttagctgccattgtgaggccatggctgtggctcccaggagtcaagatcacagactgctcagccctgacgtgtgtgtgtgtgtgtgtttgtgtgtgtgtgtaaaactacaactcccagcagccctaggcctatggttcagttacagcagggggtgtgtgtgtgtgtgtgtgtgtgtgtgtgtgtgtgtgtgtgtgtgtaaaactacaactcccagcagccctaggcctatggttcatcctaggttacagcaggggctgcagggagttgtagtcctccaagccctgactcctaccttggtggacagtggctgggtgttttccctgactcctgtccccacttcccctgcaggttgtgcccacgtgcctcagggccttggtagaaatggcccgggtagggggtgcctcctccctggagaatactgtggacctgcacatttccaacagccacccactctccctcacctccgaccagtacaaggcctacctgcaggacttggtggagggcatggatttccagggccctggggagacctgagccctcgctcctcatggtgtgcctccaacccccctgttccccaccacctcaaccaataaactggttcctgctatgatcacttgtgcgtgtctggtgttgggtgccctctgacccaatatggttgttattcccgctcagggtctcagtttacccatctgtgcagctatatacaactcaggtgctcaatgcatgaagaccaagcactgcagggggcagctgacacctcctcacttctgcccagggacctggtgggtgatggctgtccccgtgttgtagaccaagacacaggctgggagaggcgcaaaggtcacagagtaggaaacacaaagactagccagaacccaggccccctgccttgcctatgaacagtttgggcaagtggtccttctccttccaggcctcaggctcccctccacgtggggctggaggggtcttggtaaaggggctctgcggccaccctggagcctgcaaagcctgcctgcctggtgaccctgggcactgtcacctctcctggttgggccgcagttctgggtgatgaaactggcagaagccagcgcagccctgactcacccttcggcccttgctgctctgtgcctcagtttccctctcaggacagttgatgagatcaccccagcttcacggggctgctgaaaagagaagccaactcaatggggaacacagatcctgctctgggagcaattccaaggcaggcacatggcacccaggagccgagctgggaagatgctgatcaggtggggtccggcccctgcctccctgtgagcagctcgctcccagccagagactgtgctaagtgctccacctgtgtcttgttcaatcatcacaacacccactacacagataagaaaactgaggcccaggggaggcagctgccccaagtcacagtctggtctctgtctcccatcctcagcctcctgggggtccctccccaaccctctggcaaatttgtctccgaaaacaaagggttagaaccatggggctcaggggtaatgtttcatgaaatctttaatgaaattggggagaggggcacaaacagaagggaggggcactggggacaggcttgggggcaagggaggtggacacggggcagggcagggcagggggctctcctcttccctgcagcaaccctcccccagtcatcccactgacgggggagggaggtggggaggtggagccataaatacgtccagagtttcaaagaggtgaggggcgaagagctggccagggctctcagagagggggcaggggcaggcccgggccacccttgtctgggggccctggctccttgggcggccgtgggggccctggggggtcccctggcttgcgaccgtgcttgcggaagtagcggtagcgctggacgtaggcccgcaccaggttgctcaccttcactgggttgatttccccacttttgctgtggcagatctggggggccggggacagttggagtcaccaccaggctcccggggccccatccacccaggactgttgggcgcagcttggaactgcggtaggaggagcttccccaataaccaggccaaagtccctctgtccccctagacgatgggtgccccagggccagcggaacaggcccaggtggccttgagaaaatcctgtcaccctcctcacctcccagactgacctcctccccgtctcccatccgcgtccatctgtctgcacacatctgtccctccagctcgttctctccccggcctgtgtctgcccctctctccgggtgcccaccttgtggacggccttcctcaggatgtccttgtactcctccttggtgatgtccttcttctgatagtatggcttgatggccagcttcacctcctccaccgcccgctcctgcgtgtgcagcttcttcagatactggtggggtggcgacagcgggggaagacacagcaagggccagtgagtacctgcggaacctccacctccactcgcctctgctgccagcctaacctctctggccgtccagctgctctcaggctggaagtcctgctgagggtctgtcccatgcgccctctgctgcaggtgcccgggaccaaaggccaggcctgggcctctgcatgtcactgaacatctcctccaggccgaaccctgggctgctccaggcctggccgggaccaggacatgtgtgtcgcctgccctcacaaagttcagtctgatgagaagacaggcattggccaagaaattgcagctggttttgaatcagactctagaggcggggctgtagaaaactgcacagggcttttcaccgcgggagcggggaggactcagtttaggtttttacagtactgctctggtcacccaggggatggagggggtggctaggggtgaggggcactggggagtgggggtggggactgaccttgagcccatttgtatcagaagcctggtctgccactccctgtctctgacccctgggatgctcagccaaacctttttgtggctccttttttgtttctttgtttttgagacagggtctctcattgtcatgcaggctggagtgcagtggcacaatcactgctcactgtacccctggtctcctgggctaaagcgatcttcccacctcagcctcctgaatagctgggactagatgtgccacccccacgcctggctaattcttgtactttttgtggcgactaggtctcactatgttgcccaagctgatcttgaactcctgggctcaagcgattcacccgcctcggccttgcgaagtgttggaattacaggcatgagccaccgtgcctggccacctttgtggctcatttgtaaaacggggacagcacctatgggcagtactacagcgacacacatggaggacatggcacaggctgggtacagagcaaagactcaatccaggggagctgtgcctgttccaagggggatggccatgggatgaaaaggggaggacgcaacagggacagggcagagagcctccgaggcaaggctcttcccgcctgtggccagcaagctaggagatcccgcagccgcaggctcggggcagcagctgcagccctggcctcaggcagaatccttgcaaaagcagacaggaaacctctagccagagagccacgtgggaccagagaagaacaggccttctgcaggcacaagggacagtcccttggcaccacccttggagaagctgccctcccaagccaggtgactatcaaagtaggggcaggtaaactgagtcctgggaagggcagggcacaatggctagccgactccaggagcaacatcagtgacactgtctgacgagctactgagctgttagggaactctgtggccagaagagacacaggctgccctggagggacttctcaggcttgcctggccccacaggatgtgggtctctagagagacgctgctccccaacacccatctcggatgggcaaagcggggcaaagggcagagcacagaccagggcagagcaagggccactgtagaccagggggtcctcaccgtccgagtcctgcagcgcaaggcacaagctacggacaagtgaccgactaaactgcagccccgcctctgcggctcacacaggatgtttaatggggtttatacagctttatctggcacggtacacagctgtgtaagggtggccaacgtcaccgtctggctatgggctactagactgtaagaaaacacatctaggctgggtgcagtggctcatgcctataatcccagcactttgggaggctgaggtgggagaatcacttgagctcaggaatttgagaccagcctgggcaacatagtgagaccccaactctacaaaaaattaagaaatgagctgggcatggtggcgcgtgcctgtagtcctagctacacaggatgctgacgtaggaggatcccttgagcccgagagatcaaggctgaggctacagtgagctgtgactgtgccactgcatgccagcttgggtgacaaagcgagaccctgtctcaaaaaccaaccaaccaaggccgggcacggtggctcacacctgtaatccctgcactttgggaggccgaggctggcagatcacctgaggtcaggagtcaagaccagcctggccaacgtggtgaaatgccgtctctactaaaaatacaaaaattagctgggtgtggtggcgggtgcctgtcatcccagctactcgggaggctgaggtaggagaatcacttgaaccctggaggcggaggctgcagtgagccgagatggcaccattgcactccagaccaggtgacagagcaagactccatctcaaagaaaaacaaaaacaaaaacccacatctagacctgaccaagagagaaacagctccagagcccaggagtaggagccggccagagcagctgagtaagaacctacattactgtctgcctggcacccattctcccctgcttcatctacaaacaggttcttgagttttcattcggaaaccaccctcccccactcacagagacggagacagcgcgagcaacagataatcaaggggtgggctgcagcgcggggcatctcttccagggtgtgtatatgtggtgtgtacgcacacagccccacacacgcacagacgcgattttcctttggacacgcctaacgcatttcctgctcacccattccagcaaagtggagttccttatggttccatgactttggtctctacggccctgtctccctgcctcagtctccctttctccttgggcccccgcgtctcagttcctgtccatattctctacagaactgtcagcaccgccccacctctccccaggccagctcaccttatctgtgtccccacggccctcagagctgctgctgccctctctcttgtcagacgtggcagccagcccggtgggggtggggggggtcgaaccgcagccccccagagggaggctgccaggaagcaggtagctggaggggccagggggcagacccaaagaggtgggcacaggagctggggtcatccccagacttgagggtggctttctgtggctgaggatctgtgggacgaggacagaggggtgatgagtaaagggaggtggaggggaagaggggacgtgcaccccactgttcccacgctgacttccccacagctgaggcaacaggctcctcttcaggccgataccttgccccagagctgccaggcccgcggttcctctcctaacccgaggcaatggacaaaagaaggggcggcagggactctcccccaggggagcccacctggttggtggcctggatcagctcctgggccttcgctcggctcgccaggttggcttcttccatcttgaagagaagtgcagtcactgcaggaggcagagaggtgacaacatgaagatgggagaggtgacaggacaggagctggtgaacctcacctggacacctgctgtcatctcctgcccttggccccagaacagccacaaagcctcacgctcagaactgggaaaagggggccttggccaatgagagaacagcccataccacgaatgttcttgggactccaggtgtgtgggtgcggggttggccagggtcatgcagtgatgagacagtggcaggagtgagattctgcctcctgacccgctgtggccagtcccaacctctctccccacctctgcagtctggtagaggcaaccgccatccgtaaggaatacgatgccctgctcaagccattctttctggtccctctctcctactccccgtctaggggaatcccagaacccagcccaccactccagtctgtgctggccaccacctgctctcaccggcccctctctcccagtacacccaggcacctagagcctggctggcctttactcacccccaccctcccagtctatgtccctataaacctctccctgccagggcaccccactgcctctaagtctgtaccctccagtccccatcctgtctcacctgccccagcaccaccctcccccaggggacactcacaggccaggacgccgctggtggtgcagtccacaccagctggcagattccagggcatgggcgggggcaacgtgggcagctgggagacacgggaagctggcccgtcctccgcccccgagtcaccggctgtggaccccgcgctgggggcagtgcttggggcggctgcagcagtgctggtggccgtggtggtagcaggctgctgctcctcctcctcttcctcttcctcctcctcttcttcttcctcctcctcctcctccgccccacctcggaccccagcctcctcagtggcctcctcgggcaggaaggagacctcaggtgtcttgcagctgctgtccacggtctgcgagtccggagtgagggcagggggtggtggggctgccttggggggcggggtgctaggaaccttggctgcccgctcctccccggaccaggaagtctcctccgcccccttggtgcctgccgcctggctgcagctatccgccttggacttcttcagcgacacctggccaccactgcccccgctgccacctccactgcggacctttttcctggtcttggatggcttggtctttcccttggtccccttggttttcttggcccctgccttggccttgaccttggtctttttgggcttggtgctgcccggagctgctttggccatctcagtgggggcccgctcgtcaggtttgaggaagggggagcgactctcgcggtcacggctgaatttgacgccaatggagcccaggccggctgacgcggcatccttggccggggtggtgctgctgacaccctcgcggatcagcaccgccaccttggactgcagcttcaccttccgggaagaacaggaggacgacgaggatgaagagcctgagccgctgctgactggtggctttggcgggggccctgaggaaggcgccgactccttggggggccgggccttcttggatgacctgtccctgtccctatctctgtccctgtcccgatcccggtcacccccgtccagcgccttccgacgagaccccttctcccgggaagaggaggaggaggaggcggcccccgagcggcgccgatccttctggctgctcttgccgccccgctcctcgccgctcagtccctcggagtcgtacaggacctcccgcttaggtgaggaggccggagcaggagagggtcctcgggggtcggacttgtcaagccggcccaccgtgatggtccgcttgatggcgaagaggtcgtggtccgtgaggtcctggatggagggtggcacggccccccggcggcggctgtcgcggtcaccacacgaggtggagccagagggcggcggggcgggcgccggggccttctcgctgccatccccagaccgcttctcaccccgggaccgcgaccgcttcttcttcttcttgctgccgccaccgtcccggtgtttcccgcggtgccgctcgcgcctcgaggacgacgatgaggaagtggccgggggcggggaggcggagcgccgccgccgtcgccgcttctcccgggaccgcgacctgcggctgcccccgcggcggcggtcggtgctgcgcgagcggcggcgggtggagcgggagcgggagcgggagcgggagcggcggcgggcggacgacgaggcgtgggagccgggcttgcggtcccgcgagcggtgcttcttggagtcccagggcgaggccggggcgggcggcgctggctgggtgcccgacgaggacgaggcggcctccttggcctcgccgctgcgcttgcgttcccgcctggacttcttgcgcgtgggcggaccagcagcggcggccggggcgggcgcgggcgccggggagggcgagcgctggcggtagcgctcccgccgttgggtcaggatcttgcggcgcaggtccaggccgccccagcgcgagtcggcggcgggcggcgcgggagccggctcccctaggtccacctgcagggcgccctcgccgtccgactccgcatgcagggacaagaagtcgtccccctcgggggcccgcggagcgggaggctgaggaaggggctgggccgtgggggtggccgaggcggccggtggaggccgggcggcccggccgccggggcggaagagggacagcgccagcctgggctcctcctccggctggacgatctccccttcctcgatctccgagtcgccgggcggcagcaggggcggcgggagggcggctccaccagcggtcaccacctccaccgagaccttgccttcccgacaagcctctgcctcggtccccaccacgaagacccgccggcgcatggctccatcagcccgggtggagtccacctggggcggcgttccaggggcgggagtcggctgtgtgggctgcgcgtccgggcgggggctctcgtcacctgggaagtcctggctcaggctgttgtcatcgtagatgcccgccagggtctccgagatgcggctgatgctctgggacaggccttcctcctcctcctcgtcttcctcttcctcttcttcttcctcttcctcctcctcttcctcctcaggtgagggggtccccgctgatgagctggggttggagccggtgggctcaaaagggtcgtacttttgctccggagcaggcggtggagagtaggcctcgtcggtggggtggaaggggtcatagatatcgaatcggggggcaggtggggctgggggtgcagggggcggtgggggtgggggaggggaaggggaggaagatgagggagaaggggaaggggaggaggatgcagaggagggggcagggggtggggcagggcccccgtctcccgtgcccaaggtgaggtgacgggcacaggtgggcctagaggagttcgactgtggagaaactgcaaaggaacagggagagagaggcggtcagggcctttgcctccctcctggtgcctgcttgctggcccagccgtggacactccctgggccaccaggtcctgcccaggaagccccaagtgcttcacaggagccagccgtaggatgctcccaacaactgcacaccatggttcttaacccaaaggtcacaggaggaaactgaggcagagggctgcagtatcctccccaagggcacacagagagaaggcagcagtcagggtgtaaactcagtcagtgcggccccgaacctgcactcccatatcctgagacagcactggcctgaccctgggcaatgtaccctggccttgaaactaggaactatcttgaccagtgccggcgacccatcccaggaggaggtggaggctgcagtgagctatgaccacaacaccacactccatcctggggggagaagaaacaggaaaacaggctgcagggggagagctgggattcaaacctaagtccccctccaagacaaaaacaagctctggcctgctgcgccagctgcctctcgtgggagtttctcccgtttggtagagggtgagattccagtgcagagccaggaaatggcagagctggggagcccaggaaggctggtcttcaccccaagctcttcactctgtgctgagtccccacccaaggaattacatctgctcaggactcaaagacaccactgaccagtgacagtggcaatgacaaaggtttgcctcttcctccaaaccaggcatggtgcttcgtatgtcacctcattcgcccccaaagagcccgctgcactgtgctaagtactacagtcatgatgccacagtcacacgatggagatggctgacagaggccacaccacaggcaaggatgccagcagagtggtgtgaggacagtgccagggaaggagaggggtcaagagggcagcaccagagccaccccttgatccaggggctggccctcaccagccacatgaccacaggcaagtggatcaatgtgtcttacttcagtttcctcatctataaaatgggggtatgttcattcatccaacaccctttatggccgggtggggtggctcatgcctgtaatcccagaactttgggaggccgaggtggatggatcacctgaggttgggagttcgagaccagcctgaccaacatggagaaagcccatctctactaaaaataccaaattagccgggtgtggtggcacatgcctgtaatcccaactactcgggaggctgaggcagaagaatcactcgaaaccaggaggcagaggttgca

SEQ ID NO: 1924 - DNA, 1617 bp, Homo sapiens
ggccggaaacccaaaaaagggcataggggcgggaacagcccagcgggccgtcccatcggcttttgggtctgttacccaaagaatgataaagttggttttatttcaagaagtcgatcaaaaagaaagccccagcgctctagagctcagctgacgggaaagggggtgcgcagcctcgagtttgagagctacccggagctccaagacaggggtgggttccagctgcccgcacgccccgaccttccatcgtaggccggaccatgggaaccccaaagccacggatcctgccctggctggtgtcgcagctggacctggggcaactggagggcgtggcctgggtgaacaagagccgcacgcgcttccgcatcccttggaagcacggcctacggcaggatgcacagcaggaggatttcggaatcttccaggcctgggccgaggccactggtgcatatgttcccgggagggataagccagacctgccaacctggaagaggaatttccgctctgccctcaaccgcaaagaagggttgcgtttagcagaggaccggagcaaggaccctcacgacccacataaaatctacgagtttgtgaactcaggagttggggacttttcccagccagacacctctccggacaccaatggtggaggcagtacttctgatacccaggaagacattctggatgagttactgggtaacatggtgttggccccactcccagatccgggacccccaagcctggctgtagcccctgagccctgccctcagcccctgcggagccccagcttggacaatcccactcccttcccaaacctggggccctctgagaacccactgaagcggctgttggtgccgggggaagagtgggagttcgaggtgacagccttctaccggggccgccaagtcttccagcagaccatctcctgcccggagggcctgcggctggtggggtccgaagtgggagacaggacgctgcctggatggccagtcacactgccagaccctggcatgtccctgacagacaggggagtgatgagctacgtgaggcatgtgctgagctgcctgggtgggggactggctctctggcgggccgggcagtggctctgggcccagcggctggggcactgccacacatactgggcagtgagcgaggagctgctccccaacagcgggcatgggcctgatggcgaggtccccaaggacaaggaaggaggcgtgtttgacctggggcccttcattgtagatctgattaccttcacggaaggaagcggacgctcaccacgctatgccctctggttctgtgtgggggagtcatggccccaggaccagccgtggaccaagaggctcgtgatggtcaaggttgtgcccacgtgcctcagggccttggtagaaatggcccgggtagggggtgcctcctccctggagaatactgtggacctgcacatttccaacagccacccactctccctcacctccgaccagtacaaggcctacctgcaggacttggtggagggcatggatttccagggccctggggagacctgagccctcgctcctcatggtgtgcctccaacccccctgttccccaccacctcaaccaataaactggttcctgctatga

SEQ ID NO: 1925 - protein, 425 aa, Homo sapiens
MGTPKPRILPWLVSQLDLGQLEGVAWVNKSRTRFRIPWKHGLRQDAQQEDFGIFQAWAEATGAYVPGRDKPDLPTWKRNFRSALNRKEGLRLAEDRSKDPHDPHKIYEFVNSGVGDFSQPDTSPDTNGGGSTSDTQEDILDELLGNMVLAPLPDPGPPSLAVAPEPCPQPLRSPSLDNPTPFPNLGPSENPLKRLLVPGEEWEFEVTAFYRGRQVFQQTISCPEGLRLVGSEVGDRTLPGWPVTLPDPGMSLTDRGVMSYVRHVLSCLGGGLALWRAGQWLWAQRLGHCHTYWAVSEELLPNSGHGPDGEVPKDKEGGVFDLGPFIVDLITFTEGSGRSPRYALWFCVGESWPQDQPWTKRLVMVKVVPTCLRALVEMARVGGASSLENTVDLHNSHPLSLTSDQYKAYLQDLVEGMDFQGPGET

SEQ ID NO: 1926 - DNA, 2378 bp, Homo sapiens
cagcccagcgggccgtcccatcggcttttgggtctgttacccaaagaatgataaagttggttttatttcaagaagtcgatcaaaaagaaagccccagcgctctagagctcagctgacgggaaagggggtgcgcagcctcgagtttgagagctacccggagctccaagacaggggtgggttccagctgcccgcacgccccgaccttccatcgtaggtaacgcggaagagcccgggagagcgttggtggcgtccgagagcgaggagcgggaaagaggatgggtctgcacggagagtggaaaggcaggctgtgtactctggggaaagtggagcaaggaaggagctacagtggccgacgctggaggtcggctgcagaaaaactagaaaaagtagggaggaaagaggaaaagaggaggcgtctacactgagggggttctagagagggaggggtggactccgtagatgggggtagttcagtctcgaaacctggggcgtgctctgtcctggaggagggaggcgggcagtcggaggggaattgaatggaagttctgtgttggaaatgttttgggagatcttctgtagggggactgtggaagggggtctacattggggtaagtgcaggaggtagaggcttacacgtgaatcgattctgcactgaaataactagggaaagaggatgctaccctgaaagtggggatacttactttcgatgatgtgggggagggaggaggtctatactggcggaattgagggagtggagggtctgcactgaagacgctggggaaggatgtgccatggatatgggaaggaaccctagctgattagagagcctctcgggaggatgggaggatgggaagaggaggtttcctgtttgtacccccgaaaatatgggtgaaggacctgtgccgtggcccgtgagaaggaggtctgggtgcggaaactccaggccaggtgggtccgggggaggccggtcgcgcccaggaaatgccctatacgcgcaggccggaccatgggaaccccaaagccacggatcctgccctggctggtgtcgcagctggacctggggcaactggagggcgtggcctgggtgaacaagagccgcacgcgcttccgcatcccttggaagcacggcctacggcaggatgcacagcaggaggatttcggaatcttccaggcctgggccgaggccactggtgcatatgttcccgggagggataagccagacctgccaacctggaagaggaatttccgctctgccctcaaccgcaaagaagggttgcgtttagcagaggaccggagcaaggaccctcacgacccacataaaatctacgagtttgtgaactcaggagttggggacttttcccagccagacacctctccggacaccaatggtggaggcagtacttctgatacccaggaagacattctggatgagttactgggtaacatggtgttggccccactcccagatccgggacccccaagcctggctgtagcccctgagccctgccctcagcccctgcggagccccagcttggacaatcccactcccttcccaaacctggggccctctgagaacccactgaagcggctgttggtgccgggggaagagtgggagttcgaggtgacagccttctaccggggccgccaagtcttccagcagaccatctcctgcccggagggcctgcggctggtggggtccgaagtgggagacaggacgctgcctggatggccagtcacactgccagaccctggcatgtccctgacagacaggggagtgatgagctacgtgaggcatgtgctgagctgcctgggtgggggactggctctctggcgggccgggcagtggctctgggcccagcggctggggcactgccacacatactgggcagtgagcgaggagctgctccccaacagcgggcatgggcctgatggcgaggtccccaaggacaaggaaggaggcgtgtttgacctggggcccttcattgtaggctcctgggcccccagatctgattaccttcacggaaggaagcggacgctcaccacgctatgccctctggttctgtgtgggggagtcatggccccaggaccagccgtggaccaagaggctcgtgatggtcaaggttgtgcccacgtgcctcagggccttggtagaaatggcccgggtagggggtgcctcctccctggagaatactgtggacctgcacatttccaacagccacccactctccctcacctccgaccagtacaaggcctacctgcaggacttggtggagggcatggatttccagggccctggggagacctgagccctcgctcctcatggtgtgcctccaacccccctgttccccaccacctcaaccaataaactggttcctgct

SEQ ID NO: 1927 - protein, 450 aa, Homo sapiens
MGTPKPRILPWLVSQLDLGQLEGVAWVNKSRTRFRIPWKHGLRQDAQQEDFGIFQAWAEATGAYVPGRDKPDLPTWKRNFRSALNRKEGLRLAEDRSKDPHDPHKIYEFVNSGVGDFSQPDTSPDTNGGGSTSDTQEDILDELLGNMVLAPLPDPGPPSLAVAPEPCPQPLRSPSLDNPTPFPNLGPSENPLKRLLVPGEEWEFEVTAFYRGRQVFQQTISCPEGLRLVGSEVGDRTLPGWPVTLPDPGMSLTDRGVMSYVRHVLSCLGGGLALWRAGQWLWAQRLGHCHTYWAVSEELLPNSGHGPDGEVPKDKEGGVFDLGPFIVGSWAPRSDYLHGRKRTLTTLCPLVLCGGVMAPGPAVDQEARDGQGCAHVPQGLGRNGPGRGCLLPGEYCGPAHFQQPPTLPHLRPVQGLPAGLGGGHGFPGPWGDLSPRSSWCNPPVPHHLNQ

SEQ ID NO: 1928 - DNA, 2366 bp, Homo sapiens
cagcccagcgggccgtcccatcggcttttgggtctgttacccaaagaatgataaagttggttttatttcaagaagtcgatcaaaaagaaagccccagcgctctagagctcagctgacgggaaagggggtgcgcagcctcgagtttgagagctacccggagctccaagacaggggtgggttccagctgcccgcacgccccgaccttccatcgtaggtaacgcggaagagcccgggagagcgttggtggcgtccgagagcgaggagcgggaaagaggatgggtctgcacggagagtggaaaggcaggctgtgtactctggggaaagtggagcaaggaaggagctacagtggccgacgctggaggtcggctgcagaaaaactagaaaaagtagggaggaaagaggaaaagaggaggcgtctacactgagggggttctagagagggaggggtggactccgtagatgggggtagttcagtctcgaaacctggggcgtgctctgtcctggaggagggaggcgggcagtcggaggggaattgaatggaagttctgtgttggaaatgttttgggagatcttctgtagggggactgtggaagggggtctacattggggtaagtgcaggaggtagaggcttacacgtgaatcgattctgcactgaaataactagggaaagaggatgctaccctgaaagtggggatacttactttcgatgatgtgggggagggaggaggtctatactggcggaattgagggagtggagggtctgcactgaagacgctggggaaggatgtgccatggatatgggaaggaaccctagctgattagagagcctctcgggaggatgggaggatgggaagaggaggtttcctgtttgtacccccgaaaatatgggtgaaggacctgtgccgtggcccgtgagaaggaggtctgggtgcggaaactccaggccaggtgggtccgggggaggccggtcgcgcccaggaaatgccctatacgcgcaggccggaccatgggaaccccaaagccacggatcctgccctggctggtgtcgcagctggacctggggcaactggagggcgtggcctgggtgaacaagagccgcacgcgcttccgcatcccttggaagcacggcctacggcaggatgcacagcaggaggatttcggaatcttccaggcctgggccgaggccactggtgcatatgttcccgggagggataagccagacctgccaacctggaagaggaatttccgctctgccctcaaccgcaaagaagggttgcgtttagcagaggaccggagcaaggaccctcacgacccacataaaatctacgagtttgtgaactcaggagttggggacttttcccagccagacacctctccggacaccaatggtggaggcagtacttctgatacccaggaagacattctggatgagttactgggtaacatggtgttggccccactcccagatccgggacccccaagcctggctgtagcccctgagccctgccctcagcccctgcggagccccagcttggacaatcccactcccttcccaaacctggggccctctgagaacccactgaagcggctgttggtgccgggggaagagtgggagttcgaggtgacagccttctaccggggccgccaagtcttccagcagaccatctcctgcccggagggcctgcggctggtggggtccgaagtgggagacaggacgctgcctggatggccagtcacactgccagaccctggcatgtccctgacagacaggggagtgatgagctacgtgaggcatgtgctgagctgcctgggtgggggactggctctctggcgggccgggcagtggctctgggcccagcggctggggcactgccacacatactgggcagtgagcgaggagctgctccccaacagcgggcatgggcctgatggcgaggtccccaaggacaaggaaggaggcgtgtttgacctggggcccttcattgtagatctgattaccttcacggaaggaagcggacgctcaccacgctatgccctctggttctgtgtgggggagtcatggccccaggaccagccgtggaccaagaggctcgtgatggtcaaggttgtgcccacgtgcctcagggccttggtagaaatggcccgggtagggggtgcctcctccctggagaatactgtggacctgcacatttccaacagccacccactctccctcacctccgaccagtacaaggcctacctgcaggacttggtggagggcatggatttccagggccctggggagacctgagccctcgctcctcatggtgtgcctccaacccccctgttccccaccacctcaaccaataaactggttcctgctatga

SEQ ID NO: 1929 - protein, 425 aa, Homo sapiens; identical to SEQ ID NO: 1925
